(19) United States
(12) Patent Application Publication
(10) Pub. No.: US 2021/0371470 A1
(43) Pub. Date: Dec. 2, 2021

(54) COMPOSITIONS AND METHODS FOR DELIVERY OF AAV

(71) Applicant: VOYAGER THERAPEUTICS, INC., Cambridge, MA (US)

(72) Inventors: Giridhar Murlidharan, Cambridge, MA (US); Dinah Wen-Yee Sah, Hopkinton, MA (US); Holger Patzke, Cambridge, MA (US); Todd Carter, Cambridge, MA (US); Jinzhao Hou, Lexington, MA (US); Kei Adachi, Portland, OR (US); Amy Ren, Cambridge, MA (US)

(21) Appl. No.: 17/284,499

(22) PCT Filed: Oct. 11, 2019
(86) PCT No.: PCT/US2019/055756

§ 371 Date: Apr. 12, 2021

Related U.S. Application Data
(60) Provisional application No. 62/744,754, filed on Oct. 12, 2018.
(60) Provisional application No. 62/744,752, filed on Oct. 12, 2018.
(60) Provisional application No. 62/839,889, filed on Apr. 29, 2019.

(51) Int. Cl. C07K 14/005; C12N 7/00; C12N 15/113; A61P 25/28; A61K 9/00; C12N 15/86

(52) U.S. Cl. CPC C07K 14/005; C12N 2310/141; C12N 15/113; A61P 25/28; A61K 9/0019; C12N 15/86; C12N 2750/14121; C12N 2750/14123; C12N 2750/14122; C12N 2750/14171; C12N 2310/14; C12N 2320/32; C12N 2320/35; C12N 2750/14143; C12N 2750/14045; C12N 7/00

(57) ABSTRACT

The disclosure provides compositions and methods for the preparation, manufacture, formulation and therapeutic use of adeno-associated virus (AAV) particles for the prevention and/or treatment of diseases.

### CROSS REFERENCE TO RELATED APPLICATIONS

[0001] This application claims the benefit of U.S. Provisional Patent Application No. 62/744,754, entitled “Compositions and methods for delivery of AAV”, filed Oct. 12, 2018, U.S. Provisional Patent Application No. 62/744,752, entitled “AAV variants with enhanced tropism”, filed Oct. 12, 2018, and U.S. Provisional Patent Application No. 62/839,889, entitled “Compositions and methods for delivery of AAV” filed Apr. 29, 2019; the contents of each of which are herein incorporated by reference in their entirety.

### REFERENCE TO THE SEQUENCE LISTING

[0002] The present application is being filed along with a Sequence Listing in electronic format. The Sequence Listing is provided as a file entitled 2057_1078PCT_SL.txt, created on Oct. 11, 2019, which is 6,765,501 bytes in size. The information in the electronic format of the Sequence Listing is incorporated herein by reference in its entirety.

### FIELD OF THE DISCLOSURE

[0003] The present disclosure relates to compositions, methods and processes for the design, preparation, manufacture, use and/or formulation of adeno-associated virus capsids for improved biodistribution, e.g., improved biodistribution in the central nervous system.

### BACKGROUND

[0004] Adeno-associated viral (AAV) vectors are a promising candidate for therapeutic gene delivery and have proven safe and efficacious in clinical trial.

[0005] Delivery of AAV to some systems in the body has proven to be particularly challenging, requiring invasive surgeries for sufficient levels of gene transfer. For some body systems, intravenous delivery has historically resulted in limited gene transfer, in part due to inefficient transduction into cells. There remains a need in the art for AAV vectors that may be administered by intravenous delivery and yet are able to efficiently target regions critical for treating a multitude of diseases.

[0006] One example of a system where delivery is challenging is the central nervous system. Delivery of AAV to regions of the central nervous system (CNS) has proven to be particularly challenging, requiring invasive surgeries for sufficient levels of gene transfer (See e.g., Bevan et al. Mol Ther. 2011 November; 19(11): 1971-1980). Intravenous delivery has historically resulted in limited gene transfer to the CNS, in part due to the presence of the blood brain barrier (BBB). There remains a need in the art for AAV vectors that may be administered by intravenous delivery and yet are able to efficiently cross the blood brain barrier and target regions of the CNS critical for treating a multitude of CNS diseases.

[0007] The present disclosure addresses this need by providing novel AAV particles with engineered capsid proteins that allow for efficient transduction of CNS tissues following intravenous delivery. Improved CNS transduction may facilitate treatment of CNS disorders with intravenous delivery. Further, the viral genomes of these AAV particles may be altered to suit the needs of any number of CNS diseases, providing platform capsids for crossing the blood brain barrier and targeting of CNS tissues.

### SUMMARY

[0008] The instant disclosure provides an adeno-associated viral (AAV) particle comprising a capsid and a viral genome. The AAV particles transduce to the blood brain barrier upon delivery of the AAV particles to a subject.

[0009] The AAV particle may comprise a capsid or a peptide insert such as, but not limited to, VOY101, VOY201, VOY701, VOY801, VOY1101, AAVPHP.B (PHP.B), AAVPHP.A (PUPA), AAVG2B-26, AAVG2B-13, AAVTH1.1-32, AAVTH1.1-35, AAVPHP.B2 (PHP.B2), AAVPHP.B3 (PHP.B3), AAVPHP.N/PHP.B-DGT, AAVPHP.B-EST, AAVPHP.B-GGT, AAVPHP.B-ATP, AAVPHP.B-ATT-T, AAVPHP.B-DGT-T, AAVPHP.B-GGT-T, AAVPHP.B-SGS, AAVPHP.B-AQP, AAVPHP.B-QQP, AAVPHP.B-SNP(3), AAVPHP.B-SNP, AAVPHP.B-QGT, AAVPHP.B-NQT, AAVPHP.B-EGS, AAVPHP.B-SGN, AAVPHP.B-EGT, AAVPHP.B-DST, AAVPHP.B-DST, AAVPHP.B-STP, AAVPHP.B-PQP, AAVPHP.B-SQP, AAVPHP.B-QLP, AAVPHP.B-TMP, AAVPHP.B-TTP, AAVPHP.S/G2A12, AAVG2A15/G2A3 (G2A3), AAVG2B4 (G2B4), AAVG2B5 (G2B5), PHP.S, AAV1, AAV2, AAV2G9, AAV3, AAV3a, AAV3b, AAV3-3, AAV4, AAV4-4, AAV5, AAV6, AAV6.1, AAV6.2, AAV6.1.2, AAV7, AAV7.2, AAV8, AAV9, AAV9.11, AAV9.13, AAV9.16, AAV9.24, AAV9.45, AAV9.47, AAV9.61, AAV9.68, AAV9.84, AAV9.9, AAV10, AAV11, AAV12, AAV16.3, AAV24.1, AAV27.3, AAV42.12, AAV42-1b, AAV42-2, AAV42-3a, AAV42-3b, AAV42-4, AAV42-5a, AAV42-5b, AAV42-6b, AAV42-8, AAV42-10, AAV42-11, AAV42-12, AAV42-13, AAV42-15, AAV42-aa, AAV43-1, AAV43-12, AAV43-20, AAV43-21, AAV43-23, AAV43-25, AAV43-5, AAV44.1, AAV44.2, AAV44.5, AAV223.1, AAV223.2, AAV223.4, AAV223.5, AAV223.6, AAV223.7, AAV1-7/rh.48, AAV1-8/rh.49, AAV2-15/rh.62, AAV2-3/rh.61, AAV2-4/rh.50, AAV2-5/rh.51, AAV3.1/hu.6, AAV3.1/hu.9, AAV3-9/rh.52, AAV3-11/rh.53, AAV4-8/r11.64, AAV4-9/rh.54, AAV4-19/rh.55, AAV5-3/rh.57, AAV5-22/rh.58, AAV7.3/hu.7, AAV16.8/hu.10, AAV16.12/hu.11, AAV29.3/bb.1, AAV29.5/bb.2, AAV106.1/hu.37, AAV114.3/hu.40, AAV127.2/hu.41, AAV127.5/hu.42, AAV128.3/hu.44, AAV130.4/hu.48, AAV145.1/hu.53, AAV145.5/hu.54, AAV145.6/hu.55, AAV161.10/hu.60, AAV161.6/hu.61, AAV33.12/hu.17, AAV33.4/hu.15, AAV33.8/hu.16, AAV52/hu.19, AAV52.1/hu.20, AAV58.2/hu.25, AAVA3.3, AAVA3.4, AAVA3.5, AAVA3.7, AAVC1, AAVC2, AAVC5, AAV-DJ, AAV-DJ8, AAVF3, AAVF5, AAVH2, AAVrh.72, AAVhu.8, AAVrh.68, AAVrh.70, AAVpi.1, AAVpi.3, AAVpi.2, AAVrh.60, AAVrh.44, AAVrh.65, AAVrh.55, AAVrh.47, AAVrh.69, AAVrh.45, AAVrh.59, AAVhu.12, AAVH6, AAVLK03, AAVH-1/hu.1, AAVH-5/hu.3, AAVLG-10/rh.40, AAVLG-4/rh.38, AAVLG-9/hu.39, AAVN721-8/rh.43, AAVCh.5, AAVCh.5R1, AAVcy.2, AAVcy.3, AAVcy.4, AAVcy.5, AAVCy.5R1, AAVCy.5R2, AAVCy.5R3, AAVCy.5R4, AAVcy.6, AAVhu.1, AAVhu.2, AAVhu.3, AAVhu.4, AAVhu.5, AAVhu.6, AAVhu.7, AAVhu.9, AAVhu.10, AAVhu.11, AAVhu.13, AAVhu.15, AAVhu.16, AAVhu.17, AAVhu.18, AAVhu.20, AAVhu.21, AAVhu.22, AAVhu.23.2, AAVhu.24, AAVhu.25, AAVhu.27, AAVhu.28, AAVhu.29, AAVhu.29R, AAVhu.31, AAVhu.32, AAVhu.34, AAVhu.35, AAVhu.37, AAVhu.39, AAVhu.40, AAVhu.41, AAVhu.42, AAVhu.43, AAVhu.44, AAVhu.44R1, AAVhu.44R2, AAVhu.44R3, AAVhu.45, AAVhu.46, AAVhu.47, AAVhu.48, AAVhu.48R1, AAVhu.48R2, AAVhu.48R3, AAVhu.49, AAVhu.51, AAVhu.52, AAVhu.54, AAVhu.55, AAVhu.56, AAVhu.57, AAVhu.58, AAVhu.60, AAVhu.61, AAVhu.63, AAVhu.64, AAVhu.66, AAVhu.67, AAVhu.14/9, AAVhu.t 19, AAVrh.2, AAVrh.2R, AAVrh.8, AAVrh.8R, AAVrh.10, AAVrh.12, AAVrh.13, AAVrh.13R, AAVrh.14, AAVrh.17, AAVrh.18, AAVrh.19, AAVrh.20, AAVrh.21, AAVrh.22, AAVrh.23, AAVrh.24, AAVrh.25, AAVrh.31, AAVrh.32, AAVrh.33, AAVrh.34, AAVrh.35, AAVrh.36, AAVrh.37, AAVrh.37R2, AAVrh.38, AAVrh.39, AAVrh.40, AAVrh.46, AAVrh.48, AAVrh.48.1, AAVrh.48.1.2, AAVrh.48.2, AAVrh.49, AAVrh.51, AAVrh.52, AAVrh.53, AAVrh.54, AAVrh.56, AAVrh.57, AAVrh.58, AAVrh.61, AAVrh.64, AAVrh.64R1, AAVrh.64R2, AAVrh.67, AAVrh.73, AAVrh.74, AAVrh8R, AAVrh8R A586R mutant, AAVrh8R R533A mutant, AAAV, BAAV, caprine AAV, bovine AAV, AAVhE1.1, AAVhEr1.5, AAVhER1.14, AAVhEr1.8, AAVhEr1.16, AAVhEr1.18, AAVhEr1.35, AAVhEr1.7, AAVhEr1.36, AAVhEr2.29, AAVhEr2.4, AAVhEr2.16, AAVhEr2.30, AAVhEr2.31, AAVhEr2.36, AAVhER1.23, AAVhEr3.1, AAV2.5T, AAV-PAEC, AAV-LK01, AAV-LK02, AAV-LK03, AAV-LK04, AAV-LK05, AAV-LK06, AAV-LK07, AAV-LK08, AAV-LK09, AAV-LK10, AAV-LK11, AAV-LK12, AAV-LK13, AAV-LK14, AAV-LK15, AAV-LK16, AAV-LK17, AAV-LK18, AAV-LK19, AAV-PAEC2, AAV-PAEC4, AAV-PAEC6, AAV-PAEC7, AAV-PAEC8, AAV-PAEC11, AAV-PAEC12, AAV-2-pre-miRNA-101, AAV-8h, AAV-8b, AAV-h, AAV-b, AAV SM 10-2, AAV Shuffle 100-1, AAV Shuffle 100-3, AAV Shuffle 100-7, AAV Shuffle 10-2, AAV Shuffle 10-6, AAV Shuffle 10-8, AAV Shuffle 100-2, AAV SM 10-1, AAV SM 10-8, AAV SM 100-3, AAV SM 100-10, BNP61 AAV, BNP62 AAV, BNP63 AAV, AAVrh.50, AAVrh.43, AAVrh.62, AAVrh.48, AAVhu.19, AAVhu.11, AAVhu.53, AAV4-8/rh.64, AAVLG-9/hu.39, AAV54.5/hu.23, AAV54.2/hu.22, AAV54.7/hu.24, AAV54.1/hu.21, AAV54.4R/hu.27, AAV46.2/hu.28, AAV46.6/hu.29, AAV128.1/hu.43, true type AAV (ttAAV), UPENN AAV 10, Japanese AAV 10 serotypes, AAV CBr-7.1, AAV CBr-7.10, AAV CBr-7.2, AAV CBr-7.3, AAV CBr-7.4, AAV CBr-7.5, AAV CBr-7.7, AAV CBr-7.8, AAV CBr-B7.3, AAV CBr-B7.4, AAV CBr-E1, AAV CBr-E2, AAV CBr-E3, AAV CBr-E4, AAV CBr-E5, AAV CBr-e5, AAV CBr-E6, AAV CBr-E7, AAV CBr-E8, AAV CHt-1, AAV CHt-2, AAV CHt-3, AAV CHt-6.1, AAV CHt-6.10, AAV CHt-6.5, AAV CHt-6.6, AAV CHt-6.7, AAV CHt-6.8, AAV CHt-P1, AAV CHt-P2, AAV CHt-P5, AAV CHt-P6, AAV CHt-P8, AAV CHt-P9, AAV CKd-1, AAV CKd-10, AAV CKd-2, AAV CKd-3, AAV CKd-4, AAV CKd-6, AAV CKd-7, AAV CKd-8, AAV CKd-B1, AAV CKd-B2, AAV CKd-B3, AAV CKd-B4, AAV CKd-B5, AAV CKd-B6, AAV CKd-B7, AAV CKd-B8, AAV CKd-H1, AAV CKd-H2, AAV CKd-H3, AAV CKd-H4, AAV CKd-H5, AAV CKd-H6, AAV CKd-N3, AAV CKd-N4, AAV CKd-N9, AAV CLg-F1, AAV CLg-F2, AAV CLg-F3, AAV CLg-F4, AAV CLg-F5, AAV CLg-F6, AAV CLg-F7, AAV CLg-F8, AAV CLv-1, AAV CLv1-1, AAV Clv1-10, AAV CLv1-2, AAV CLv-12, AAV CLv1-3, AAV CLv-13, AAV CLv1-4, AAV Clv1-7, AAV Clv1-8, AAV Clv1-9, AAV CLv-2, AAV CLv-3, AAV CLv-4, AAV CLv-6, AAV CLv-8, AAV CLv-D1, AAV CLv-D2, AAV CLv-D3, AAV CLv-D4, AAV CLv-D5, AAV CLv-D6, AAV CLv-D7, AAV CLv-D8, AAV CLv-E1, AAV CLv-K1, AAV CLv-K3, AAV CLv-K6, AAV CLv-L4, AAV CLv-L5, AAV CLv-L6, AAV CLv-M1, AAV CLv-M11, AAV CLv-M2, AAV CLv-M5, AAV CLv-M6, AAV CLv-M7, AAV CLv-M8, AAV CLv-M9, AAV CLv-R1, AAV CLv-R2, AAV CLv-R3, AAV CLv-R4, AAV CLv-R5, AAV CLv-R6, AAV CLv-R7, AAV CLv-R8, AAV CLv-R9, AAV CSp-1, AAV CSp-10, AAV CSp-11, AAV CSp-2, AAV CSp-3, AAV CSp-4, AAV CSp-6, AAV CSp-7, AAV CSp-8, AAV CSp-8.10, AAV CSp-8.2, AAV CSp-8.4, AAV CSp-8.5, AAV CSp-8.6, AAV CSp-8.7, AAV CSp-8.8, AAV CSp-8.9, AAV CSp-9, AAV.hu.48R3, AAV.VR-355, AAV3B, AAV4, AAV5, AAVF1/HSC1, AAVF11/HSC11, AAVF12/HSC12, AAVF13/HSC13, AAVF14/HSC14, AAVF15/HSC15, AAVF16/HSC16, AAVF17/HSC17, AAVF2/HSC2, AAVF3/HSC3, AAVF4/HSC4, AAVF5/HSC5, AAVF6/HSC6, AAVF7/HSC7, AAVF8/HSC8, and/or AAVF9/HSC9 and variants thereof. In one aspect, the capsid of the AAV particle is VOY101. In one aspect, the capsid of the AAV particle is VOY201. In one aspect, the capsid of the AAV particle is VOY701. In one aspect, the capsid of the AAV particle is VOY801. In one aspect, the capsid of the AAV particle is VOY1101. In one aspect, the AAV particle comprises a peptide insert and the peptide insert is AAVPHP.N. In one aspect, the AAV particle comprises a peptide insert and the peptide insert is AAVPHP.B. In one aspect, the AAV particle comprises a peptide insert and the peptide insert is AAVPHP.B-EST. In one aspect, the AAV particle comprises a peptide insert and the peptide insert is AAVPHP.B-GGT. In one aspect, the AAV particle comprises a peptide insert and the peptide insert is AAVPHP.B-DGT-T. In one aspect, the AAV particle comprises a peptide insert and the peptide insert is AAVPHP.A. In one aspect, the AAV particle comprises a peptide insert and the peptide insert is AAVPHP.S.

[0010] In one aspect, the AAV particle comprises a viral genome which comprises a nucleic acid sequence positioned between two inverted terminal repeats (ITRs).

[0011] In one aspect, the capsid penetrates the blood brain barrier following delivery of the AAV particle. The delivery may be by any method known in the art, such as, but not limited to, intravenous administration or intracarotid artery delivery.

[0012] In one aspect, the viral genome transduces the peripheral nervous system (PNS) upon delivery of the AAV particle. The delivery may be by any method known in the art, such as, but not limited to, intravenous administration or intracarotid artery delivery.

[0013] The AAV particles of the present disclosure transduce CNS structures following administration. Non-limiting examples of CNS structures include brain, spinal cord, brainstem nuclei, cerebellum, cerebrum, motor cortex, caudate nucleus, thalamus, hypothalamus, cervical spinal cord, thoracic spinal cord, lumbar spinal cord, striatum, substantia nigra, hippocampus, amygdala and/or cerebral cortex.

[0014] In one aspect, AAV particles of the present disclosure transduce PNS structures following administration. Non-limiting examples of PNS structures include the sensory nervous system (e.g., dorsal root ganglia, trigeminal ganglia), the autonomous nervous system (e.g., parasympathetic and sympathetic ganglia), the enteric nervous system and nerve cell clusters in tissues and organs.

[0015] In one aspect, the AAV particle comprises a viral genome which comprises a nucleic acid sequence that, when expressed, inhibits or suppresses the expression of one or more genes of interest (e.g., superoxide dismutase 1 (SOD1), chromosome 9 open reading frame 72 (C9ORF72), TAR DNA binding protein (TARDBP), ataxin 3 (ATXN3), huntingtin (HTT), amyloid precursor protein (APP), apolipoprotein E (APOE), microtubule-associated protein tau (MAPT), alpha synuclein (SNCA), voltage-gated sodium channel alpha subunit 9 (SCN9A) and voltage-gated sodium channel alpha subunit 10 (SCN10A)) in a cell. For each gene of interest, the nucleic acid sequence comprises a sense strand sequence and an antisense strand sequence which may be independently 30 nucleotides in length or less and, the sense and/or antisense strands may comprise a 3′ overhang of at least 1 or at least 2 nucleotides. For each gene of interest, the sense sequence and antisense strand sequence may share a region of complementarity of at least four nucleotides in length (e.g., at least 17 nucleotides in length, between 19 and 21 nucleotides in length, or 19 nucleotides in length). For each gene of interest, the antisense strand may be excised from the AAV particle at a rate of at least 80%, 85%, 90%, 95% or more than 95% or more than 98% or more than 99%. The antisense strand may be excised from the AAV particle at a rate greater than the excision of the sense strand (e.g., 2 times, 5 times, 10 times or more than 10 times greater).

[0016] In some embodiments, the nucleic acid when expressed inhibits or suppresses the expression of two genes in a cell. In some embodiments, the nucleic acid when expressed inhibits or suppresses the expression of three genes in a cell. In some embodiments, the nucleic acid when expressed inhibits or suppresses the expression of four genes in a cell. In some embodiments, the nucleic acid when expressed inhibits or suppresses the expression of five genes in a cell. In some embodiments, the nucleic acid when expressed inhibits or suppresses the expression of six genes in a cell. In some embodiments, the nucleic acid when expressed inhibits or suppresses the expression of seven genes in a cell. In some embodiments, the nucleic acid when expressed inhibits or suppresses the expression of eight genes in a cell. In some embodiments, the nucleic acid when expressed inhibits or suppresses the expression of nine genes in a cell.

[0017] In one aspect, the AAV particle comprises a viral genome which comprises a nucleic acid sequence that expresses a gene of interest (e.g., an antibody, Aromatic L-Amino Acid Decarboxylase (AADC), APOE2, Frataxin, survival motor neuron (SMN) protein, glucocerebrosidase (GCase), N-sulfoglucosamine sulfohydrolase, N-acetyl-alpha-glucosaminidase, iduronate 2-sulfatase, alpha-L-iduronidase, palmitoyl-protein thioesterase 1, tripeptidyl peptidase 1, battenin, CLN5, CLN6 (linclin), MFSD8, CLN8, aspartoacylase (ASPA), progranulin (GRN), MeCP2, beta-galactosidase (GLB1), and gigaxonin (GAN).

[0018] Provided herein are compositions (e.g., pharmaceutical compositions) and formulations comprising AAV particles. The AAV particles may comprise a viral genome comprising a nucleic acid sequence encoding a protein of interest (e.g., an antibody, AADC, APOE2, Frataxin, SMN, GCase, N-sulfoglucosamine sulfohydrolase, N-acetyl-alpha-glucosaminidase, iduronate 2-sulfatase, alpha-L-iduronidase, palmitoyl-protein thioesterase 1, tripeptidyl peptidase 1, battenin, CLN5, CLN6 (linclin), MFSD8, CLN8, ASPA, GRN, MeCP2, GLB1, and/or GAN. The AAV particles may comprise a viral genome comprising nucleic acid sequences that when expressed, inhibits or suppresses the expression of one or more genes of interest (e.g., SOD1, C9ORF72, TARDBP, ATXN3, HTT, APP, APOE, MAPT, SNCA, SCN9A and/or SCN10A) in a cell. For example, the AAV particles may comprise a viral genome comprising nucleic acid sequences that when expressed, inhibits or suppresses the expression of two genes of interest in a cell. For example, the AAV particles may comprise a viral genome comprising nucleic acid sequences that when expressed, inhibits or suppresses the expression of three, four, five, six, seven, eight, or nine genes of interest in a cell

[0019] Provided herein are methods of using AAV particles.

[0020] In one aspect, provided are methods of inhibiting the expression of a target gene in a cell (e.g., mammalian cell, or mammalian cell of the CNS or PNS).

[0021] In one aspect, provided are methods of expressing, or increasing the expression of, a target gene in a cell (e.g., mammalian cell, or mammalian cell of the CNS or PNS).

[0022] In one aspect, provided are methods for treating and/or ameliorating a neurological disease in a subject by administering a therapeutically effective amount of a composition comprising the AAV particles described herein. The administration may be by intravenous or intracarotid artery delivery. The methods may be used to increase the expression of a protein of interest (e.g., an antibody, AADC, APOE2, Frataxin, SMN, GCase, N-sulfoglucosamine sulfohydrolase, N-acetyl-alpha-glucosaminidase, iduronate 2-sulfatase, alpha-L-iduronidase, palmitoyl-protein thioesterase 1, tripeptidyl peptidase 1, battenin, CLN5, CLN6 (linclin), MFSD8, CLN8, ASPA, GRN, MeCP2, GLB1, and/or GAN. The methods may be used to decrease the amount of expression of a gene of interest (e.g., SOD1, C9ORF72, TARDBP, ATXN3, HTT, APP, APOE, MAPT, SNCA, SCN9A and/or SCN10A).

[0023] In one aspect, provided are methods for altering the level of a protein or gene of interest by administration of the AAV particles described herein. The administration may be by intravenous or intracarotid artery delivery. The methods may be used to increase the expression of a protein of interest (e.g., an antibody, AADC, APOE2, Frataxin, SMN, GCase, N-sulfoglucosamine sulfohydrolase, N-acetyl-alpha-glucosaminidase, iduronate 2-sulfatase, alpha-L-iduronidase, palmitoyl-protein thioesterase 1, tripeptidyl peptidase 1, battenin, CLN5, CLN6 (linclin), MFSD8, CLN8, ASPA, GRN, MeCP2, GLB1, and/or GAN. The methods may be used to decrease the amount of expression of a gene of interest (e.g., SOD1, C9ORF72, TARDBP, ATXN3, HTT, APP, APOE, MAPT, SNCA, SCN9A and/or SCN10A). The methods may be used to alter the level of the target protein or gene in the CNS and/or PNS.

### BRIEF DESCRIPTION OF THE DRAWINGS

[0024] The foregoing and other objects, features and advantages will be apparent from the following description of particular embodiments of the disclosure, as illustrated in the accompanying drawings. The drawings are not necessarily to scale, emphasis instead being placed upon illustrating the principles of various embodiments of the disclosure.

[0025] FIG. 1 is a schematic of a viral genome.

### DETAILED DESCRIPTION

[0026] The details of one or more embodiments of the disclosure are set forth in the accompanying description below. Although any materials and methods similar or equivalent to those described herein can be used in the practice or testing of the compositions of the present disclosure, the preferred materials and methods are now described. Other features, objects and advantages of the disclosure will be apparent from the description, drawings, and claims. In the description, the singular forms also include the plural unless the context clearly dictates otherwise. Unless defined otherwise, all technical and scientific terms used herein have the same meaning as commonly understood by one of ordinary skill in the art to which this disclosure belongs. In the case of conflict, the present description will control.

[0027] According to the present disclosure, AAV particles with enhanced tropism for a target tissue (e.g., CNS) are provided, as well as associated processes for their targeting, preparation, formulation and use. Targeting peptides and nucleic acid sequences encoding the targeting peptides are provided. These targeting peptides may be inserted into an AAV capsid protein sequence to alter tropism to a particular cell-type, tissue, organ or organism, in vivo, ex vivo or in vitro.

[0028] As used herein, an “AAV particle” or “AAV vector” comprises a capsid protein and a viral genome, wherein the viral genome comprises at least one payload region and at least one inverted terminal repeat (ITR). The AAV particle and/or its component capsid and viral genome may be engineered to alter tropism to a particular cell-type, tissue, organ or organism.

[0029] As used herein, “viral genome” or “vector genome” refers to the nucleic acid sequence(s) encapsulated in an AAV particle. A viral genome comprises a nucleic acid sequence with at least one payload region encoding a payload and at least one ITR.

[0030] As used herein, a “payload region” is any nucleic acid molecule which encodes one or more “payloads” of the disclosure. As non-limiting examples, a payload region may be a nucleic acid sequence encoding a payload comprising an RNAi agent or a polypeptide.

[0031] As used herein, a “targeting peptide” refers to a peptide of 3-20 amino acids in length. These targeting peptides may be inserted into, attached to, or substituted into a parent amino acid sequence to alter the characteristics (e.g., tropism) of the parent protein. As a non-limiting example, the targeting peptide can be inserted into an AAV capsid sequence for enhanced targeting to a desired cell-type, tissue, organ or organism. A targeting peptide may also be referred to as a “peptide insert” or simply as a “peptide” or “insert”.

[0032] The AAV particles and payloads of the disclosure may be delivered to one or more target cells, tissues, organs, or organisms. In a preferred embodiment, the AAV particles of the disclosure demonstrate enhanced tropism for a target cell type, tissue or organ. As a non-limiting example, the AAV particle may have enhanced tropism for cells and tissues of the central or peripheral nervous systems (CNS and PNS, respectively). The AAV particles of the disclosure may, in addition, or alternatively, have decreased tropism for an undesired target cell-type, tissue or organ.

### I. Compositions

### Adeno-Associated Viruses (AAVs) and AAV Particles

[0033] Adeno-associated viruses (AAV) are small non-enveloped icosahedral capsid viruses of the Parvoviridae family characterized by a single stranded DNA viral genome. Parvoviridae family viruses consist of two subfamilies: Parvovirinae, which infect vertebrates, and Densovirinae, which infect invertebrates. The Parvoviridae family comprises the Dependovirus genus which includes AAV, capable of replication in vertebrate hosts including, but not limited to, human, primate, bovine, canine, equine, and ovine species.

[0034] The parvoviruses and other members of the Parvoviridae family are generally described in Kenneth I. Berns, “Parvoviridae: The Viruses and Their Replication,” Chapter 69 in FIELDS VIROLOGY (3d Ed. 1996), the contents of which are incorporated by reference in their entirety.

[0035] AAV have proven to be useful as a biological tool due to their relatively simple structure, their ability to infect a wide range of cells (including quiescent and dividing cells) without integration into the host genome and without replicating, and their relatively benign immunogenic profile. The genome of the virus may be manipulated to contain a minimum of components for the assembly of a functional recombinant virus, or viral particle, which is loaded with or engineered to target a particular tissue and express or deliver a desired payload.

[0036] The wild-type AAV vector genome is a linear, single-stranded DNA (ssDNA) molecule approximately 5,000 nucleotides (nt) in length. Inverted terminal repeats (ITRs) traditionally cap the viral genome at both the 5′ and the 3′ end, providing origins of replication for the viral genome. While not wishing to be bound by theory, an AAV viral genome typically comprises two ITR sequences. These ITRs have a characteristic T-shaped hairpin structure defined by a self-complementary region (145 nt in wild-type AAV) at the 5′ and 3′ ends of the ssDNA which form an energetically stable double stranded region. The double stranded hairpin structures comprise multiple functions including, but not limited to, acting as an origin for DNA replication by functioning as primers for the endogenous DNA polymerase complex of the host viral replication cell.

[0037] The wild-type AAV viral genome further comprises nucleotide sequences for two open reading frames, one for the four non-structural Rep proteins (Rep78, Rep68, Rep52, Rep40, encoded by Rep genes) and one for the three capsid, or structural, proteins (VP1, VP2, VP3, encoded by capsid genes or Cap genes). The Rep proteins are important for replication and packaging, while the capsid proteins are assembled to create the protein shell of the AAV, or AAV capsid. Alternative splicing and alternate initiation codons and promoters result in the generation of four different Rep proteins from a single open reading frame and the generation of three capsid proteins from a single open reading frame. Though it varies by AAV serotype, as a non-limiting example, for AAV9/hu.14 (SEQ ID NO: 123 of U.S. Pat. No. 7,906,111, the contents of which are herein incorporated by reference in their entirety) VP1 refers to amino acids 1-736, VP2 refers to amino acids 138-736, and VP3 refers to amino acids 203-736. In other words, VP1 is the full length capsid sequence, while VP2 and VP3 are shorter components of the whole. As a result, changes in the sequence in the VP3 region, are also changes to VP1 and VP2, however, the percent difference as compared to the parent sequence will be greatest for VP3 since it is the shortest sequence of the three. Though described here in relation to the amino acid sequence, the nucleic acid sequence encoding these proteins can be similarly described. Together, the three capsid proteins assemble to create the AAV capsid protein. While not wishing to be bound by theory, the AAV capsid protein typically comprises a molar ratio of 1:1:10 of VP1:VP2:VP3. As used herein, an “AAV serotype” is defined primarily by the AAV capsid. In some instances, the ITRs are also specifically described by the AAV serotype (e.g., AAV2/9).

[0038] For use as a biological tool, the wild-type AAV viral genome can be modified to replace the rep/cap sequences with a nucleic acid sequence comprising a payload region with at least one ITR region. Typically, in recombinant AAV viral genomes there are two ITR regions. The rep/cap sequences can be provided in trans during production to generate AAV particles.

[0039] In addition to the encoded heterologous payload, AAV vectors may comprise the viral genome, in whole or in part, of any naturally occurring and/or recombinant AAV serotype nucleotide sequence or variant. AAV variants may have sequences of significant homology at the nucleic acid (genome or capsid) and amino acid levels (capsids), to produce constructs which are generally physical and functional equivalents, replicate by similar mechanisms, and assemble by similar mechanisms. Chiorini et al., J. Vir. 71: 6823-33 (1997); Srivastava et al., J. Vir. 45:555-64 (1983); Chiorini et al., J. Vir. 73:1309-1319 (1999); Rutledge et al., J. Vir. 72:309-319 (1998); and Wu et al., J. Vir. 74: 8635-47 (2000), the contents of each of which are incorporated herein by reference in their entirety.

[0040] In some embodiments, AAV particles of the present disclosure are recombinant AAV viral vectors which are replication defective and lacking sequences encoding functional Rep and Cap proteins within their viral genome. These defective AAV vectors may lack most or all parental coding sequences and essentially carry only one or two AAV ITR sequences and the nucleic acid of interest for delivery to a cell, a tissue, an organ, or an organism.

[0041] In some embodiments, the viral genome of the AAV particles of the present disclosure comprise at least one control element which provides for the replication, transcription, and translation of a coding sequence encoded therein. Not all of the control elements need always be present as long as the coding sequence is capable of being replicated, transcribed, and/or translated in an appropriate host cell. Non-limiting examples of expression control elements include sequences for transcription initiation and/or termination, promoter and/or enhancer sequences, efficient RNA processing signals such as splicing and polyadenylation signals, sequences that stabilize cytoplasmic mRNA, sequences that enhance translation efficacy (e.g., Kozak consensus sequence), sequences that enhance protein stability, and/or sequences that enhance protein processing and/or secretion.

[0042] According to the present disclosure, AAV particles for use in therapeutics and/or diagnostics comprise a virus that has been distilled or reduced to the minimum components necessary for transduction of a nucleic acid payload or cargo of interest. In this manner, AAV particles are engineered as vehicles for specific delivery while lacking the deleterious replication and/or integration features found in wild-type viruses.

[0043] AAV vectors of the present disclosure may be produced recombinantly and may be based on adeno-associated virus (AAV) parent or reference sequences. As used herein, a “vector” is any molecule or moiety which transports, transduces, or otherwise acts as a carrier of a heterologous molecule such as the nucleic acids described herein.

[0044] In addition to single stranded AAV viral genomes (e.g., ssAAVs), the present disclosure also provides for self-complementary AAV (scAAVs) viral genomes. scAAV vector genomes contain DNA strands which anneal together to form double stranded DNA. By skipping second strand synthesis, scAAVs allow for rapid expression in the transduced cell.

[0045] In some embodiments, the AAV particle of the present disclosure is an scAAV.

[0046] In some embodiments, the AAV particle of the present disclosure is an ssAAV.

[0047] Methods for producing and/or modifying AAV particles are disclosed in the art such as pseudotyped AAV vectors (PCT Patent Publication Nos. WO200028004; WO200123001; WO2004112727; WO2005005610; and WO2005072364, the content of each of which is incorporated herein by reference in its entirety).

[0048] AAV particles may be modified to enhance the efficiency of delivery. Such modified AAV particles can be packaged efficiently and be used to successfully infect the target cells at high frequency and with minimal toxicity. In some embodiments, the capsids of the AAV particles are engineered according to the methods described in US Publication Number US20130195801, the contents of which are incorporated herein by reference in their entirety.

[0049] In some embodiments, the AAV particles comprising a payload region encoding the polypeptides of the disclosure may be introduced into mammalian cells (e.g., human cells).

[0050] In some embodiments, the AAV particles of the disclosure may comprise a capsid with an inserted targeting peptide and a viral genome, wherein the AAV particle may have enhanced tropism for a cell-type or tissue of the human CNS.

### AAV Capsids and Serotypes

[0051] AAV particles of the present disclosure may comprise or be derived from any natural or recombinant AAV serotype.

[0052] AAV serotypes may differ in characteristics such as, but not limited to, packaging, tropism, transduction and immunogenic profiles. While not wishing to be bound by theory, the AAV capsid protein is often considered to be the driver of AAV particle tropism to a particular tissue.

[0053] According to the present disclosure, the AAV particles may utilize or be based on a serotype or include a peptide selected from any of the following VOY101, VOY201, VOY701, VOY801, VOY1101, AAVPHP.B (PHP.B), AAVPHP.A (PHP.A), AAVG2B-26, AAVG2B-13, AAVTH1.1-32, AAVTH1.1-35, AAVPHP.B2 (PHP.B2), AAVPHP.B3 (PHP.B3), AAVPHP.N/PHP.B-DGT, AAVPHP.B-EST, AAVPHP.B-GGT, AAVPHP.B-ATP, AAVPHP.B-ATT-T, AAVPHP.B-DGT-T, AAVPHP.B-GGT-T, AAVPHP.B-SGS, AAVPHP.B-AQP, AAVPHP.B-QQP, AAVPHP.B-SNP(3), AAVPHP.B-SNP, AAVPHP.B-QGT, AAVPHP.B-NQT, AAVPHP.B-EGS, AAVPHP.B-SGN, AAVPHP.B-EGT, AAVPHP.B-DST, AAVPHP.B-DST, AAVPHP.B-STP, AAVPHP.B-PQP, AAVPHP.B-SQP, AAVPHP.B-QLP, AAVPHP.B-TMP, AAVPHP.B-TTP, AAVPHP.S/G2A12, AAVG2A15/G2A3 (G2A3), AAVG2B4 (G2B4), AAVG2B5 (G2B5), PUPS, AAV1, AAV2, AAV2G9, AAV3, AAV3a, AAV3b, AAV3-3, AAV4, AAV4-4, AAV5, AAV6, AAV6.1, AAV6.2, AAV6.1.2, AAV7, AAV7.2, AAV8, AAV9, AAV9.11, AAV9.13, AAV9.16, AAV9.24, AAV9.45, AAV9.47, AAV9.61, AAV9.68, AAV9.84, AAV9.9, AAV10, AAV11, AAV12, AAV16.3, AAV24.1, AAV27.3, AAV42.12, AAV42-1b, AAV42-2, AAV42-3a, AAV42-3b, AAV42-4, AAV42-5a, AAV42-5b, AAV42-6b, AAV42-8, AAV42-10, AAV42-11, AAV42-12, AAV42-13, AAV42-15, AAV42-aa, AAV43-1, AAV43-12, AAV43-20, AAV43-21, AAV43-23, AAV43-25, AAV43-5, AAV44.1, AAV44.2, AAV44.5, AAV223.1, AAV223.2, AAV223.4, AAV223.5, AAV223.6, AAV223.7, AAV1-7/rh.48, AAV1-8/rh.49, AAV2-15/rh.62, AAV2-3/rh.61, AAV2-4/rh.50, AAV2-5/rh.51, AAV3.1/hu.6, AAV3.1/hu.9, AAV3-9/rh.52, AAV3-11/rh.53, AAV4-8/r11.64, AAV4-9/rh.54, AAV4-19/rh.55, AAV5-3/rh.57, AAV5-22/rh.58, AAV7.3/hu.7, AAV16.8/hu.10, AAV16.12/hu.11, AAV29.3/bb.1, AAV29.5/bb.2, AAV106.1/hu.37, AAV114.3/hu.40, AAV127.2/hu.41, AAV127.5/hu.42, AAV128.3/hu.44, AAV130.4/hu.48, AAV145.1/hu.53, AAV145.5/hu.54, AAV145.6/hu.55, AAV161.10/hu.60, AAV161.6/hu.61, AAV33.12/hu.17, AAV33.4/hu.15, AAV33.8/hu.16, AAV52/hu.19, AAV52.1/hu.20, AAV58.2/hu.25, AAVA3.3, AAVA3.4, AAVA3.5, AAVA3.7, AAVC1, AAVC2, AAVC5, AAV-DJ, AAV-DJ8, AAVF3, AAVF5, AAVH2, AAVrh.72, AAVhu.8, AAVrh.68, AAVrh.70, AAVpi.1, AAVpi.3, AAVpi.2, AAVrh.60, AAVrh.44, AAVrh.65, AAVrh.55, AAVrh.47, AAVrh.69, AAVrh.45, AAVrh.59, AAVhu.12, AAVH6, AAVLK03, AAVH-1/hu.1, AAVH-5/hu.3, AAVLG-10/rh.40, AAVLG-4/rh.38, AAVLG-9/hu.39, AAVN721-8/rh.43, AAVCh.5, AAVCh.5R1, AAVcy.2, AAVcy.3, AAVcy.4, AAVcy.5, AAVCy.5R1, AAVCy.5R2, AAVCy.5R3, AAVCy.5R4, AAVcy.6, AAVhu.1, AAVhu.2, AAVhu.3, AAVhu.4, AAVhu.5, AAVhu.6, AAVhu.7, AAVhu.9, AAVhu.10, AAVhu.11, AAVhu.13, AAVhu.15, AAVhu.16, AAVhu.17, AAVhu.18, AAVhu.20, AAVhu.21, AAVhu.22, AAVhu.23.2, AAVhu.24, AAVhu.25, AAVhu.27, AAVhu.28, AAVhu.29, AAVhu.29R, AAVhu.31, AAVhu.32, AAVhu.34, AAVhu.35, AAVhu.37, AAVhu.39, AAVhu.40, AAVhu.41, AAVhu.42, AAVhu.43, AAVhu.44, AAVhu.44R1, AAVhu.44R2, AAVhu.44R3, AAVhu.45, AAVhu.46, AAVhu.47, AAVhu.48, AAVhu.48R1, AAVhu.48R2, AAVhu.48R3, AAVhu.49, AAVhu.51, AAVhu.52, AAVhu.54, AAVhu.55, AAVhu.56, AAVhu.57, AAVhu.58, AAVhu.60, AAVhu.61, AAVhu.63, AAVhu.64, AAVhu.66, AAVhu.67, AAVhu.14/9, AAVhu.t 19, AAVrh.2, AAVrh.2R, AAVrh.8, AAVrh.8R, AAVrh.10, AAVrh.12, AAVrh.13, AAVrh.13R, AAVrh.14, AAVrh.17, AAVrh.18, AAVrh.19, AAVrh.20, AAVrh.21, AAVrh.22, AAVrh.23, AAVrh.24, AAVrh.25, AAVrh.31, AAVrh.32, AAVrh.33, AAVrh.34, AAVrh.35, AAVrh.36, AAVrh.37, AAVrh.37R2, AAVrh.38, AAVrh.39, AAVrh.40, AAVrh.46, AAVrh.48, AAVrh.48.1, AAVrh.48.1.2, AAVrh.48.2, AAVrh.49, AAVrh.51, AAVrh.52, AAVrh.53, AAVrh.54, AAVrh.56, AAVrh.57, AAVrh.58, AAVrh.61, AAVrh.64, AAVrh.64R1, AAVrh.64R2, AAVrh.67, AAVrh.73, AAVrh.74, AAVrh8R, AAVrh8R A586R mutant, AAVrh8R R533A mutant, AAAV, BAAV, caprine AAV, bovine AAV, AAVhE1.1, AAVhEr1.5, AAVhER1.14, AAVhEr1.8, AAVhEr1.16, AAVhEr1.18, AAVhEr1.35, AAVhEr1.7, AAVhEr1.36, AAVhEr2.29, AAVhEr2.4, AAVhEr2.16, AAVhEr2.30, AAVhEr2.31, AAVhEr2.36, AAVhER1.23, AAVhEr3.1, AAV2.5T, AAV-PAEC, AAV-LK01, AAV-LK02, AAV-LK03, AAV-LK04, AAV-LK05, AAV-LK06, AAV-LK07, AAV-LK08, AAV-LK09, AAV-LK10, AAV-LK11, AAV-LK12, AAV-LK13, AAV-LK14, AAV-LK15, AAV-LK16, AAV-LK17, AAV-LK18, AAV-LK19, AAV-PAEC2, AAV-PAEC4, AAV-PAEC6, AAV-PAEC7, AAV-PAEC8, AAV-PAEC11, AAV-PAEC12, AAV-2-pre-miRNA-101, AAV-8h, AAV-8b, AAV-h, AAV-b, AAV SM 10-2, AAV Shuffle 100-1, AAV Shuffle 100-3, AAV Shuffle 100-7, AAV Shuffle 10-2, AAV Shuffle 10-6, AAV Shuffle 10-8, AAV Shuffle 100-2, AAV SM 10-1, AAV SM 10-8, AAV SM 100-3, AAV SM 100-10, BNP61 AAV, BNP62 AAV, BNP63 AAV, AAVrh.50, AAVrh.43, AAVrh.62, AAVrh.48, AAVhu.19, AAVhu.11, AAVhu.53, AAV4-8/rh.64, AAVLG-9/hu.39, AAV54.5/hu.23, AAV54.2/hu.22, AAV54.7/hu.24, AAV54.1/hu.21, AAV54.4R/hu.27, AAV46.2/hu.28, AAV46.6/hu.29, AAV128.1/hu.43, true type AAV (ttAAV), UPENN AAV 10, Japanese AAV 10 serotypes, AAV CBr-7.1, AAV CBr-7.10, AAV CBr-7.2, AAV CBr-7.3, AAV CBr-7.4, AAV CBr-7.5, AAV CBr-7.7, AAV CBr-7.8, AAV CBr-B7.3, AAV CBr-B7.4, AAV CBr-E1, AAV CBr-E2, AAV CBr-E3, AAV CBr-E4, AAV CBr-E5, AAV CBr-e5, AAV CBr-E6, AAV CBr-E7, AAV CBr-E8, AAV CHt-1, AAV CHt-2, AAV CHt-3, AAV CHt-6.1, AAV CHt-6.10, AAV CHt-6.5, AAV CHt-6.6, AAV CHt-6.7, AAV CHt-6.8, AAV CHt-P1, AAV CHt-P2, AAV CHt-P5, AAV CHt-P6, AAV CHt-P8, AAV CHt-P9, AAV CKd-1, AAV CKd-10, AAV CKd-2, AAV CKd-3, AAV CKd-4, AAV CKd-6, AAV CKd-7, AAV CKd-8, AAV CKd-B1, AAV CKd-B2, AAV CKd-B3, AAV CKd-B4, AAV CKd-B5, AAV CKd-B6, AAV CKd-B7, AAV CKd-B8, AAV CKd-H1, AAV CKd-H2, AAV CKd-H3, AAV CKd-H4, AAV CKd-H5, AAV CKd-H6, AAV CKd-N3, AAV CKd-N4, AAV CKd-N9, AAV CLg-F1, AAV CLg-F2, AAV CLg-F3, AAV CLg-F4, AAV CLg-F5, AAV CLg-F6, AAV CLg-F7, AAV CLg-F8, AAV CLv-1, AAV CLv1-1, AAV Clv1-10, AAV CLv1-2, AAV CLv-12, AAV CLv1-3, AAV CLv-13, AAV CLv1-4, AAV Clv1-7, AAV Clv1-8, AAV Clv1-9, AAV CLv-2, AAV CLv-3, AAV CLv-4, AAV CLv-6, AAV CLv-8, AAV CLv-D1, AAV CLv-D2, AAV CLv-D3, AAV CLv-D4, AAV CLv-D5, AAV CLv-D6, AAV CLv-D7, AAV CLv-D8, AAV CLv-E1, AAV CLv-K1, AAV CLv-K3, AAV CLv-K6, AAV CLv-L4, AAV CLv-L5, AAV CLv-L6, AAV CLv-M1, AAV CLv-M11, AAV CLv-M2, AAV CLv-M5, AAV CLv-M6, AAV CLv-M7, AAV CLv-M8, AAV CLv-M9, AAV CLv-R1, AAV CLv-R2, AAV CLv-R3, AAV CLv-R4, AAV CLv-R5, AAV CLv-R6, AAV CLv-R7, AAV CLv-R8, AAV CLv-R9, AAV CSp-1, AAV CSp-10, AAV CSp-11, AAV CSp-2, AAV CSp-3, AAV CSp-4, AAV CSp-6, AAV CSp-7, AAV CSp-8, AAV CSp-8.10, AAV CSp-8.2, AAV CSp-8.4, AAV CSp-8.5, AAV CSp-8.6, AAV CSp-8.7, AAV CSp-8.8, AAV CSp-8.9, AAV CSp-9, AAV.hu.48R3, AAV.VR-355, AAV3B, AAV4, AAV5, AAVF1/HSC1, AAVF11/HSC11, AAVF12/HSC12, AAVF13/HSC13, AAVF14/HSC14, AAVF15/HSC15, AAVF16/HSC16, AAVF17/HSC17, AAVF2/HSC2, AAVF3/HSC3, AAVF4/HSC4, AAVF5/HSC5, AAVF6/HSC6, AAVF7/HSC7, AAVF8/HSC8, and/or AAVF9/HSC9 and variants thereof.

[0054] In some embodiments, the AAV serotype may be, or have, a sequence as described in U.S. Patent Application Publication No. US20030138772, the contents of which are herein incorporated by reference in their entirety, such as, but not limited to, AAV1 (SEQ ID NO: 6 and 64 of US20030138772), AAV2 (SEQ ID NO: 7 and 70 of US20030138772), AAV3 (SEQ ID NO: 8 and 71 of US20030138772), AAV4 (SEQ ID NO: 63 of US20030138772), AAV5 (SEQ ID NO: 114 of US20030138772), AAV6 (SEQ ID NO: 65 of US20030138772), AAV7 (SEQ ID NO: 1-3 of US20030138772), AAV8 (SEQ ID NO: 4 and 95 of US20030138772), AAV9 (SEQ ID NO: 5 and 100 of US20030138772), AAV10 (SEQ ID NO: 117 of US20030138772), AAV11 (SEQ ID NO: 118 of US20030138772), AAV12 (SEQ ID NO: 119 of US20030138772), AAVrh10 (amino acids 1 to 738 of SEQ ID NO: 81 of US20030138772), AAV16.3 (US20030138772 SEQ ID NO: 10), AAV29.3/bb.1 (US20030138772 SEQ ID NO: 11), AAV29.4 (US20030138772 SEQ ID NO: 12), AAV29.5/bb.2 (US20030138772 SEQ ID NO: 13), AAV1.3 (US20030138772 SEQ ID NO: 14), AAV13.3 (US20030138772 SEQ ID NO: 15), AAV24.1 (US20030138772 SEQ ID NO: 16), AAV27.3 (US20030138772 SEQ ID NO: 17), AAV7.2 (US20030138772 SEQ ID NO: 18), AAVC1 (US20030138772 SEQ ID NO: 19), AAVC3 (US20030138772 SEQ ID NO: 20), AAVC5 (US20030138772 SEQ ID NO: 21), AAVF1 (US20030138772 SEQ ID NO: 22), AAVF3 (US20030138772 SEQ ID NO: 23), AAVF5 (US20030138772 SEQ ID NO: 24), AAVH6 (US20030138772 SEQ ID NO: 25), AAVH2 (US20030138772 SEQ ID NO: 26), AAV42-8 (US20030138772 SEQ ID NO: 27), AAV42-15 (US20030138772 SEQ ID NO: 28), AAV42-5b (US20030138772 SEQ ID NO: 29), AAV42-1b (US20030138772 SEQ ID NO: 30), AAV42-13 (US20030138772 SEQ ID NO: 31), AAV42-3a (US20030138772 SEQ ID NO: 32), AAV42-4 (US20030138772 SEQ ID NO: 33), AAV42-5a (US20030138772 SEQ ID NO: 34), AAV42-10 (US20030138772 SEQ ID NO: 35), AAV42-3b (US20030138772 SEQ ID NO: 36), AAV42-11 (US20030138772 SEQ ID NO: 37), AAV42-6b (US20030138772 SEQ ID NO: 38), AAV43-1 (US20030138772 SEQ ID NO: 39), AAV43-5 (US20030138772 SEQ ID NO: 40), AAV43-12 (US20030138772 SEQ ID NO: 41), AAV43-20 (US20030138772 SEQ ID NO: 42), AAV43-21 (US20030138772 SEQ ID NO: 43), AAV43-23 (US20030138772 SEQ ID NO: 44), AAV43-25 (US20030138772 SEQ ID NO: 45), AAV44.1 (US20030138772 SEQ ID NO: 46), AAV44.5 (US20030138772 SEQ ID NO: 47), AAV223.1 (US20030138772 SEQ ID NO: 48), AAV223.2 (US20030138772 SEQ ID NO: 49), AAV223.4 (US20030138772 SEQ ID NO: 50), AAV223.5 (US20030138772 SEQ ID NO: 51), AAV223.6 (US20030138772 SEQ ID NO: 52), AAV223.7 (US20030138772 SEQ ID NO: 53), AAVA3.4 (US20030138772 SEQ ID NO: 54), AAVA3.5 (US20030138772 SEQ ID NO: 55), AAVA3.7 (US20030138772 SEQ ID NO: 56), AAVA3.3 (US20030138772 SEQ ID NO: 57), AAV42.12 (US20030138772 SEQ ID NO: 58), AAV44.2 (US20030138772 SEQ ID NO: 59), AAV42-2 (US20030138772 SEQ ID NO: 9), or variants thereof.

[0055] In some embodiments, the AAV serotype may be, or have, a sequence as described in U.S. Patent Application Publication No. US20150159173, the contents of which are herein incorporated by reference in their entirety, such as, but not limited to, AAV2 (SEQ ID NO: 7 and 23 of US20150159173), rh20 (SEQ ID NO: 1 of US20150159173), rh32/33 (SEQ ID NO: 2 of US20150159173), rh39 (SEQ ID NO: 3, 20 and 36 of US20150159173), rh46 (SEQ ID NO: 4 and 22 of US20150159173), rh73 (SEQ ID NO: 5 of US20150159173), rh74 (SEQ ID NO: 6 of US20150159173), AAV6.1 (SEQ ID NO: 29 of US20150159173), rh.8 (SEQ ID NO: 41 of US20150159173), rh.48.1 (SEQ ID NO: 44 of US20150159173), hu.44 (SEQ ID NO: 45 of US20150159173), hu.29 (SEQ ID NO: 42 of US20150159173), hu.48 (SEQ ID NO: 38 of US20150159173), rh54 (SEQ ID NO: 49 of US20150159173), AAV2 (SEQ ID NO: 7 of US20150159173), cy.5 (SEQ ID NO: 8 and 24 of US20150159173), rh.10 (SEQ ID NO: 9 and 25 of US20150159173), rh.13 (SEQ ID NO: 10 and 26 of US20150159173), AAV1 (SEQ ID NO: 11 and 27 of US20150159173), AAV3 (SEQ ID NO: 12 and 28 of US20150159173), AAV6 (SEQ ID NO: 13 and 29 of US20150159173), AAV7 (SEQ ID NO: 14 and 30 of US20150159173), AAV8 (SEQ ID NO: 15 and 31 of US20150159173), hu.13 (SEQ ID NO: 16 and 32 of US20150159173), hu.26 (SEQ ID NO: 17 and 33 of US20150159173), hu.37 (SEQ ID NO: 18 and 34 of US20150159173), hu.53 (SEQ ID NO: 19 and 35 of US20150159173), rh.43 (SEQ ID NO: 21 and 37 of US20150159173), rh2 (SEQ ID NO: 39 of US20150159173), rh.37 (SEQ ID NO: 40 of US20150159173), rh.64 (SEQ ID NO: 43 of US20150159173), rh.48 (SEQ ID NO: 44 of US20150159173), ch.5 (SEQ ID NO 46 of US20150159173), rh.67 (SEQ ID NO: 47 of US20150159173), rh.58 (SEQ ID NO: 48 of US20150159173), or variants thereof including, but not limited to Cy5R1, Cy5R2, Cy5R3, Cy5R4, rh.13R, rh.37R2, rh.2R, rh.8R, rh.48.1, rh.48.2, rh.48.1.2, hu.44R1, hu.44R2, hu.44R3, hu.29R, ch.5R1, rh64R1, rh64R2, AAV6.2, AAV6.1, AAV6.12, hu.48R1, hu.48R2, and hu.48R3.

[0056] In some embodiments, the AAV serotype may be, or have, a sequence as described in U.S. Pat. No. 7,198,951, the contents of which are herein incorporated by reference in their entirety, such as, but not limited to, AAV9 (SEQ ID NO: 1-3 of U.S. Pat. No. 7,198,951), AAV2 (SEQ ID NO: 4 of U.S. Pat. No. 7,198,951), AAV1 (SEQ ID NO: 5 of U.S. Pat. No. 7,198,951), AAV3 (SEQ ID NO: 6 of U.S. Pat. No. 7,198,951), and AAV8 (SEQ ID NO: 7 of U.S. Pat. No. 7,198,951).

[0057] In some embodiments, the AAV serotype may be, or have, a mutation in the AAV9 sequence as described by N Pulicherla et al. (Molecular Therapy 19(6):1070-1078 (2011), the contents of which are herein incorporated by reference in their entirety), such as but not limited to, AAV9.9, AAV9.11, AAV9.13, AAV9.16, AAV9.24, AAV9.45, AAV9.47, AAV9.61, AAV9.68, AAV9.84.

[0058] In some embodiments, the AAV serotype may be, or have, a sequence as described in U.S. Pat. No. 6,156,303, the contents of which are herein incorporated by reference in their entirety, such as, but not limited to, AAV3B (SEQ ID NO: 1 and 10 of U.S. Pat. No. 6,156,303), AAV6 (SEQ ID NO: 2, 7 and 11 of U.S. Pat. No. 6,156,303), AAV2 (SEQ ID NO: 3 and 8 of U.S. Pat. No. 6,156,303), AAV3A (SEQ ID NO: 4 and 9, of U.S. Pat. No. 6,156,303), or derivatives thereof.

[0059] In some embodiments, the AAV serotype may be, or have, a sequence as described in U.S. Patent Application Publication No. US20140359799, the contents of which are herein incorporated by reference in their entirety, such as, but not limited to, AAV8 (SEQ ID NO: 1 of US20140359799), AAVDJ (SEQ ID NO: 2 and 3 of US20140359799), or variants thereof.

[0060] In some embodiments, the serotype may be AAVDJ or a variant thereof, such as AAVDJ8 (or AAV-DJ8), as described by Grimm et al. (Journal of Virology 82(12): 5887-5911 (2008), herein incorporated by reference in its entirety). The amino acid sequence of AAVDJ8 may comprise two or more mutations in order to remove the heparin binding domain (HBD). As a non-limiting example, the AAV-DJ sequence described as SEQ ID NO: 1 in U.S. Pat. No. 7,588,772, the contents of which are herein incorporated by reference in their entirety, may comprise two mutations: (1) R587Q where arginine (R; Arg) at amino acid 587 is changed to glutamine (Q; Gln) and (2) R590T where arginine (R; Arg) at amino acid 590 is changed to threonine (T; Thr). As another non-limiting example, may comprise three mutations: (1) K406R where lysine (K; Lys) at amino acid 406 is changed to arginine (R; Arg), (2) R587Q where arginine (R; Arg) at amino acid 587 is changed to glutamine (Q; Gln) and (3) R590T where arginine (R; Arg) at amino acid 590 is changed to threonine (T; Thr).

[0061] In some embodiments, the AAV serotype may be, or have, a sequence of AAV4 as described in International Publication No. WO1998011244, the contents of which are herein incorporated by reference in their entirety, such as, but not limited to AAV4 (SEQ ID NO: 1-20 of WO1998011244).

[0062] In some embodiments, the AAV serotype may be, or have, a mutation in the AAV2 sequence to generate AAV2G9 as described in International Publication No. WO2014144229 and herein incorporated by reference in its entirety.

[0063] In some embodiments, the AAV serotype may be, or have, a sequence as described in International Publication No. WO2005033321, the contents of which are herein incorporated by reference in their entirety, such as, but not limited to AAV3-3 (SEQ ID NO: 217 of WO2005033321), AAV1 (SEQ ID NO: 219 and 202 of WO2005033321), AAV106.1/hu.37 (SEQ ID No: 10 of WO2005033321), AAV114.3/hu.40 (SEQ ID No: 11 of WO2005033321), AAV127.2/hu.41 (SEQ ID NO:6 and 8 of WO2005033321), AAV128.3/hu.44 (SEQ ID No: 81 of WO2005033321), AAV130.4/hu.48 (SEQ ID NO: 78 of WO2005033321), AAV145.1/hu.53 (SEQ ID No: 176 and 177 of WO2005033321), AAV145.6/hu.56 (SEQ ID NO: 168 and 192 of WO2005033321), AAV16.12/hu.11 (SEQ ID NO: 153 and 57 of WO2005033321), AAV16.8/hu.10 (SEQ ID NO: 156 and 56 of WO2005033321), AAV161.10/hu.60 (SEQ ID No: 170 of WO2005033321), AAV161.6/hu.61 (SEQ ID No: 174 of WO2005033321), AAV1-7/rh.48 (SEQ ID NO: 32 of WO2005033321), AAV1-8/rh.49 (SEQ ID NOs: 103 and 25 of WO2005033321), AAV2 (SEQ ID NO: 211 and 221 of WO2005033321), AAV2-15/rh.62 (SEQ ID No: 33 and 114 of WO2005033321), AAV2-3/rh.61 (SEQ ID NO: 21 of WO2005033321), AAV2-4/rh.50 (SEQ ID No: 23 and 108 of WO2005033321), AAV2-5/rh.51 (SEQ ID NO: 104 and 22 of WO2005033321), AAV3.1/hu.6 (SEQ ID NO: 5 and 84 of WO2005033321), AAV3.1/hu.9 (SEQ ID NO: 155 and 58 of WO2005033321), AAV3-11/rh.53 (SEQ ID NO: 186 and 176 of WO2005033321), AAV3-3 (SEQ ID NO: 200 of WO2005033321), AAV33.12/hu.17 (SEQ ID NO:4 of WO2005033321), AAV33.4/hu.15 (SEQ ID No: 50 of WO2005033321), AAV33.8/hu.16 (SEQ ID No: 51 of WO2005033321), AAV3-9/rh.52 (SEQ ID NO: 96 and 18 of WO2005033321), AAV4-19/rh.55 (SEQ ID NO: 117 of WO2005033321), AAV4-4 (SEQ ID NO: 201 and 218 of WO2005033321), AAV4-9/rh.54 (SEQ ID NO: 116 of WO2005033321), AAV5 (SEQ ID NO: 199 and 216 of WO2005033321), AAV52.1/hu.20 (SEQ ID NO: 63 of WO2005033321), AAV52/hu.19 (SEQ ID NO: 133 of WO2005033321), AAV5-22/rh.58 (SEQ ID No: 27 of WO2005033321), AAV5-3/rh.57 (SEQ ID NO: 105 of WO2005033321), AAV5-3/rh.57 (SEQ ID No: 26 of WO2005033321), AAV58.2/hu.25 (SEQ ID No: 49 of WO2005033321), AAV6 (SEQ ID NO: 203 and 220 of WO2005033321), AAV7 (SEQ ID NO: 222 and 213 of WO2005033321), AAV7.3/hu.7 (SEQ ID No: 55 of WO2005033321), AAV8 (SEQ ID NO: 223 and 214 of WO2005033321), AAVH-1/hu.1 (SEQ ID No: 46 of WO2005033321), AAVH-5/hu.3 (SEQ ID No: 44 of WO2005033321), AAVhu.1 (SEQ ID NO: 144 of WO2005033321), AAVhu.10 (SEQ ID NO: 156 of WO2005033321), AAVhu.11 (SEQ ID NO: 153 of WO2005033321), AAVhu.12 (WO2005033321 SEQ ID NO: 59), AAVhu.13 (SEQ ID NO: 129 of WO2005033321), AAVhu.14/AAV9 (SEQ ID NO: 123 and 3 of WO2005033321), AAVhu.15 (SEQ ID NO: 147 of WO2005033321), AAVhu.16 (SEQ ID NO: 148 of WO2005033321), AAVhu.17 (SEQ ID NO: 83 of WO2005033321), AAVhu.18 (SEQ ID NO: 149 of WO2005033321), AAVhu.19 (SEQ ID NO: 133 of WO2005033321), AAVhu.2 (SEQ ID NO: 143 of WO2005033321), AAVhu.20 (SEQ ID NO: 134 of WO2005033321), AAVhu.21 (SEQ ID NO: 135 of WO2005033321), AAVhu.22 (SEQ ID NO: 138 of WO2005033321), AAVhu.23.2 (SEQ ID NO: 137 of WO2005033321), AAVhu.24 (SEQ ID NO: 136 of WO2005033321), AAVhu.25 (SEQ ID NO: 146 of WO2005033321), AAVhu.27 (SEQ ID NO: 140 of WO2005033321), AAVhu.29 (SEQ ID NO: 132 of WO2005033321), AAVhu.3 (SEQ ID NO: 145 of WO2005033321), AAVhu.31 (SEQ ID NO: 121 of WO2005033321), AAVhu.32 (SEQ ID NO: 122 of WO2005033321), AAVhu.34 (SEQ ID NO: 125 of WO2005033321), AAVhu.35 (SEQ ID NO: 164 of WO2005033321), AAVhu.37 (SEQ ID NO: 88 of WO2005033321), AAVhu.39 (SEQ ID NO: 102 of WO2005033321), AAVhu.4 (SEQ ID NO: 141 of WO2005033321), AAVhu.40 (SEQ ID NO: 87 of WO2005033321), AAVhu.41 (SEQ ID NO: 91 of WO2005033321), AAVhu.42 (SEQ ID NO: 85 of WO2005033321), AAVhu.43 (SEQ ID NO: 160 of WO2005033321), AAVhu.44 (SEQ ID NO: 144 of WO2005033321), AAVhu.45 (SEQ ID NO: 127 of WO2005033321), AAVhu.46 (SEQ ID NO: 159 of WO2005033321), AAVhu.47 (SEQ ID NO: 128 of WO2005033321), AAVhu.48 (SEQ ID NO: 157 of WO2005033321), AAVhu.49 (SEQ ID NO: 189 of WO2005033321), AAVhu.51 (SEQ ID NO: 190 of WO2005033321), AAVhu.52 (SEQ ID NO: 191 of WO2005033321), AAVhu.53 (SEQ ID NO: 186 of WO2005033321), AAVhu.54 (SEQ ID NO: 188 of WO2005033321), AAVhu.55 (SEQ ID NO: 187 of WO2005033321), AAVhu.56 (SEQ ID NO: 192 of WO2005033321), AAVhu.57 (SEQ ID NO: 193 of WO2005033321), AAVhu.58 (SEQ ID NO: 194 of WO2005033321), AAVhu.6 (SEQ ID NO: 84 of WO2005033321), AAVhu.60 (SEQ ID NO: 184 of WO2005033321), AAVhu.61 (SEQ ID NO: 185 of WO2005033321), AAVhu.63 (SEQ ID NO: 195 of WO2005033321), AAVhu.64 (SEQ ID NO: 196 of WO2005033321), AAVhu.66 (SEQ ID NO: 197 of WO2005033321), AAVhu.67 (SEQ ID NO: 198 of WO2005033321), AAVhu.7 (SEQ ID NO: 150 of WO2005033321), AAVhu.8 (WO2005033321 SEQ ID NO: 12), AAVhu.9 (SEQ ID NO: 155 of WO2005033321), AAVLG-10/rh.40 (SEQ ID No: 14 of WO2005033321), AAVLG-4/rh.38 (SEQ ID NO: 86 of WO2005033321), AAVLG-4/rh.38 (SEQ ID No: 7 of WO2005033321), AAVN721-8/rh.43 (SEQ ID NO: 163 of WO2005033321), AAVN721-8/rh.43 (SEQ ID No: 43 of WO2005033321), AAVpi.1 (WO2005033321 SEQ ID NO: 28), AAVpi.2 (WO2005033321 SEQ ID NO: 30), AAVpi.3 (WO2005033321 SEQ ID NO: 29), AAVrh.38 (SEQ ID NO: 86 of WO2005033321), AAVrh.40 (SEQ ID NO: 92 of WO2005033321), AAVrh.43 (SEQ ID NO: 163 of WO2005033321), AAVrh.44 (WO2005033321 SEQ ID NO: 34), AAVrh.45 (WO2005033321 SEQ ID NO: 41), AAVrh.47 (WO2005033321 SEQ ID NO: 38), AAVrh.48 (SEQ ID NO: 115 of WO2005033321), AAVrh.49 (SEQ ID NO: 103 of WO2005033321), AAVrh.50 (SEQ ID NO: 108 of WO2005033321), AAVrh.51 (SEQ ID NO: 104 of WO2005033321), AAVrh.52 (SEQ ID NO: 96 of WO2005033321), AAVrh.53 (SEQ ID NO: 97 of WO2005033321), AAVrh.55 (WO2005033321 SEQ ID NO: 37), AAVrh.56 (SEQ ID NO: 152 of WO2005033321), AAVrh.57 (SEQ ID NO: 105 of WO2005033321), AAVrh.58 (SEQ ID NO: 106 of WO2005033321), AAVrh.59 (WO2005033321 SEQ ID NO: 42), AAVrh.60 (WO2005033321 SEQ ID NO: 31), AAVrh.61 (SEQ ID NO: 107 of WO2005033321), AAVrh.62 (SEQ ID NO: 114 of WO2005033321), AAVrh.64 (SEQ ID NO: 99 of WO2005033321), AAVrh.65 (WO2005033321 SEQ ID NO: 35), AAVrh.68 (WO2005033321 SEQ ID NO: 16), AAVrh.69 (WO2005033321 SEQ ID NO: 39), AAVrh.70 (WO2005033321 SEQ ID NO: 20), AAVrh.72 (WO2005033321 SEQ ID NO: 9), or variants thereof including, but not limited to, AAVcy.2, AAVcy.3, AAVcy.4, AAVcy.5, AAVcy.6, AAVrh.12, AAVrh.17, AAVrh.18, AAVrh.19, AAVrh.21, AAVrh.22, AAVrh.23, AAVrh.24, AAVrh.25, AAVrh.25/42 15, AAVrh.31, AAVrh.32, AAVrh.33, AAVrh.34, AAVrh.35, AAVrh.36, AAVrh.37, AAVrh14. Non limiting examples of variants include SEQ ID NO: 13, 15, 17, 19, 24, 36, 40, 45, 47, 48, 51-54, 60-62, 64-77, 79, 80, 82, 89, 90, 93-95, 98, 100, 101, 109-113, 118-120, 124, 126, 131, 139, 142, 151, 154, 158, 161, 162, 165-183, 202, 204-212, 215, 219, 224-236, of WO2005033321, the contents of which are herein incorporated by reference in their entirety.

[0064] In some embodiments, the AAV serotype may be, or have, a sequence as described in International Publication No. WO2015168666, the contents of which are herein incorporated by reference in their entirety, such as, but not limited to, AAVrh8R (SEQ ID NO: 9 of WO2015168666), AAVrh8R A586R mutant (SEQ ID NO: 10 of WO2015168666), AAVrh8R R533A mutant (SEQ ID NO: 11 of WO2015168666), or variants thereof.

[0065] In some embodiments, the AAV serotype may be, or have, a sequence as described in U.S. Pat. No. 9,233,131, the contents of which are herein incorporated by reference in their entirety, such as, but not limited to, AAVhE1.1 (SEQ ID NO:44 of U.S. Pat. No. 9,233,131), AAVhEr1.5 (SEQ ID NO:45 of U.S. Pat. No. 9,233,131), AAVhER1.14 (SEQ ID NO:46 of U.S. Pat. No. 9,233,131), AAVhEr1.8 (SEQ ID NO:47 of U.S. Pat. No. 9,233,131), AAVhEr1.16 (SEQ ID NO:48 of U.S. Pat. No. 9,233,131), AAVhEr1.18 (SEQ ID NO:49 of U.S. Pat. No. 9,233,131), AAVhEr1.35 (SEQ ID NO:50 of U.S. Pat. No. 9,233,131), AAVhEr1.7 (SEQ ID NO:51 of U.S. Pat. No. 9,233,131), AAVhEr1.36 (SEQ ID NO:52 of U.S. Pat. No. 9,233,131), AAVhEr2.29 (SEQ ID NO:53 of U.S. Pat. No. 9,233,131), AAVhEr2.4 (SEQ ID NO:54 of U.S. Pat. No. 9,233,131), AAVhEr2.16 (SEQ ID NO:55 of U.S. Pat. No. 9,233,131), AAVhEr2.30 (SEQ ID NO:56 of U.S. Pat. No. 9,233,131), AAVhEr2.31 (SEQ ID NO:58 of U.S. Pat. No. 9,233,131), AAVhEr2.36 (SEQ ID NO:57 of U.S. Pat. No. 9,233,131), AAVhER1.23 (SEQ ID NO:53 of U.S. Pat. No. 9,233,131), AAVhEr3.1 (SEQ ID NO:59 of U.S. Pat. No. 9,233,131), AAV2.5T (SEQ ID NO:42 of U.S. Pat. No. 9,233,131), or variants thereof.

[0066] In some embodiments, the AAV serotype may be, or have, a sequence as described in U.S. Patent Application Publication No. US20150376607, the contents of which are herein incorporated by reference in their entirety, such as, but not limited to, AAV-PAEC (SEQ ID NO:1 of US20150376607), AAV-LK01 (SEQ ID NO:2 of US20150376607), AAV-LK02 (SEQ ID NO:3 of US20150376607), AAV-LK03 (SEQ ID NO:4 of US20150376607), AAV-LK04 (SEQ ID NO:5 of US20150376607), AAV-LK05 (SEQ ID NO:6 of US20150376607), AAV-LK06 (SEQ ID NO:7 of US20150376607), AAV-LK07 (SEQ ID NO:8 of US20150376607), AAV-LK08 (SEQ ID NO:9 of US20150376607), AAV-LK09 (SEQ ID NO:10 of US20150376607), AAV-LK10 (SEQ ID NO:11 of US20150376607), AAV-LK11 (SEQ ID NO:12 of US20150376607), AAV-LK12 (SEQ ID NO:13 of US20150376607), AAV-LK13 (SEQ ID NO:14 of US20150376607), AAV-LK14 (SEQ ID NO:15 of US20150376607), AAV-LK15 (SEQ ID NO:16 of US20150376607), AAV-LK16 (SEQ ID NO:17 of US20150376607), AAV-LK17 (SEQ ID NO:18 of US20150376607), AAV-LK18 (SEQ ID NO:19 of US20150376607), AAV-LK19 (SEQ ID NO:20 of US20150376607), AAV-PAEC2 (SEQ ID NO:21 of US20150376607), AAV-PAEC4 (SEQ ID NO:22 of US20150376607), AAV-PAEC6 (SEQ ID NO:23 of US20150376607), AAV-PAEC7 (SEQ ID NO:24 of US20150376607), AAV-PAEC8 (SEQ ID NO:25 of US20150376607), AAV-PAEC11 (SEQ ID NO:26 of US20150376607), AAV-PAEC12 (SEQ ID NO:27, of US20150376607), or variants thereof.

[0067] In some embodiments, the AAV serotype may be, or have, a sequence as described in U.S. Pat. No. 9,163,261, the contents of which are herein incorporated by reference in their entirety, such as, but not limited to, AAV-2-pre-miRNA-101 (SEQ ID NO: 1 U.S. Pat. No. 9,163,261), or variants thereof.

[0068] In some embodiments, the AAV serotype may be, or have, a sequence as described in U.S. Patent Application Publication No. US20150376240, the contents of which are herein incorporated by reference in their entirety, such as, but not limited to, AAV-8h (SEQ ID NO: 6 of US20150376240), AAV-8b (SEQ ID NO: 5 of US20150376240), AAV-h (SEQ ID NO: 2 of US20150376240), AAV-b (SEQ ID NO: 1 of US20150376240), or variants thereof.

[0069] In some embodiments, the AAV serotype may be, or have, a sequence as described in U.S. Patent Application Publication No. US20160017295, the contents of which are herein incorporated by reference in their entirety, such as, but not limited to, AAV SM 10-2 (SEQ ID NO: 22 of US20160017295), AAV Shuffle 100-1 (SEQ ID NO: 23 of US20160017295), AAV Shuffle 100-3 (SEQ ID NO: 24 of US20160017295), AAV Shuffle 100-7 (SEQ ID NO: 25 of US20160017295), AAV Shuffle 10-2 (SEQ ID NO: 34 of US20160017295), AAV Shuffle 10-6 (SEQ ID NO: 35 of US20160017295), AAV Shuffle 10-8 (SEQ ID NO: 36 of US20160017295), AAV Shuffle 100-2 (SEQ ID NO: 37 of US20160017295), AAV SM 10-1 (SEQ ID NO: 38 of US20160017295), AAV SM 10-8 (SEQ ID NO: 39 of US20160017295), AAV SM 100-3 (SEQ ID NO: 40 of US20160017295), AAV SM 100-10 (SEQ ID NO: 41 of US20160017295), or variants thereof.

[0070] In some embodiments, the AAV serotype may be, or have, a sequence as described in United States Patent Publication No. US20150238550, the contents of which are herein incorporated by reference in their entirety, such as, but not limited to, BNP61 AAV (SEQ ID NO: 1 of US20150238550), BNP62 AAV (SEQ ID NO: 3 of US20150238550), BNP63 AAV (SEQ ID NO: 4 of US20150238550), or variants thereof.

[0071] In some embodiments, the AAV serotype may be or may have a sequence as described in United States Patent Publication No. US20150315612, the contents of which are herein incorporated by reference in their entirety, such as, but not limited to, AAVrh.50 (SEQ ID NO: 108 of US20150315612), AAVrh.43 (SEQ ID NO: 163 of US20150315612), AAVrh.62 (SEQ ID NO: 114 of US20150315612), AAVrh.48 (SEQ ID NO: 115 of US20150315612), AAVhu.19 (SEQ ID NO: 133 of US20150315612), AAVhu.11 (SEQ ID NO: 153 of US20150315612), AAVhu.53 (SEQ ID NO: 186 of US20150315612), AAV4-8/rh.64 (SEQ ID No: 15 of US20150315612), AAVLG-9/hu.39 (SEQ ID No: 24 of US20150315612), AAV54.5/hu.23 (SEQ ID No: 60 of US20150315612), AAV54.2/hu.22 (SEQ ID No: 67 of US20150315612), AAV54.7/hu.24 (SEQ ID No: 66 of US20150315612), AAV54.1/hu.21 (SEQ ID No: 65 of US20150315612), AAV54.4R/hu.27 (SEQ ID No: 64 of US20150315612), AAV46.2/hu.28 (SEQ ID No: 68 of US20150315612), AAV46.6/hu.29 (SEQ ID No: 69 of US20150315612), AAV128.1/hu.43 (SEQ ID No: 80 of US20150315612), or variants thereof.

[0072] In some embodiments, the AAV serotype may be, or have, a sequence as described in International Publication No. WO2015121501, the contents of which are herein incorporated by reference in their entirety, such as, but not limited to, true type AAV (ttAAV) (SEQ ID NO: 2 of WO2015121501), “UPenn AAV10” (SEQ ID NO: 8 of WO2015121501), “Japanese AAV10” (SEQ ID NO: 9 of WO2015121501), or variants thereof.

[0073] According to the present disclosure, AAV capsid serotype selection or use may be from a variety of species. In some embodiments, the AAV may be an avian AAV (AAAV). The AAAV serotype may be, or have, a sequence as described in U.S. Pat. No. 9,238,800, the contents of which are herein incorporated by reference in their entirety, such as, but not limited to, AAAV (SEQ ID NO: 1, 2, 4, 6, 8, 10, 12, and 14 of U.S. Pat. No. 9,238,800), or variants thereof.

[0074] In some embodiments, the AAV may be a bovine AAV (BAAV). The BAAV serotype may be, or have, a sequence as described in U.S. Pat. No. 9,193,769, the contents of which are herein incorporated by reference in their entirety, such as, but not limited to, BAAV (SEQ ID NO: 1 and 6 of U.S. Pat. No. 9,193,769), or variants thereof. The BAAV serotype may be or have a sequence as described in U.S. Pat. No. 7,427,396, the contents of which are herein incorporated by reference in their entirety, such as, but not limited to, BAAV (SEQ ID NO: 5 and 6 of U.S. Pat. No. 7,427,396), or variants thereof.

[0075] In some embodiments, the AAV may be a caprine AAV. The caprine AAV serotype may be, or have, a sequence as described in U.S. Pat. No. 7,427,396, the contents of which are herein incorporated by reference in their entirety, such as, but not limited to, caprine AAV (SEQ ID NO: 3 of U.S. Pat. No. 7,427,396), or variants thereof.

[0076] In other embodiments the AAV may be engineered as a hybrid AAV from two or more parental serotypes. In some embodiments, the AAV may be AAV2G9 which comprises sequences from AAV2 and AAV9. The AAV2G9 AAV serotype may be, or have, a sequence as described in U.S. Patent Application Publication No. US20160017005, the contents of which are herein incorporated by reference in their entirety.

[0077] In some embodiments, the AAV may be a serotype generated by the AAV9 capsid library with mutations in amino acids 390-627 (VP1 numbering) as described by Pulicherla et al. (Molecular Therapy 19(6):1070-1078 (2011), the contents of which are herein incorporated by reference in their entirety. The serotype and corresponding nucleotide and amino acid substitutions may be, but is not limited to, AAV9.1 (G1594C; D532H), AAV6.2 (T1418A and T1436X; V473D and I479K), AAV9.3 (T1238A; F413Y), AAV9.4 (T1250C and A1617T; F417S), AAV9.5 (A1235G, A1314T, A1642G, C1760T; Q412R, T548A, A587V), AAV9.6 (T1231A; F411I), AAV9.9 (G1203A, G1785T; W595C), AAV9.10 (A1500G, T1676C; M559T), AAV9.11 (A1425T, A1702C, A1769T; T568P, Q590L), AAV9.13 (A1369C, A1720T; N457H, T574S), AAV9.14 (T1340A, T1362C, T1560C, G1713A; L447H), AAV9.16 (A1775T; Q592L), AAV9.24 (T1507C, T1521G; W503R), AAV9.26 (A1337G, A1769C; Y446C, Q590P), AAV9.33 (A1667C; D556A), AAV9.34 (A1534G, C1794T; N512D), AAV9.35 (A1289T, T1450A, C1494T, A1515T, C1794A, G1816A; Q430L, Y484N, N98K, V606I), AAV9.40 (A1694T, E565V), AAV9.41 (A1348T, T1362C; T450S), AAV9.44 (A1684C, A1701T, A1737G; N562H, K567N), AAV9.45 (A1492T, C1804T; N498Y, L602F), AAV9.46 (G1441C, T1525C, T1549G; G481R, W509R, L517V), 9.47 (G1241A, G1358A, A1669G, C1745T; S414N, G453D, K557E, T582I), AAV9.48 (C1445T, A1736T; P482L, Q579L), AAV9.50 (A1638T, C1683T, T1805A; Q546H, L602H), AAV9.53 (G1301A, A1405C, C1664T, G1811T; R134Q, S469R, A555V, G604V), AAV9.54 (C1531A, T1609A; L511I, L537M), AAV9.55 (T1605A; F535L), AAV9.58 (C1475T, C1579A; T492I, H527N), AAV.59 (T1336C; Y446H), AAV9.61 (A1493T; N498I), AAV9.64 (C1531A, A1617T; L511I), AAV9.65 (C1335T, T1530C, C1568A; A523D), AAV9.68 (C1510A; P504T), AAV9.80 (G1441A; G481R), AAV9.83 (C1402A, A1500T; P468T, E500D), AAV9.87 (T1464C, T1468C; S490P), AAV9.90 (A1196T; Y399F), AAV9.91 (T1316G, A1583T, C1782G, T1806C; L439R, K528I), AAV9.93 (A1273G, A1421G, A1638C, C1712T, G1732A, A1744T, A1832T; S425G, Q474R, Q546H, P571L, G578R, T582S, D611V), AAV9.94 (A1675T; M559L) and AAV9.95 (T1605A; F535L).

[0078] In some embodiments, the AAV serotype may be, or have, a sequence as described in International Publication No. WO2016049230, the contents of which are herein incorporated by reference in their entirety, such as, but not limited to AAVF1/HSC1 (SEQ ID NO: 2 and 20 of WO2016049230), AAVF2/HSC2 (SEQ ID NO: 3 and 21 of WO2016049230), AAVF3/HSC3 (SEQ ID NO: 5 and 22 of WO2016049230), AAVF4/HSC4 (SEQ ID NO: 6 and 23 of WO2016049230), AAVF5/HSC5 (SEQ ID NO: 11 and 25 of WO2016049230), AAVF6/HSC6 (SEQ ID NO: 7 and 24 of WO2016049230), AAVF7/HSC7 (SEQ ID NO: 8 and 27 of WO2016049230), AAVF8/HSC8 (SEQ ID NO: 9 and 28 of WO2016049230), AAVF9/HSC9 (SEQ ID NO: 10 and 29 of WO2016049230), AAVF11/HSC11 (SEQ ID NO: 4 and 26 of WO2016049230), AAVF12/HSC12 (SEQ ID NO: 12 and 30 of WO2016049230), AAVF13/HSC13 (SEQ ID NO: 14 and 31 of WO2016049230), AAVF14/HSC14 (SEQ ID NO: 15 and 32 of WO2016049230), AAVF15/HSC15 (SEQ ID NO: 16 and 33 of WO2016049230), AAVF16/HSC16 (SEQ ID NO: 17 and 34 of WO2016049230), AAVF17/HSC17 (SEQ ID NO: 13 and 35 of WO2016049230), or variants or derivatives thereof.

[0079] In some embodiments, the AAV serotype may be, or have, a sequence as described in U.S. Pat. No. 8,734,809, the contents of which are herein incorporated by reference in their entirety, such as, but not limited to, AAV CBr-E1 (SEQ ID NO: 13 and 87 of U.S. Pat. No. 8,734,809), AAV CBr-E2 (SEQ ID NO: 14 and 88 of U.S. Pat. No. 8,734,809), AAV CBr-E3 (SEQ ID NO: 15 and 89 of U.S. Pat. No. 8,734,809), AAV CBr-E4 (SEQ ID NO: 16 and 90 of U.S. Pat. No. 8,734,809), AAV CBr-E5 (SEQ ID NO: 17 and 91 of U.S. Pat. No. 8,734,809), AAV CBr-e5 (SEQ ID NO: 18 and 92 of U.S. Pat. No. 8,734,809), AAV CBr-E6 (SEQ ID NO: 19 and 93 of U.S. Pat. No. 8,734,809), AAV CBr-E7 (SEQ ID NO: 20 and 94 of U.S. Pat. No. 8,734,809), AAV CBr-E8 (SEQ ID NO: 21 and 95 of U.S. Pat. No. 8,734,809), AAV CLv-D1 (SEQ ID NO: 22 and 96 of U.S. Pat. No. 8,734,809), AAV CLv-D2 (SEQ ID NO: 23 and 97 of U.S. Pat. No. 8,734,809), AAV CLv-D3 (SEQ ID NO: 24 and 98 of U.S. Pat. No. 8,734,809), AAV CLv-D4 (SEQ ID NO: 25 and 99 of U.S. Pat. No. 8,734,809), AAV CLv-D5 (SEQ ID NO: 26 and 100 of U.S. Pat. No. 8,734,809), AAV CLv-D6 (SEQ ID NO: 27 and 101 of U.S. Pat. No. 8,734,809), AAV CLv-D7 (SEQ ID NO: 28 and 102 of U.S. Pat. No. 8,734,809), AAV CLv-D8 (SEQ ID NO: 29 and 103 of U.S. Pat. No. 8,734,809), AAV CLv-E1 (SEQ ID NO: 13 and 87 of U.S. Pat. No. 8,734,809), AAV CLv-R1 (SEQ ID NO: 30 and 104 of U.S. Pat. No. 8,734,809), AAV CLv-R2 (SEQ ID NO: 31 and 105 of U.S. Pat. No. 8,734,809), AAV CLv-R3 (SEQ ID NO: 32 and 106 of U.S. Pat. No. 8,734,809), AAV CLv-R4 (SEQ ID NO: 33 and 107 of U.S. Pat. No. 8,734,809), AAV CLv-R5 (SEQ ID NO: 34 and 108 of U.S. Pat. No. 8,734,809), AAV CLv-R6 (SEQ ID NO: 35 and 109 of U.S. Pat. No. 8,734,809), AAV CLv-R7 (SEQ ID NO: 36 and 110 of U.S. Pat. No. 8,734,809), AAV CLv-R8 (SEQ ID NO: X and X of U.S. Pat. No. 8,734,809), AAV CLv-R9 (SEQ ID NO: X and X of U.S. Pat. No. 8,734,809), AAV CLg-F1 (SEQ ID NO: 39 and 113 of U.S. Pat. No. 8,734,809), AAV CLg-F2 (SEQ ID NO: 40 and 114 of U.S. Pat. No. 8,734,809), AAV CLg-F3 (SEQ ID NO: 41 and 115 of U.S. Pat. No. 8,734,809), AAV CLg-F4 (SEQ ID NO: 42 and 116 of U.S. Pat. No. 8,734,809), AAV CLg-F5 (SEQ ID NO: 43 and 117 of U.S. Pat. No. 8,734,809), AAV CLg-F6 (SEQ ID NO: 43 and 117 of U.S. Pat. No. 8,734,809), AAV CLg-F7 (SEQ ID NO: 44 and 118 of U.S. Pat. No. 8,734,809), AAV CLg-F8 (SEQ ID NO: 43 and 117 of U.S. Pat. No. 8,734,809), AAV CSp-1 (SEQ ID NO: 45 and 119 of U.S. Pat. No. 8,734,809), AAV CSp-10 (SEQ ID NO: 46 and 120 of U.S. Pat. No. 8,734,809), AAV CSp-11 (SEQ ID NO: 47 and 121 of U.S. Pat. No. 8,734,809), AAV CSp-2 (SEQ ID NO: 48 and 122 of U.S. Pat. No. 8,734,809), AAV CSp-3 (SEQ ID NO: 49 and 123 of U.S. Pat. No. 8,734,809), AAV CSp-4 (SEQ ID NO: 50 and 124 of U.S. Pat. No. 8,734,809), AAV CSp-6 (SEQ ID NO: 51 and 125 of U.S. Pat. No. 8,734,809), AAV CSp-7 (SEQ ID NO: 52 and 126 of U.S. Pat. No. 8,734,809), AAV CSp-8 (SEQ ID NO: 53 and 127 of U.S. Pat. No. 8,734,809), AAV CSp-9 (SEQ ID NO: 54 and 128 of U.S. Pat. No. 8,734,809), AAV CHt-2 (SEQ ID NO: 55 and 129 of U.S. Pat. No. 8,734,809), AAV CHt-3 (SEQ ID NO: 56 and 130 of U.S. Pat. No. 8,734,809), AAV CKd-1 (SEQ ID NO: 57 and 131 of U.S. Pat. No. 8,734,809), AAV CKd-10 (SEQ ID NO: 58 and 132 of U.S. Pat. No. 8,734,809), AAV CKd-2 (SEQ ID NO: 59 and 133 of U.S. Pat. No. 8,734,809), AAV CKd-3 (SEQ ID NO: 60 and 134 of U.S. Pat. No. 8,734,809), AAV CKd-4 (SEQ ID NO: 61 and 135 of U.S. Pat. No. 8,734,809), AAV CKd-6 (SEQ ID NO: 62 and 136 of U.S. Pat. No. 8,734,809), AAV CKd-7 (SEQ ID NO: 63 and 137 of U.S. Pat. No. 8,734,809), AAV CKd-8 (SEQ ID NO: 64 and 138 of U.S. Pat. No. 8,734,809), AAV CLv-1 (SEQ ID NO: 35 and 139 of U.S. Pat. No. 8,734,809), AAV CLv-12 (SEQ ID NO: 66 and 140 of U.S. Pat. No. 8,734,809), AAV CLv-13 (SEQ ID NO: 67 and 141 of U.S. Pat. No. 8,734,809), AAV CLv-2 (SEQ ID NO: 68 and 142 of U.S. Pat. No. 8,734,809), AAV CLv-3 (SEQ ID NO: 69 and 143 of U.S. Pat. No. 8,734,809), AAV CLv-4 (SEQ ID NO: 70 and 144 of U.S. Pat. No. 8,734,809), AAV CLv-6 (SEQ ID NO: 71 and 145 of U.S. Pat. No. 8,734,809), AAV CLv-8 (SEQ ID NO: 72 and 146 of U.S. Pat. No. 8,734,809), AAV CKd-B1 (SEQ ID NO: 73 and 147 of U.S. Pat. No. 8,734,809), AAV CKd-B2 (SEQ ID NO: 74 and 148 of U.S. Pat. No. 8,734,809), AAV CKd-B3 (SEQ ID NO: 75 and 149 of U.S. Pat. No. 8,734,809), AAV CKd-B4 (SEQ ID NO: 76 and 150 of U.S. Pat. No. 8,734,809), AAV CKd-B5 (SEQ ID NO: 77 and 151 of U.S. Pat. No. 8,734,809), AAV CKd-B6 (SEQ ID NO: 78 and 152 of U.S. Pat. No. 8,734,809), AAV CKd-B7 (SEQ ID NO: 79 and 153 of U.S. Pat. No. 8,734,809), AAV CKd-B8 (SEQ ID NO: 80 and 154 of U.S. Pat. No. 8,734,809), AAV CKd-H1 (SEQ ID NO: 81 and 155 of U.S. Pat. No. 8,734,809), AAV CKd-H2 (SEQ ID NO: 82 and 156 of U.S. Pat. No. 8,734,809), AAV CKd-H3 (SEQ ID NO: 83 and 157 of U.S. Pat. No. 8,734,809), AAV CKd-H4 (SEQ ID NO: 84 and 158 of U.S. Pat. No. 8,734,809), AAV CKd-H5 (SEQ ID NO: 85 and 159 of U.S. Pat. No. 8,734,809), AAV CKd-H6 (SEQ ID NO: 77 and 151 of U.S. Pat. No. 8,734,809), AAV CHt-1 (SEQ ID NO: 86 and 160 of U.S. Pat. No. 8,734,809), AAV CLv1-1 (SEQ ID NO: 171 of U.S. Pat. No. 8,734,809), AAV CLv1-2 (SEQ ID NO: 172 of U.S. Pat. No. 8,734,809), AAV CLv1-3 (SEQ ID NO: 173 of U.S. Pat. No. 8,734,809), AAV CLv1-4 (SEQ ID NO: 174 of U.S. Pat. No. 8,734,809), AAV Clv1-7 (SEQ ID NO: 175 of U.S. Pat. No. 8,734,809), AAV Clv1-8 (SEQ ID NO: 176 of U.S. Pat. No. 8,734,809), AAV Clv1-9 (SEQ ID NO: 177 of U.S. Pat. No. 8,734,809), AAV Clv1-10 (SEQ ID NO: 178 of U.S. Pat. No. 8,734,809), AAV.VR-355 (SEQ ID NO: 181 of U.S. Pat. No. 8,734,809), AAV.hu.48R3 (SEQ ID NO: 183 of U.S. Pat. No. 8,734,809), or variants or derivatives thereof.

[0080] In some embodiments, the AAV serotype may be, or have, a sequence as described in International Publication No. WO2016065001, the contents of which are herein incorporated by reference in their entirety, such as, but not limited to AAV CHt-P2 (SEQ ID NO: 1 and 51 of WO2016065001), AAV CHt-P5 (SEQ ID NO: 2 and 52 of WO2016065001), AAV CHt-P9 (SEQ ID NO: 3 and 53 of WO2016065001), AAV CBr-7.1 (SEQ ID NO: 4 and 54 of WO2016065001), AAV CBr-7.2 (SEQ ID NO: 5 and 55 of WO2016065001), AAV CBr-7.3 (SEQ ID NO: 6 and 56 of WO2016065001), AAV CBr-7.4 (SEQ ID NO: 7 and 57 of WO2016065001), AAV CBr-7.5 (SEQ ID NO: 8 and 58 of WO2016065001), AAV CBr-7.7 (SEQ ID NO: 9 and 59 of WO2016065001), AAV CBr-7.8 (SEQ ID NO: 10 and 60 of WO2016065001), AAV CBr-7.10 (SEQ ID NO: 11 and 61 of WO2016065001), AAV CKd-N3 (SEQ ID NO: 12 and 62 of WO2016065001), AAV CKd-N4 (SEQ ID NO: 13 and 63 of WO2016065001), AAV CKd-N9 (SEQ ID NO: 14 and 64 of WO2016065001), AAV CLv-L4 (SEQ ID NO: 15 and 65 of WO2016065001), AAV CLv-L5 (SEQ ID NO: 16 and 66 of WO2016065001), AAV CLv-L6 (SEQ ID NO: 17 and 67 of WO2016065001), AAV CLv-K1 (SEQ ID NO: 18 and 68 of WO2016065001), AAV CLv-K3 (SEQ ID NO: 19 and 69 of WO2016065001), AAV CLv-K6 (SEQ ID NO: 20 and 70 of WO2016065001), AAV CLv-M1 (SEQ ID NO: 21 and 71 of WO2016065001), AAV CLv-M11 (SEQ ID NO: 22 and 72 of WO2016065001), AAV CLv-M2 (SEQ ID NO: 23 and 73 of WO2016065001), AAV CLv-M5 (SEQ ID NO: 24 and 74 of WO2016065001), AAV CLv-M6 (SEQ ID NO: 25 and 75 of WO2016065001), AAV CLv-M7 (SEQ ID NO: 26 and 76 of WO2016065001), AAV CLv-M8 (SEQ ID NO: 27 and 77 of WO2016065001), AAV CLv-M9 (SEQ ID NO: 28 and 78 of WO2016065001), AAV CHt-P1 (SEQ ID NO: 29 and 79 of WO2016065001), AAV CHt-P6 (SEQ ID NO: 30 and 80 of WO2016065001), AAV CHt-P8 (SEQ ID NO: 31 and 81 of WO2016065001), AAV CHt-6.1 (SEQ ID NO: 32 and 82 of WO2016065001), AAV CHt-6.10 (SEQ ID NO: 33 and 83 of WO2016065001), AAV CHt-6.5 (SEQ ID NO: 34 and 84 of WO2016065001), AAV CHt-6.6 (SEQ ID NO: 35 and 85 of WO2016065001), AAV CHt-6.7 (SEQ ID NO: 36 and 86 of WO2016065001), AAV CHt-6.8 (SEQ ID NO: 37 and 87 of WO2016065001), AAV CSp-8.10 (SEQ ID NO: 38 and 88 of WO2016065001), AAV CSp-8.2 (SEQ ID NO: 39 and 89 of WO2016065001), AAV CSp-8.4 (SEQ ID NO: 40 and 90 of WO2016065001), AAV CSp-8.5 (SEQ ID NO: 41 and 91 of WO2016065001), AAV CSp-8.6 (SEQ ID NO: 42 and 92 of WO2016065001), AAV CSp-8.7 (SEQ ID NO: 43 and 93 of WO2016065001), AAV CSp-8.8 (SEQ ID NO: 44 and 94 of WO2016065001), AAV CSp-8.9 (SEQ ID NO: 45 and 95 of WO2016065001), AAV CBr-B7.3 (SEQ ID NO: 46 and 96 of WO2016065001), AAV CBr-B7.4 (SEQ ID NO: 47 and 97 of WO2016065001), AAV3B (SEQ ID NO: 48 and 98 of WO2016065001), AAV4 (SEQ ID NO: 49 and 99 of WO2016065001), AAV5 (SEQ ID NO: 50 and 100 of WO2016065001), or variants or derivatives thereof.

[0081] In some embodiments, the AAV particle may be a serotype selected from any of those found in Table 1.

[0082] In some embodiments, the AAV particle may comprise a sequence, fragment or variant thereof, of the sequences in Table 1.

[0083] In some embodiments, the AAV particle may be encoded by a sequence, fragment or variant as described in Table 1.

TABLE 1
AAV Serotypes

| Serotype | SEQ ID NO | Reference Information |
|---|---|---|
| VOY701 | 1828, 1829 | — |
| VOY101 | 1, 1800, 1809 | — |
| VOY201 | 1810, 1823 | — |
| VOY801 | 1824 | — |
| VOY1101 | 1825 | — |
| PHP.N/PHP.B-DGT | 2 | WO2017100671 SEQ ID NO: 46 |
| AAVPHP.B or G2B-26 | 3 | WO2015038958 SEQ ID NO: 8 and 13 |
| AAVPHP.B | 4 | WO2015038958 SEQ ID NO: 9 |
| AAVG2B-13 | 5 | WO2015038958 SEQ ID NO: 12 |
| AAVTH1.1-32 | 6 | WO2015038958 SEQ ID NO: 14 |
| AAVTH1.1-35 | 7 | WO2015038958 SEQ ID NO: 15 |
| PHP.S/G2A12 | 8 | WO2017100671 SEQ ID NO: 47 |
| AAV9/hu.14 K449R | 9 | WO2017100671 SEQ ID NO: 45 |
| AAV1 | 10 | US20150159173 SEQ ID NO: 11, |
| | | US20150315612 SEQ ID NO: 202 |
| AAV1 | 11 | US20160017295 SEQ ID NO: 1, |
| | | US20030138772 SEQ ID NO: 64, |
| | | US20150159173 SEQ ID NO: 27, |
| | | US20150315612 SEQ ID NO: 219, |
| | | U.S. Pat. No. 7,198,951 SEQ ID NO: 5 |
| AAV1 | 12 | US20030138772 SEQ ID NO: 6 |
| AAV1.3 | 13 | US20030138772 SEQ ID NO: 14 |
| AAV10 | 14 | US20030138772 SEQ ID NO: 117 |
| AAV10 | 15 | WO2015121501 SEQ ID NO: 9 |
| AAV10 | 16 | WO2015121501 SEQ ID NO: 8 |
| AAV11 | 17 | US20030138772 SEQ ID NO: 118 |
| AAV12 | 18 | US20030138772 SEQ ID NO: 119 |
| AAV2 | 19 | US20150159173 SEQ ID NO: 7, |
| | | US20150315612 SEQ ID NO: 211 |
| AAV2 | 20 | US20030138772 SEQ ID NO: 70, |
| | | US20150159173 SEQ ID NO: 23, |
| | | US20150315612 SEQ ID NO: 221, |
| | | US20160017295 SEQ ID NO: 2, |
| | | U.S. Pat. No. 6,156,303 SEQ ID NO: 4, |
| | | U.S. Pat. No. 7,198,951 SEQ ID NO: 4, |
| | | WO2015121501 SEQ ID NO: 1 |
| AAV2 | 21 | U.S. Pat. No. 6,156,303 SEQ ID NO: 8 |
| AAV2 | 22 | US20030138772 SEQ ID NO: 7 |
| AAV2 | 23 | U.S. Pat. No. 6,156,303 SEQ ID NO: 3 |
| AAV2.5T | 24 | U.S. Pat. No. 9,233,131 SEQ ID NO: 42 |
| AAV223.10 | 25 | US20030138772 SEQ ID NO: 75 |
| AAV223.2 | 26 | US20030138772 SEQ ID NO: 49 |
| AAV223.2 | 27 | US20030138772 SEQ ID NO: 76 |
| AAV223.4 | 28 | US20030138772 SEQ ID NO: 50 |
| AAV223.4 | 29 | US20030138772 SEQ ID NO: 73 |
| AAV223.5 | 30 | US20030138772 SEQ ID NO: 51 |
| AAV223.5 | 31 | US20030138772 SEQ ID NO: 74 |
| AAV223.6 | 32 | US20030138772 SEQ ID NO: 52 |
| AAV223.6 | 33 | US20030138772 SEQ ID NO: 78 |
| AAV223.7 | 34 | US20030138772 SEQ ID NO: 53 |
| AAV223.7 | 35 | US20030138772 SEQ ID NO: 77 |
| AAV29.3 | 36 | US20030138772 SEQ ID NO: 82 |
| AAV29.4 | 37 | US20030138772 SEQ ID NO: 12 |
| AAV29.5 | 38 | US20030138772 SEQ ID NO: 83 |
| AAV29.5 (AAVbb.2) | 39 | US20030138772 SEQ ID NO: 13 |
| AAV3 | 40 | US20150159173 SEQ ID NO: 12 |
| AAV3 | 41 | US20030138772 SEQ ID NO: 71, |
| | | US20150159173 SEQ ID NO: 28, |
| | | US20160017295 SEQ ID NO: 3, |
| | | U.S. Pat. No. 7,198,951 SEQ ID NO: 6 |
| AAV3 | 42 | US20030138772 SEQ ID NO: 8 |
| AAV3.3b | 43 | US20030138772 SEQ ID NO: 72 |
| AAV3-3 | 44 | US20150315612 SEQ ID NO: 200 |
| AAV3-3 | 45 | US20150315612 SEQ ID NO: 217 |
| AAV3a | 46 | U.S. Pat. No. 6,156,303 SEQ ID NO: 5 |
| AAV3a | 47 | U.S. Pat. No. 6,156,303 SEQ ID NO: 9 |
| AAV3b | 48 | U.S. Pat. No. 6,156,303 SEQ ID NO: 6 |
| AAV3b | 49 | U.S. Pat. No. 6,156,303 SEQ ID NO: 10 |
| AAV3b | 50 | U.S. Pat. No. 6,156,303 SEQ ID NO: 1 |
| AAV4 | 51 | US20140348794 SEQ ID NO: 17 |
| AAV4 | 52 | US20140348794 SEQ ID NO: 5 |
| AAV4 | 53 | US20140348794 SEQ ID NO: 3 |
| AAV4 | 54 | US20140348794 SEQ ID NO: 14 |
| AAV4 | 55 | US20140348794 SEQ ID NO: 15 |
| AAV4 | 56 | US20140348794 SEQ ID NO: 19 |
| AAV4 | 57 | US20140348794 SEQ ID NO: 12 |
| AAV4 | 58 | US20140348794 SEQ ID NO: 13 |
| AAV4 | 59 | US20140348794 SEQ ID NO: 7 |
| AAV4 | 60 | US20140348794 SEQ ID NO: 8 |
| AAV4 | 61 | US20140348794 SEQ ID NO: 9 |
| AAV4 | 62 | US20140348794 SEQ ID NO: 2 |
| AAV4 | 63 | US20140348794 SEQ ID NO: 10 |
| AAV4 | 64 | US20140348794 SEQ ID NO: 11 |
| AAV4 | 65 | US20140348794 SEQ ID NO: 18 |
| AAV4 | 66 | US20030138772 SEQ ID NO: 63, |
| | | US20160017295 SEQ ID NO: 4, |
| | | US20140348794 SEQ ID NO: 4 |
| AAV4 | 67 | US20140348794 SEQ ID NO: 16 |
| AAV4 | 68 | US20140348794 SEQ ID NO: 20 |
| AAV4 | 69 | US20140348794 SEQ ID NO: 6 |
| AAV4 | 70 | US20140348794 SEQ ID NO: 1 |
| AAV42.2 | 71 | US20030138772 SEQ ID NO: 9 |
| AAV42.2 | 72 | US20030138772 SEQ ID NO: 102 |
| AAV42.3b | 73 | US20030138772 SEQ ID NO: 36 |
| AAV42.3B | 74 | US20030138772 SEQ ID NO: 107 |
| AAV42.4 | 75 | US20030138772 SEQ ID NO: 33 |
| AAV42.4 | 76 | US20030138772 SEQ ID NO: 88 |
| AAV42.8 | 77 | US20030138772 SEQ ID NO: 27 |
| AAV42.8 | 78 | US20030138772 SEQ ID NO: 85 |
| AAV43.1 | 79 | US20030138772 SEQ ID NO: 39 |
| AAV43.1 | 80 | US20030138772 SEQ ID NO: 92 |
| AAV43.12 | 81 | US20030138772 SEQ ID NO: 41 |
| AAV43.12 | 82 | US20030138772 SEQ ID NO: 93 |
| AAV43.20 | 83 | US20030138772 SEQ ID NO: 42 |
| AAV43.20 | 84 | US20030138772 SEQ ID NO: 99 |
| AAV43.21 | 85 | US20030138772 SEQ ID NO: 43 |
| AAV43.21 | 86 | US20030138772 SEQ ID NO: 96 |
| AAV43.23 | 87 | US20030138772 SEQ ID NO: 44 |
| AAV43.23 | 88 | US20030138772 SEQ ID NO: 98 |
| AAV43.25 | 89 | US20030138772 SEQ ID NO: 45 |
| AAV43.25 | 90 | US20030138772 SEQ ID NO: 97 |
| AAV43.5 | 91 | US20030138772 SEQ ID NO: 40 |
| AAV43.5 | 92 | US20030138772 SEQ ID NO: 94 |
| AAV4-4 | 93 | US20150315612 SEQ ID NO: 201 |
| AAV4-4 | 94 | US20150315612 SEQ ID NO: 218 |
| AAV44.1 | 95 | US20030138772 SEQ ID NO: 46 |
| AAV44.1 | 96 | US20030138772 SEQ ID NO: 79 |
| AAV44.5 | 97 | US20030138772 SEQ ID NO: 47 |
| AAV44.5 | 98 | US20030138772 SEQ ID NO: 80 |
| AAV4407 | 99 | US20150315612 SEQ ID NO: 90 |
| AAV5 | 100 | U.S. Pat. No. 7,427,396 SEQ ID NO: 1 |
| AAV5 | 101 | US20030138772 SEQ ID NO: 114 |
| AAV5 | 102 | US20160017295 SEQ ID NO: 5, |
| | | U.S. Pat. No. 7,427,396 SEQ ID NO: 2, |
| | | US20150315612 SEQ ID NO: 216 |
| AAV5 | 103 | US20150315612 SEQ ID NO: 199 |
| AAV6 | 104 | US20150159173 SEQ ID NO: 13 |
| AAV6 | 105 | US20030138772 SEQ ID NO: 65, |
| | | US20150159173 SEQ ID NO: 29, |
| | | US20160017295 SEQ ID NO: 6, |
| | | U.S. Pat. No. 6,156,303 SEQ ID NO: 7 |
| AAV6 | 106 | U.S. Pat. No. 6,156,303 SEQ ID NO: 11 |
| AAV6 | 107 | U.S. Pat. No. 6,156,303 SEQ ID NO: 2 |
| AAV6 | 108 | US20150315612 SEQ ID NO: 203 |
| AAV6 | 109 | US20150315612 SEQ ID NO: 220 |
| AAV6.1 | 110 | US20150159173 |
| AAV6.12 | 111 | US20150159173 |
| AAV6.2 | 112 | US20150159173 |
| AAV7 | 113 | US20150159173 SEQ ID NO: 14 |
| AAV7 | 114 | US20150315612 SEQ ID NO: 183 |
| AAV7 | 115 | US20030138772 SEQ ID NO: 2, |
| | | US20150159173 SEQ ID NO: 30, |
| | | US20150315612 SEQ ID NO: 181, |
| | | US20160017295 SEQ ID NO: 7 |
| AAV7 | 116 | US20030138772 SEQ ID NO: 3 |
| AAV7 | 117 | US20030138772 SEQ ID NO: 1, |
| | | US20150315612 SEQ ID NO: 180 |
| AAV7 | 118 | US20150315612 SEQ ID NO: 213 |
| AAV7 | 119 | US20150315612 SEQ ID NO: 222 |
| AAV8 | 120 | US20150159173 SEQ ID NO: 15 |
| AAV8 | 121 | US20150376240 SEQ ID NO: 7 |
| AAV8 | 122 | US20030138772 SEQ ID NO: 4, |
| | | US20150315612 SEQ ID NO: 182 |
| AAV8 | 123 | US20030138772 SEQ ID NO: 95, |
| | | US20140359799 SEQ ID NO: 1, |
| | | US20150159173 SEQ ID NO: 31, |
| | | US20160017295 SEQ ID NO: 8, |
| | | U.S. Pat. No. 7,198,951 SEQ ID NO: 7, |
| | | US20150315612 SEQ ID NO: 223 |
| AAV8 | 124 | US20150376240 SEQ ID NO: 8 |
| AAV8 | 125 | US20150315612 SEQ ID NO: 214 |
| AAV-8b | 126 | US20150376240 SEQ ID NO: 5 |
| AAV-8b | 127 | US20150376240 SEQ ID NO: 3 |
| AAV-8h | 128 | US20150376240 SEQ ID NO: 6 |
| AAV-8h | 129 | US20150376240 SEQ ID NO: 4 |
| AAV9 | 130 | US20030138772 SEQ ID NO: 5 |
| AAV9 | 131 | U.S. Pat. No. 7,198,951 SEQ ID NO: 1 |
| AAV9 | 132 | US20160017295 SEQ ID NO: 9 |
| AAV9 | 133 | US20030138772 SEQ ID NO: 100, |
| | | U.S. Pat. No. 7,198,951 SEQ ID NO: 2 |
| AAV9 | 134 | U.S. Pat. No. 7,198,951 SEQ ID NO: 3 |
| AAV9 (AAVhu.14) | 135 | U.S. Pat. No. 7,906,111 SEQ ID NO: 3; |
| | | WO2015038958 SEQ ID NO: 11 |
| AAV9 (AAVhu.14) | 136 | U.S. Pat. No. 7,906,111 SEQ ID NO: 123; |
| | | WO2015038958 SEQ ID NO: 2 |
| AAVA3.1 | 137 | US20030138772 SEQ ID NO: 120 |
| AAVA3.3 | 138 | US20030138772 SEQ ID NO: 57 |
| AAVA3.3 | 139 | US20030138772 SEQ ID NO: 66 |
| AAVA3.4 | 140 | US20030138772 SEQ ID NO: 54 |
| AAVA3.4 | 141 | US20030138772 SEQ ID NO: 68 |
| AAVA3.5 | 142 | US20030138772 SEQ ID NO: 55 |
| AAVA3.5 | 143 | US20030138772 SEQ ID NO: 69 |
| AAVA3.7 | 144 | US20030138772 SEQ ID NO: 56 |
| AAVA3.7 | 145 | US20030138772 SEQ ID NO: 67 |
| AAV29.3 (AAVbb.1) | 146 | US20030138772 SEQ ID NO: 11 |
| AAVC2 | 147 | US20030138772 SEQ ID NO: 61 |
| AAVCh.5 | 148 | US20150159173 SEQ ID NO: 46, |
| | | US20150315612 SEQ ID NO: 234 |
| AAVcy.2 (AAV13.3) | 149 | US20030138772 SEQ ID NO: 15 |
| AAV24.1 | 150 | US20030138772 SEQ ID NO: 101 |
| AAVcy.3 (AAV24.1) | 151 | US20030138772 SEQ ID NO: 16 |
| AAV27.3 | 152 | US20030138772 SEQ ID NO: 104 |
| AAVcy.4 (AAV27.3) | 153 | US20030138772 SEQ ID NO: 17 |
| AAVcy.5 | 154 | US20150315612 SEQ ID NO: 227 |
| AAV7.2 | 155 | US20030138772 SEQ ID NO: 103 |
| AAVcy.5 (AAV7.2) | 156 | US20030138772 SEQ ID NO: 18 |
| AAV16.3 | 157 | US20030138772 SEQ ID NO: 105 |
| AAVcy.6 (AAV16.3) | 158 | US20030138772 SEQ ID NO: 10 |
| AAVcy.5 | 159 | US20150159173 SEQ ID NO: 8 |
| AAVcy.5 | 160 | US20150159173 SEQ ID NO: 24 |
| AAVCy.5R1 | 161 | US20150159173 |
| AAVCy.5R2 | 162 | US20150159173 |
| AAVCy.5R3 | 163 | US20150159173 |
| AAVCy.5R4 | 164 | US20150159173 |
| AAVDJ | 165 | US20140359799 SEQ ID NO: 3, |
| | | U.S. Pat. No. 7,588,772 SEQ ID NO: 2 |
| AAVDJ | 166 | US20140359799 SEQ ID NO: 2, |
| | | U.S. Pat. No. 7,588,772 SEQ ID NO: 1 |
| AAVDJ-8 | 167 | U.S. Pat. No. 7,588,772; Grimm et al 2008 |
| AAVDJ-8 | 168 | U.S. Pat. No. 7,588,772; Grimm et al 2008 |
| AAVF5 | 169 | US20030138772 SEQ ID NO: 110 |
| AAVH2 | 170 | US20030138772 SEQ ID NO: 26 |
| AAVH6 | 171 | US20030138772 SEQ ID NO: 25 |
| AAVhE1.1 | 172 | U.S. Pat. No. 9,233,131 SEQ ID NO: 44 |
| AAVhEr1.14 | 173 | U.S. Pat. No. 9,233,131 SEQ ID NO: 46 |
| AAVhEr1.16 | 174 | U.S. Pat. No. 9,233,131 SEQ ID NO: 48 |
| AAVhEr1.18 | 175 | U.S. Pat. No. 9,233,131 SEQ ID NO: 49 |
| AAVhEr1.23 (AAVhEr2.29) | 176 | U.S. Pat. No. 9,233,131 SEQ ID NO: 53 |
| AAVhEr1.35 | 177 | U.S. Pat. No. 9,233,131 SEQ ID NO: 50 |
| AAVhEr1.36 | 178 | U.S. Pat. No. 9,233,131 SEQ ID NO: 52 |
| AAVhEr1.5 | 179 | U.S. Pat. No. 9,233,131 SEQ ID NO: 45 |
| AAVhEr1.7 | 180 | U.S. Pat. No. 9,233,131 SEQ ID NO: 51 |
| AAVhEr1.8 | 181 | U.S. Pat. No. 9,233,131 SEQ ID NO: 47 |
| AAVhEr2.16 | 182 | U.S. Pat. No. 9,233,131 SEQ ID NO: 55 |
| AAVhEr2.30 | 183 | U.S. Pat. No. 9,233,131 SEQ ID NO: 56 |
| AAVhEr2.31 | 184 | U.S. Pat. No. 9,233,131 SEQ ID NO: 58 |
| AAVhEr2.36 | 185 | U.S. Pat. No. 9,233,131 SEQ ID NO: 57 |
| AAVhEr2.4 | 186 | U.S. Pat. No. 9,233,131 SEQ ID NO: 54 |
| AAVhEr3.1 | 187 | U.S. Pat. No. 9,233,131 SEQ ID NO: 59 |
| AAVhu.1 | 188 | US20150315612 SEQ ID NO: 46 |
| AAVhu.1 | 189 | US20150315612 SEQ ID NO: 144 |
| AAVhu.10 (AAV16.8) | 190 | US20150315612 SEQ ID NO: 56 |
| AAVhu.10 (AAV16.8) | 191 | US20150315612 SEQ ID NO: 156 |
| AAVhu.11 (AAV16.12) | 192 | US20150315612 SEQ ID NO: 57 |
| AAVhu.11 (AAV16.12) | 193 | US20150315612 SEQ ID NO: 153 |
| AAVhu.12 | 194 | US20150315612 SEQ ID NO: 59 |
| AAVhu.12 | 195 | US20150315612 SEQ ID NO: 154 |
| AAVhu.13 | 196 | US20150159173 SEQ ID NO: 16, |
| | | US20150315612 SEQ ID NO: 71 |
| AAVhu.13 | 197 | US20150159173 SEQ ID NO: 32, |
| | | US20150315612 SEQ ID NO: 129 |
| AAVhu.136.1 | 198 | US20150315612 SEQ ID NO: 165 |
| AAVhu.140.1 | 199 | US20150315612 SEQ ID NO: 166 |
| AAVhu.140.2 | 200 | US20150315612 SEQ ID NO: 167 |
| AAVhu.145.6 | 201 | US20150315612 SEQ ID No: 178 |
| AAVhu.15 | 202 | US20150315612 SEQ ID NO: 147 |
| AAVhu.15 (AAV33.4) | 203 | US20150315612 SEQ ID NO: 50 |
| AAVhu.156.1 | 204 | US20150315612 SEQ ID No: 179 |
| AAVhu.16 | 205 | US20150315612 SEQ ID NO: 148 |
| AAVhu.16 (AAV33.8) | 206 | US20150315612 SEQ ID NO: 51 |
| AAVhu.17 | 207 | US20150315612 SEQ ID NO: 83 |
| AAVhu.17 (AAV33.12) | 208 | US20150315612 SEQ ID NO: 4 |
| AAVhu.172.1 | 209 | US20150315612 SEQ ID NO: 171 |
| AAVhu.172.2 | 210 | US20150315612 SEQ ID NO: 172 |
| AAVhu.173.4 | 211 | US20150315612 SEQ ID NO: 173 |
| AAVhu.173.8 | 212 | US20150315612 SEQ ID NO: 175 |
| AAVhu.18 | 213 | US20150315612 SEQ ID NO: 52 |
| AAVhu.18 | 214 | US20150315612 SEQ ID NO: 149 |
| AAVhu.19 | 215 | US20150315612 SEQ ID NO: 62 |
| AAVhu.19 | 216 | US20150315612 SEQ ID NO: 133 |
| AAVhu.2 | 217 | US20150315612 SEQ ID NO: 48 |
| AAVhu.2 | 218 | US20150315612 SEQ ID NO: 143 |
| AAVhu.20 | 219 | US20150315612 SEQ ID NO: 63 |
| AAVhu.20 | 220 | US20150315612 SEQ ID NO: 134 |
| AAVhu.21 | 221 | US20150315612 SEQ ID NO: 65 |
| AAVhu.21 | 222 | US20150315612 SEQ ID NO: 135 |
| AAVhu.22 | 223 | US20150315612 SEQ ID NO: 67 |
| AAVhu.22 | 224 | US20150315612 SEQ ID NO: 138 |
| AAVhu.23 | 225 | US20150315612 SEQ ID NO: 60 |
| AAVhu.23.2 | 226 | US20150315612 SEQ ID NO: 137 |
| AAVhu.24 | 227 | US20150315612 SEQ ID NO: 66 |
| AAVhu.24 | 228 | US20150315612 SEQ ID NO: 136 |
| AAVhu.25 | 229 | US20150315612 SEQ ID NO: 49 |
| AAVhu.25 | 230 | US20150315612 SEQ ID NO: 146 |
| AAVhu.26 | 231 | US20150159173 SEQ ID NO: 17, |
| | | US20150315612 SEQ ID NO: 61 |
| AAVhu.26 | 232 | US20150159173 SEQ ID NO: 33, |
| | | US20150315612 SEQ ID NO: 139 |
| AAVhu.27 | 233 | US20150315612 SEQ ID NO: 64 |
| AAVhu.27 | 234 | US20150315612 SEQ ID NO: 140 |
| AAVhu.28 | 235 | US20150315612 SEQ ID NO: 68 |
| AAVhu.28 | 236 | US20150315612 SEQ ID NO: 130 |
| AAVhu.29 | 237 | US20150315612 SEQ ID NO: 69 |
| AAVhu.29 | 238 | US20150159173 SEQ ID NO: 42, |
| | | US20150315612 SEQ ID NO: 132 |
| AAVhu.29 | 239 | US20150315612 SEQ ID NO: 225 |
| AAVhu.29R | 240 | US20150159173 |
| AAVhu.3 | 241 | US20150315612 SEQ ID NO: 44 |
| AAVhu.3 | 242 | US20150315612 SEQ ID NO: 145 |
| AAVhu.30 | 243 | US20150315612 SEQ ID NO: 70 |
| AAVhu.30 | 244 | US20150315612 SEQ ID NO: 131 |
| AAVhu.31 | 245 | US20150315612 SEQ ID NO: 1 |
| AAVhu.31 | 246 | US20150315612 SEQ ID NO: 121 |
| AAVhu.32 | 247 | US20150315612 SEQ ID NO: 2 |
| AAVhu.32 | 248 | US20150315612 SEQ ID NO: 122 |
| AAVhu.33 | 249 | US20150315612 SEQ ID NO: 75 |
| AAVhu.33 | 250 | US20150315612 SEQ ID NO: 124 |
| AAVhu.34 | 251 | US20150315612 SEQ ID NO: 72 |
| AAVhu.34 | 252 | US20150315612 SEQ ID NO: 125 |
| AAVhu.35 | 253 | US20150315612 SEQ ID NO: 73 |
| AAVhu.35 | 254 | US20150315612 SEQ ID NO: 164 |
| AAVhu.36 | 255 | US20150315612 SEQ ID NO: 74 |
| AAVhu.36 | 256 | US20150315612 SEQ ID NO: 126 |
| AAVhu.37 | 257 | US20150159173 SEQ ID NO: 34, |
| | | US20150315612 SEQ ID NO: 88 |
| AAVhu.37 (AAV106.1) | 258 | US20150315612 SEQ ID NO: 10, |
| | | US20150159173 SEQ ID NO: 18 |
| AAVhu.38 | 259 | US20150315612 SEQ ID NO: 161 |
| AAVhu.39 | 260 | US20150315612 SEQ ID NO: 102 |
| AAVhu.39 (AAVLG-9) | 261 | US20150315612 SEQ ID NO: 24 |
| AAVhu.4 | 262 | US20150315612 SEQ ID NO: 47 |
| AAVhu.4 | 263 | US20150315612 SEQ ID NO: 141 |
| AAVhu.40 | 264 | US20150315612 SEQ ID NO: 87 |
| AAVhu.40 (AAV114.3) | 265 | US20150315612 SEQ ID No: 11 |
| AAVhu.41 | 266 | US20150315612 SEQ ID NO: 91 |
| AAVhu.41 (AAV127.2) | 267 | US20150315612 SEQ ID NO: 6 |
| AAVhu.42 | 268 | US20150315612 SEQ ID NO: 85 |
| AAVhu.42 (AAV127.5) | 269 | US20150315612 SEQ ID NO: 8 |
| AAVhu.43 | 270 | US20150315612 SEQ ID NO: 160 |
| AAVhu.43 | 271 | US20150315612 SEQ ID NO: 236 |
| AAVhu.43 (AAV128.1) | 272 | US20150315612 SEQ ID NO: 80 |
| AAVhu.44 | 273 | US20150159173 SEQ ID NO: 45, |
| | | US20150315612 SEQ ID NO: 158 |
| AAVhu.44 (AAV128.3) | 274 | US20150315612 SEQ ID NO: 81 |
| AAVhu.44R1 | 275 | US20150159173 |
| AAVhu.44R2 | 276 | US20150159173 |
| AAVhu.44R3 | 277 | US20150159173 |
| AAVhu.45 | 278 | US20150315612 SEQ ID NO: 76 |
| AAVhu.45 | 279 | US20150315612 SEQ ID NO: 127 |
| AAVhu.46 | 280 | US20150315612 SEQ ID NO: 82 |
| AAVhu.46 | 281 | US20150315612 SEQ ID NO: 159 |
| AAVhu.46 | 282 | US20150315612 SEQ ID NO: 224 |
| AAVhu.47 | 283 | US20150315612 SEQ ID NO: 77 |
| AAVhu.47 | 284 | US20150315612 SEQ ID NO: 128 |
| AAVhu.48 | 285 | US20150159173 SEQ ID NO: 38 |
| AAVhu.48 | 286 | US20150315612 SEQ ID NO: 157 |
| AAVhu.48 (AAV130.4) | 287 | US20150315612 SEQ ID NO: 78 |
| AAVhu.48R1 | 288 | US20150159173 |
| AAVhu.48R2 | 289 | US20150159173 |
| AAVhu.48R3 | 290 | US20150159173 |
| AAVhu.49 | 291 | US20150315612 SEQ ID NO: 209 |
| AAVhu.49 | 292 | US20150315612 SEQ ID NO: 189 |
| AAVhu.5 | 293 | US20150315612 SEQ ID NO: 45 |
| AAVhu.5 | 294 | US20150315612 SEQ ID NO: 142 |
| AAVhu.51 | 295 | US20150315612 SEQ ID NO: 208 |
| AAVhu.51 | 296 | US20150315612 SEQ ID NO: 190 |
| AAVhu.52 | 297 | US20150315612 SEQ ID NO: 210 |
| AAVhu.52 | 298 | US20150315612 SEQ ID NO: 191 |
| AAVhu.53 | 299 | US20150159173 SEQ ID NO: 19 |
| AAVhu.53 | 300 | US20150159173 SEQ ID NO: 35 |
| AAVhu.53 (AAV145.1) | 301 | US20150315612 SEQ ID NO: 176 |
| AAVhu.54 | 302 | US20150315612 SEQ ID NO: 188 |
| AAVhu.54 (AAV145.5) | 303 | US20150315612 SEQ ID No: 177 |
| AAVhu.55 | 304 | US20150315612 SEQ ID NO: 187 |
| AAVhu.56 | 305 | US20150315612 SEQ ID NO: 205 |
| AAVhu.56 (AAV145.6) | 306 | US20150315612 SEQ ID NO: 168 |
| AAVhu.56 (AAV145.6) | 307 | US20150315612 SEQ ID NO: 192 |
| AAVhu.57 | 308 | US20150315612 SEQ ID NO: 206 |
| AAVhu.57 | 309 | US20150315612 SEQ ID NO: 169 |
| AAVhu.57 | 310 | US20150315612 SEQ ID NO: 193 |
| AAVhu.58 | 311 | US20150315612 SEQ ID NO: 207 |
| AAVhu.58 | 312 | US20150315612 SEQ ID NO: 194 |
| AAVhu.6 (AAV3.1) | 313 | US20150315612 SEQ ID NO: 5 |
| AAVhu.6 (AAV3.1) | 314 | US20150315612 SEQ ID NO: 84 |
| AAVhu.60 | 315 | US20150315612 SEQ ID NO: 184 |
| AAVhu.60 (AAV161.10) | 316 | US20150315612 SEQ ID NO: 170 |
| AAVhu.61 | 317 | US20150315612 SEQ ID NO: 185 |
| AAVhu.61 (AAV161.6) | 318 | US20150315612 SEQ ID NO: 174 |
| AAVhu.63 | 319 | US20150315612 SEQ ID NO: 204 |
| AAVhu.63 | 320 | US20150315612 SEQ ID NO: 195 |
| AAVhu.64 | 321 | US20150315612 SEQ ID NO: 212 |
| AAVhu.64 | 322 | US20150315612 SEQ ID NO: 196 |
| AAVhu.66 | 323 | US20150315612 SEQ ID NO: 197 |
| AAVhu.67 | 324 | US20150315612 SEQ ID NO: 215 |
| AAVhu.67 | 325 | US20150315612 SEQ ID NO: 198 |
| AAVhu.7 | 326 | US20150315612 SEQ ID NO: 226 |
| AAVhu.7 | 327 | US20150315612 SEQ ID NO: 150 |
| AAVhu.7 (AAV7.3) | 328 | US20150315612 SEQ ID NO: 55 |
| AAVhu.71 | 329 | US20150315612 SEQ ID NO: 79 |
| AAVhu.8 | 330 | US20150315612 SEQ ID NO: 53 |
| AAVhu.8 | 331 | US20150315612 SEQ ID NO: 12 |
| AAVhu.8 | 332 | US20150315612 SEQ ID NO: 151 |
| AAVhu.9 (AAV3.1) | 333 | US20150315612 SEQ ID NO: 58 |
| AAVhu.9 (AAV3.1) | 334 | US20150315612 SEQ ID NO: 155 |
| AAV-LK01 | 335 | US20150376607 SEQ ID NO: 2 |
| AAV-LK01 | 336 | US20150376607 SEQ ID NO: 29 |
| AAV-LK02 | 337 | US20150376607 SEQ ID NO: 3 |
| AAV-LK02 | 338 | US20150376607 SEQ ID NO: 30 |
| AAV-LK03 | 339 | US20150376607 SEQ ID NO: 4 |
| AAV-LK03 | 340 | WO2015121501 SEQ ID NO: 12, |
| | | US20150376607 SEQ ID NO: 31 |
| AAV-LK04 | 341 | US20150376607 SEQ ID NO: 5 |
| AAV-LK04 | 342 | US20150376607 SEQ ID NO: 32 |
| AAV-LK05 | 343 | US20150376607 SEQ ID NO: 6 |
| AAV-LK05 | 344 | US20150376607 SEQ ID NO: 33 |
| AAV-LK06 | 345 | US20150376607 SEQ ID NO: 7 |
| AAV-LK06 | 346 | US20150376607 SEQ ID NO: 34 |
| AAV-LK07 | 347 | US20150376607 SEQ ID NO: 8 |
| AAV-LK07 | 348 | US20150376607 SEQ ID NO: 35 |
| AAV-LK08 | 349 | US20150376607 SEQ ID NO: 9 |
| AAV-LK08 | 350 | US20150376607 SEQ ID NO: 36 |
| AAV-LK09 | 351 | US20150376607 SEQ ID NO: 10 |
| AAV-LK09 | 352 | US20150376607 SEQ ID NO: 37 |
| AAV-LK10 | 353 | US20150376607 SEQ ID NO: 11 |
| AAV-LK10 | 354 | US20150376607 SEQ ID NO: 38 |
| AAV-LK11 | 355 | US20150376607 SEQ ID NO: 12 |
| AAV-LK11 | 356 | US20150376607 SEQ ID NO: 39 |
| AAV-LK12 | 357 | US20150376607 SEQ ID NO: 13 |
| AAV-LK12 | 358 | US20150376607 SEQ ID NO: 40 |
| AAV-LK13 | 359 | US20150376607 SEQ ID NO: 14 |
| AAV-LK13 | 360 | US20150376607 SEQ ID NO: 41 |
| AAV-LK14 | 361 | US20150376607 SEQ ID NO: 15 |
| AAV-LK14 | 362 | US20150376607 SEQ ID NO: 42 |
| AAV-LK15 | 363 | US20150376607 SEQ ID NO: 16 |
| AAV-LK15 | 364 | US20150376607 SEQ ID NO: 43 |
| AAV-LK16 | 365 | US20150376607 SEQ ID NO: 17 |
| AAV-LK16 | 366 | US20150376607 SEQ ID NO: 44 |
| AAV-LK17 | 367 | US20150376607 SEQ ID NO: 18 |
| AAV-LK17 | 368 | US20150376607 SEQ ID NO: 45 |
| AAV-LK18 | 369 | US20150376607 SEQ ID NO: 19 |
| AAV-LK18 | 370 | US20150376607 SEQ ID NO: 46 |
| AAV-LK19 | 371 | US20150376607 SEQ ID NO: 20 |
| AAV-LK19 | 372 | US20150376607 SEQ ID NO: 47 |
| AAV-PAEC | 373 | US20150376607 SEQ ID NO: 1 |
| AAV-PAEC | 374 | US20150376607 SEQ ID NO: 48 |
| AAV-PAEC11 | 375 | US20150376607 SEQ ID NO: 26 |
| AAV-PAEC11 | 376 | US20150376607 SEQ ID NO: 54 |
| AAV-PAEC12 | 377 | US20150376607 SEQ ID NO: 27 |
| AAV-PAEC12 | 378 | US20150376607 SEQ ID NO: 51 |
| AAV-PAEC13 | 379 | US20150376607 SEQ ID NO: 28 |
| AAV-PAEC13 | 380 | US20150376607 SEQ ID NO: 49 |
| AAV-PAEC2 | 381 | US20150376607 SEQ ID NO: 21 |
| AAV-PAEC2 | 382 | US20150376607 SEQ ID NO: 56 |
| AAV-PAEC4 | 383 | US20150376607 SEQ ID NO: 22 |
| AAV-PAEC4 | 384 | US20150376607 SEQ ID NO: 55 |
| AAV-PAEC6 | 385 | US20150376607 SEQ ID NO: 23 |
| AAV-PAEC6 | 386 | US20150376607 SEQ ID NO: 52 |
| AAV-PAEC7 | 387 | US20150376607 SEQ ID NO: 24 |
| AAV-PAEC7 | 388 | US20150376607 SEQ ID NO: 53 |
| AAV-PAEC8 | 389 | US20150376607 SEQ ID NO: 25 |
| AAV-PAEC8 | 390 | US20150376607 SEQ ID NO: 50 |
| AAVpi.1 | 391 | US20150315612 SEQ ID NO: 28 |
| AAVpi.1 | 392 | US20150315612 SEQ ID NO: 93 |
| AAVpi.2 | 393 | US20150315612 SEQ ID NO: 30 |
| AAVpi.2 | 394 | US20150315612 SEQ ID NO: 95 |
| AAVpi.3 | 395 | US20150315612 SEQ ID NO: 29 |
| AAVpi.3 | 396 | US20150315612 SEQ ID NO: 94 |
| AAVrh.10 | 397 | US20150159173 SEQ ID NO: 9 |
| AAVrh.10 | 398 | US20150159173 SEQ ID NO: 25 |
| AAV44.2 | 399 | US20030138772 SEQ ID NO: 59 |
| AAVrh.10 (AAV44.2) | 400 | US20030138772 SEQ ID NO: 81 |
| AAV42.1B | 401 | US20030138772 SEQ ID NO: 90 |
| AAVrh.12 (AAV42.1b) | 402 | US20030138772 SEQ ID NO: 30 |
| AAVrh.13 | 403 | US20150159173 SEQ ID NO: 10 |
| AAVrh.13 | 404 | US20150159173 SEQ ID NO: 26 |
| AAVrh.13 | 405 | US20150315612 SEQ ID NO: 228 |
| AAVrh.13R | 406 | US20150159173 |
| AAV42.3A | 407 | US20030138772 SEQ ID NO: 87 |
| AAVrh.14 (AAV42.3a) | 408 | US20030138772 SEQ ID NO: 32 |
| AAV42.5A | 409 | US20030138772 SEQ ID NO: 89 |
| AAVrh.17 (AAV42.5a) | 410 | US20030138772 SEQ ID NO: 34 |
| AAV42.5B | 411 | US20030138772 SEQ ID NO: 91 |
| AAVrh.18 (AAV42.5b) | 412 | US20030138772 SEQ ID NO: 29 |
| AAV42.6B | 413 | US20030138772 SEQ ID NO: 112 |
| AAVrh.19 (AAV42.6b) | 414 | US20030138772 SEQ ID NO: 38 |
| AAVrh.2 | 415 | US20150159173 SEQ ID NO: 39 |
| AAVrh.2 | 416 | US20150315612 SEQ ID NO: 231 |
| AAVrh.20 | 417 | US20150159173 SEQ ID NO: 1 |
| AAV42.10 | 418 | US20030138772 SEQ ID NO: 106 |
| AAVrh.21 (AAV42.10) | 419 | US20030138772 SEQ ID NO: 35 |
| AAV42.11 | 420 | US20030138772 SEQ ID NO: 108 |
| AAVrh.22 (AAV42.11) | 421 | US20030138772 SEQ ID NO: 37 |
| AAV42.12 | 422 | US20030138772 SEQ ID NO: 113 |
| AAVrh.23 (AAV42.12) | 423 | US20030138772 SEQ ID NO: 58 |
| AAV42.13 | 424 | US20030138772 SEQ ID NO: 86 |
| AAVrh.24 (AAV42.13) | 425 | US20030138772 SEQ ID NO: 31 |
| AAV42.15 | 426 | US20030138772 SEQ ID NO: 84 |
| AAVrh.25 (AAV42.15) | 427 | US20030138772 SEQ ID NO: 28 |
| AAVrh.2R | 428 | US20150159173 |
| AAVrh.31 (AAV223.1) | 429 | US20030138772 SEQ ID NO: 48 |
| AAVC1 | 430 | US20030138772 SEQ ID NO: 60 |
| AAVrh.32 (AAVC1) | 431 | US20030138772 SEQ ID NO: 19 |
| AAVrh.32/33 | 432 | US20150159173 SEQ ID NO: 2 |
| AAVrh.33 (AAVC3) | 433 | US20030138772 SEQ ID NO: 20 |
| AAVC5 | 434 | US20030138772 SEQ ID NO: 62 |
| AAVrh.34 (AAVC5) | 435 | US20030138772 SEQ ID NO: 21 |
| AAVF1 | 436 | US20030138772 SEQ ID NO: 109 |
| AAVrh.35 (AAVF1) | 437 | US20030138772 SEQ ID NO: 22 |
| AAVF3 | 438 | US20030138772 SEQ ID NO: 111 |
| AAVrh.36 (AAVF3) | 439 | US20030138772 SEQ ID NO: 23 |
| AAVrh.37 | 440 | US20030138772 SEQ ID NO: 24 |
| AAVrh.37 | 441 | US20150159173 SEQ ID NO: 40 |
| AAVrh.37 | 442 | US20150315612 SEQ ID NO: 229 |
| AAVrh.37R2 | 443 | US20150159173 |
| AAVrh.38 (AAVLG-4) | 444 | US20150315612 SEQ ID NO: 7 |
| AAVrh.38 (AAVLG-4) | 445 | US20150315612 SEQ ID NO: 86 |
| AAVrh.39 | 446 | US20150159173 SEQ ID NO: 20, |
| | | US20150315612 SEQ ID NO: 13 |
| AAVrh.39 | 447 | US20150159173 SEQ ID NO: 3, |
| | | US20150159173 SEQ ID NO: 36, |
| | | US20150315612 SEQ ID NO: 89 |
| AAVrh.40 | 448 | US20150315612 SEQ ID NO: 92 |
| AAVrh.40 (AAVLG-10) | 449 | US20150315612 SEQ ID No: 14 |
| AAVrh.43 (AAVN721-8) | 450 | US20150315612 SEQ ID NO: 43, |
| | | US20150159173 SEQ ID NO: 21 |
| AAVrh.43 (AAVN721-8) | 451 | US20150315612 SEQ ID NO: 163, |
| | | US20150159173 SEQ ID NO: 37 |
| AAVrh.44 | 452 | US20150315612 SEQ ID NO: 34 |
| AAVrh.44 | 453 | US20150315612 SEQ ID NO: 111 |
| AAVrh.45 | 454 | US20150315612 SEQ ID NO: 41 |
| AAVrh.45 | 455 | US20150315612 SEQ ID NO: 109 |
| AAVrh.46 | 456 | US20150159173 SEQ ID NO: 22, |
| | | US20150315612 SEQ ID NO: 19 |
| AAVrh.46 | 457 | US20150159173 SEQ ID NO: 4, |
| | | US20150315612 SEQ ID NO: 101 |
| AAVrh.47 | 458 | US20150315612 SEQ ID NO: 38 |
| AAVrh.47 | 459 | US20150315612 SEQ ID NO: 118 |
| AAVrh.48 | 460 | US20150159173 SEQ ID NO: 44, |
| | | US20150315612 SEQ ID NO: 115 |
| AAVrh.48.1 | 461 | US20150159173 |
| AAVrh.48.1.2 | 462 | US20150159173 |
| AAVrh.48.2 | 463 | US20150159173 |
| AAVrh.48 (AAV1-7) | 464 | US20150315612 SEQ ID NO: 32 |
| AAVrh.49 (AAV1-8) | 465 | US20150315612 SEQ ID NO: 25 |
| AAVrh.49 (AAV1-8) | 466 | US20150315612 SEQ ID NO: 103 |
| AAVrh.50 (AAV2-4) | 467 | US20150315612 SEQ ID NO: 23 |
| AAVrh.50 (AAV2-4) | 468 | US20150315612 SEQ ID NO: 108 |
| AAVrh.51 (AAV2-5) | 469 | US20150315612 SEQ ID No: 22 |
| AAVrh.51 (AAV2-5) | 470 | US20150315612 SEQ ID NO: 104 |
| AAVrh.52 (AAV3-9) | 471 | US20150315612 SEQ ID NO: 18 |
| AAVrh.52 (AAV3-9) | 472 | US20150315612 SEQ ID NO: 96 |
| AAVrh.53 | 473 | US20150315612 SEQ ID NO: 97 |
| AAVrh.53 (AAV3-11) | 474 | US20150315612 SEQ ID NO: 17 |
| AAVrh.53 (AAV3-11) | 475 | US20150315612 SEQ ID NO: 186 |
| AAVrh.54 | 476 | US20150315612 SEQ ID NO: 40 |
| AAVrh.54 | 477 | US20150159173 SEQ ID NO: 49, |
| | | US20150315612 SEQ ID NO: 116 |
| AAVrh.55 | 478 | US20150315612 SEQ ID NO: 37 |
| AAVrh.55 (AAV4-19) | 479 | US20150315612 SEQ ID NO: 117 |
| AAVrh.56 | 480 | US20150315612 SEQ ID NO: 54 |
| AAVrh.56 | 481 | US20150315612 SEQ ID NO: 152 |
| AAVrh.57 | 482 | US20150315612 SEQ ID NO: 26 |
| AAVrh.57 | 483 | US20150315612 SEQ ID NO: 105 |
| AAVrh.58 | 484 | US20150315612 SEQ ID NO: 27 |
| AAVrh.58 | 485 | US20150159173 SEQ ID NO: 48, |
| | | US20150315612 SEQ ID NO: 106 |
| AAVrh.58 | 486 | US20150315612 SEQ ID NO: 232 |
| AAVrh.59 | 487 | US20150315612 SEQ ID NO: 42 |
| AAVrh.59 | 488 | US20150315612 SEQ ID NO: 110 |
| AAVrh.60 | 489 | US20150315612 SEQ ID NO: 31 |
| AAVrh.60 | 490 | US20150315612 SEQ ID NO: 120 |
| AAVrh.61 | 491 | US20150315612 SEQ ID NO: 107 |
| AAVrh.61 (AAV2-3) | 492 | US20150315612 SEQ ID NO: 21 |
| AAVrh.62 (AAV2-15) | 493 | US20150315612 SEQ ID No: 33 |
| AAVrh.62 (AAV2-15) | 494 | US20150315612 SEQ ID NO: 114 |
| AAVrh.64 | 495 | US20150315612 SEQ ID No: 15 |
| AAVrh.64 | 496 | US20150159173 SEQ ID NO: 43, |
| | | US20150315612 SEQ ID NO: 99 |
| AAVrh.64 | 497 | US20150315612 SEQ ID NO: 233 |
| AAVRh.64R1 | 498 | US20150159173 |
| AAVRh.64R2 | 499 | US20150159173 |
| AAVrh.65 | 500 | US20150315612 SEQ ID NO: 35 |
| AAVrh.65 | 501 | US20150315612 SEQ ID NO: 112 |
| AAVrh.67 | 502 | US20150315612 SEQ ID NO: 36 |
| AAVrh.67 | 503 | US20150315612 SEQ ID NO: 230 |
| AAVrh.67 | 504 | US20150159173 SEQ ID NO: 47, |
| | | US20150315612 SEQ ID NO: 113 |
| AAVrh.68 | 505 | US20150315612 SEQ ID NO: 16 |
| AAVrh.68 | 506 | US20150315612 SEQ ID NO: 100 |
| AAVrh.69 | 507 | US20150315612 SEQ ID NO: 39 |
| AAVrh.69 | 508 | US20150315612 SEQ ID NO: 119 |
| AAVrh.70 | 509 | US20150315612 SEQ ID NO: 20 |
| AAVrh.70 | 510 | US20150315612 SEQ ID NO: 98 |
| AAVrh.71 | 511 | US20150315612 SEQ ID NO: 162 |
| AAVrh.72 | 512 | US20150315612 SEQ ID NO: 9 |
| AAVrh.73 | 513 | US20150159173 SEQ ID NO: 5 |
| AAVrh.74 | 514 | US20150159173 SEQ ID NO: 6 |
| AAVrh.8 | 515 | US20150159173 SEQ ID NO: 41 |
| AAVrh.8 | 516 | US20150315612 SEQ ID NO: 235 |
| AAVrh.8R | 517 | US20150159173, |
| | | WO2015168666 SEQ ID NO: 9 |
| AAVrh.8R A586R mutant | 518 | WO2015168666 SEQ ID NO: 10 |
| AAVrh.8R R533A mutant | 519 | WO2015168666 SEQ ID NO: 11 |
| BAAV (bovine AAV) | 520 | U.S. Pat. No. 9,193,769 SEQ ID NO: 8 |
| BAAV (bovine AAV) | 521 | U.S. Pat. No. 9,193,769 SEQ ID NO: 10 |
| BAAV (bovine AAV) | 522 | U.S. Pat. No. 9,193,769 SEQ ID NO: 4 |
| BAAV (bovine AAV) | 523 | U.S. Pat. No. 9,193,769 SEQ ID NO: 2 |
| BAAV (bovine AAV) | 524 | U.S. Pat. No. 9,193,769 SEQ ID NO: 6 |
| BAAV (bovine AAV) | 525 | U.S. Pat. No. 9,193,769 SEQ ID NO: 1 |
| BAAV (bovine AAV) | 526 | U.S. Pat. No. 9,193,769 SEQ ID NO: 5 |
| BAAV (bovine AAV) | 527 | U.S. Pat. No. 9,193,769 SEQ ID NO: 3 |
| BAAV (bovine AAV) | 528 | U.S. Pat. No. 9,193,769 SEQ ID NO: 11 |
| BAAV (bovine AAV) | 529 | U.S. Pat. No. 7,427,396 SEQ ID NO: 5 |
| BAAV (bovine AAV) | 530 | U.S. Pat. No. 7,427,396 SEQ ID NO: 6 |
| BAAV (bovine AAV) | 531 | U.S. Pat. No. 9,193,769 SEQ ID NO: 7 |
| BAAV (bovine AAV) | 532 | U.S. Pat. No. 9,193,769 SEQ ID NO: 9 |
| BNP61 AAV | 533 | US20150238550 SEQ ID NO: 1 |
| BNP61 AAV | 534 | US20150238550 SEQ ID NO: 2 |
| BNP62 AAV | 535 | US20150238550 SEQ ID NO: 3 |
| BNP63 AAV | 536 | US20150238550 SEQ ID NO: 4 |
| caprine AAV | 537 | U.S. Pat. No. 7,427,396 SEQ ID NO: 3 |
| caprine AAV | 538 | U.S. Pat. No. 7,427,396 SEQ ID NO: 4 |
| true type AAV (ttAAV) | 539 | WO2015121501 SEQ ID NO: 2 |
| AAAV (Avian AAV) | 540 | U.S. Pat. No. 9,238,800 SEQ ID NO: 12 |
| AAAV (Avian AAV) | 541 | U.S. Pat. No. 9,238,800 SEQ ID NO: 2 |
| AAAV (Avian AAV) | 542 | U.S. Pat. No. 9,238,800 SEQ ID NO: 6 |
| AAAV (Avian AAV) | 543 | U.S. Pat. No. 9,238,800 SEQ ID NO: 4 |
| AAAV (Avian AAV) | 544 | U.S. Pat. No. 9,238,800 SEQ ID NO: 8 |
| AAAV (Avian AAV) | 545 | U.S. Pat. No. 9,238,800 SEQ ID NO: 14 |
| AAAV (Avian AAV) | 546 | U.S. Pat. No. 9,238,800 SEQ ID NO: 10 |
| AAAV (Avian AAV) | 547 | U.S. Pat. No. 9,238,800 SEQ ID NO: 15 |
| AAAV (Avian AAV) | 548 | U.S. Pat. No. 9,238,800 SEQ ID NO: 5 |
| AAAV (Avian AAV) | 549 | U.S. Pat. No. 9,238,800 SEQ ID NO: 9 |
| AAAV (Avian AAV) | 550 | U.S. Pat. No. 9,238,800 SEQ ID NO: 3 |
| AAAV (Avian AAV) | 551 | U.S. Pat. No. 9,238,800 SEQ ID NO: 7 |
| AAAV (Avian AAV) | 552 | U.S. Pat. No. 9,238,800 SEQ ID NO: 11 |
| AAAV (Avian AAV) | 553 | U.S. Pat. No. 9,238,800 SEQ ID NO: 13 |
| AAAV (Avian AAV) | 554 | U.S. Pat. No. 9,238,800 SEQ ID NO: 1 |
| AAV Shuffle 100-1 | 555 | US20160017295 SEQ ID NO: 23 |
| AAV Shuffle 100-1 | 556 | US20160017295 SEQ ID NO: 11 |
| AAV Shuffle 100-2 | 557 | US20160017295 SEQ ID NO: 37 |
| AAV Shuffle 100-2 | 558 | US20160017295 SEQ ID NO: 29 |
| AAV Shuffle 100-3 | 559 | US20160017295 SEQ ID NO: 24 |
| AAV Shuffle 100-3 | 560 | US20160017295 SEQ ID NO: 12 |
| AAV Shuffle 100-7 | 561 | US20160017295 SEQ ID NO: 25 |
| AAV Shuffle 100-7 | 562 | US20160017295 SEQ ID NO: 13 |
| AAV Shuffle 10-2 | 563 | US20160017295 SEQ ID NO: 34 |
| AAV Shuffle 10-2 | 564 | US20160017295 SEQ ID NO: 26 |
| AAV Shuffle 10-6 | 565 | US20160017295 SEQ ID NO: 35 |
| AAV Shuffle 10-6 | 566 | US20160017295 SEQ ID NO: 27 |
| AAV Shuffle 10-8 | 567 | US20160017295 SEQ ID NO: 36 |
| AAV Shuffle 10-8 | 568 | US20160017295 SEQ ID NO: 28 |
| AAV SM 100-10 | 569 | US20160017295 SEQ ID NO: 41 |
| AAV SM 100-10 | 570 | US20160017295 SEQ ID NO: 33 |
| AAV SM 100-3 | 571 | US20160017295 SEQ ID NO: 40 |
| AAV SM 100-3 | 572 | US20160017295 SEQ ID NO: 32 |
| AAV SM 10-1 | 573 | US20160017295 SEQ ID NO: 38 |
| AAV SM 10-1 | 574 | US20160017295 SEQ ID NO: 30 |
| AAV SM 10-2 | 575 | US20160017295 SEQ ID NO: 10 |
| AAV SM 10-2 | 576 | US20160017295 SEQ ID NO: 22 |
| AAV SM 10-8 | 577 | US20160017295 SEQ ID NO: 39 |
| AAV SM 10-8 | 578 | US20160017295 SEQ ID NO: 31 |
| AAVF1/HSC1 | 579 | WO2016049230 SEQ ID NO: 20 |
| AAVF2/HSC2 | 580 | WO2016049230 SEQ ID NO: 21 |
| AAVF3/HSC3 | 581 | WO2016049230 SEQ ID NO: 22 |
| AAVF4/HSC4 | 582 | WO2016049230 SEQ ID NO: 23 |
| AAVF5/HSC5 | 583 | WO2016049230 SEQ ID NO: 25 |
| AAVF6/HSC6 | 584 | WO2016049230 SEQ ID NO: 24 |
| AAVF7/HSC7 | 585 | WO2016049230 SEQ ID NO: 27 |
| AAVF8/HSC8 | 586 | WO2016049230 SEQ ID NO: 28 |
| AAVF9/HSC9 | 587 | WO2016049230 SEQ ID NO: 29 |
| AAVF11/HSC11 | 588 | WO2016049230 SEQ ID NO: 26 |
| AAVF12/HSC12 | 589 | WO2016049230 SEQ ID NO: 30 |
| AAVF13/HSC13 | 590 | WO2016049230 SEQ ID NO: 31 |
| AAVF14/HSC14 | 591 | WO2016049230 SEQ ID NO: 32 |
| AAVF15/HSC15 | 592 | WO2016049230 SEQ ID NO: 33 |
| AAVF16/HSC16 | 593 | WO2016049230 SEQ ID NO: 34 |
| AAVF17/HSC17 | 594 | WO2016049230 SEQ ID NO: 35 |
| AAVF1/HSC1 | 595 | WO2016049230 SEQ ID NO: 2 |
| AAVF2/HSC2 | 596 | WO2016049230 SEQ ID NO: 3 |
| AAVF3/HSC3 | 597 | WO2016049230 SEQ ID NO: 5 |
| AAVF4/HSC4 | 598 | WO2016049230 SEQ ID NO: 6 |
| AAVF5/HSC5 | 599 | WO2016049230 SEQ ID NO: 11 |
| AAVF6/HSC6 | 600 | WO2016049230 SEQ ID NO: 7 |
| AAVF7/HSC7 | 601 | WO2016049230 SEQ ID NO: 8 |
| AAVF8/HSC8 | 602 | WO2016049230 SEQ ID NO: 9 |
| AAVF9/HSC9 | 603 | WO2016049230 SEQ ID NO: 10 |
| AAVF11/HSC11 | 604 | WO2016049230 SEQ ID NO: 4 |
| AAVF12/HSC12 | 605 | WO2016049230 SEQ ID NO: 12 |
| AAVF13/HSC13 | 606 | WO2016049230 SEQ ID NO: 14 |
| AAVF14/HSC14 | 607 | WO2016049230 SEQ ID NO: 15 |
| AAVF15/HSC15 | 608 | WO2016049230 SEQ ID NO: 16 |
| AAVF16/HSC16 | 609 | WO2016049230 SEQ ID NO: 17 |
| AAVF17/HSC17 | 610 | WO2016049230 SEQ ID NO: 13 |
| AAV CBr-E1 | 611 | U.S. Pat. No. 8,734,809 SEQ ID NO: 13 |
| AAV CBr-E2 | 612 | U.S. Pat. No. 8,734,809 SEQ ID NO: 14 |
| AAV CBr-E3 | 613 | U.S. Pat. No. 8,734,809 SEQ ID NO: 15 |
| AAV CBr-E4 | 614 | U.S. Pat. No. 8,734,809 SEQ ID NO: 16 |
| AAV CBr-E5 | 615 | U.S. Pat. No. 8,734,809 SEQ ID NO: 17 |
| AAV CBr-e5 | 616 | U.S. Pat. No. 8,734,809 SEQ ID NO: 18 |
| AAV CBr-E6 | 617 | U.S. Pat. No. 8,734,809 SEQ ID NO: 19 |
| AAV CBr-E7 | 618 | U.S. Pat. No. 8,734,809 SEQ ID NO: 20 |
| AAV CBr-E8 | 619 | U.S. Pat. No. 8,734,809 SEQ ID NO: 21 |
| AAV CLv-D1 | 620 | U.S. Pat. No. 8,734,809 SEQ ID NO: 22 |
| AAV CLv-D2 | 621 | U.S. Pat. No. 8,734,809 SEQ ID NO: 23 |
| AAV CLv-D3 | 622 | U.S. Pat. No. 8,734,809 SEQ ID NO: 24 |
| AAV CLv-D4 | 623 | U.S. Pat. No. 8,734,809 SEQ ID NO: 25 |
| AAV CLv-D5 | 624 | U.S. Pat. No. 8,734,809 SEQ ID NO: 26 |
| AAV CLv-D6 | 625 | U.S. Pat. No. 8,734,809 SEQ ID NO: 27 |
| AAV CLv-D7 | 626 | U.S. Pat. No. 8,734,809 SEQ ID NO: 28 |
| AAV CLv-D8 | 627 | U.S. Pat. No. 8,734,809 SEQ ID NO: 29 |
| AAV CLv-E1 | 628 | U.S. Pat. No. 8,734,809 SEQ ID NO: 13 |
| AAV CLv-R1 | 629 | U.S. Pat. No. 8,734,809 SEQ ID NO: 30 |
| AAV CLv-R2 | 630 | U.S. Pat. No. 8,734,809 SEQ ID NO: 31 |
| AAV CLv-R3 | 631 | U.S. Pat. No. 8,734,809 SEQ ID NO: 32 |
| AAV CLv-R4 | 632 | U.S. Pat. No. 8,734,809 SEQ ID NO: 33 |
| AAV CLv-R5 | 633 | U.S. Pat. No. 8,734,809 SEQ ID NO: 34 |
| AAV CLv-R6 | 634 | U.S. Pat. No. 8,734,809 SEQ ID NO: 35 |
| AAV CLv-R7 | 635 | U.S. Pat. No. 8,734,809 SEQ ID NO: 36 |
| AAV CLv-R8 | 636 | U.S. Pat. No. 8,734,809 SEQ ID NO: 37 |
| AAV CLv-R9 | 637 | U.S. Pat. No. 8,734,809 SEQ ID NO: 38 |
| AAV CLg-F1 | 638 | U.S. Pat. No. 8,734,809 SEQ ID NO: 39 |
| AAV CLg-F2 | 639 | U.S. Pat. No. 8,734,809 SEQ ID NO: 40 |
| AAV CLg-F3 | 640 | U.S. Pat. No. 8,734,809 SEQ ID NO: 41 |
| AAV CLg-F4 | 641 | U.S. Pat. No. 8,734,809 SEQ ID NO: 42 |
| AAV CLg-F5 | 642 | U.S. Pat. No. 8,734,809 SEQ ID NO: 43 |
| AAV CLg-F6 | 643 | U.S. Pat. No. 8,734,809 SEQ ID NO: 43 |
| AAV CLg-F7 | 644 | U.S. Pat. No. 8,734,809 SEQ ID NO: 44 |
| AAV CLg-F8 | 645 | U.S. Pat. No. 8,734,809 SEQ ID NO: 43 |
| AAV CSp-1 | 646 | U.S. Pat. No. 8,734,809 SEQ ID NO: 45 |
| AAV CSp-10 | 647 | U.S. Pat. No. 8,734,809 SEQ ID NO: 46 |
| AAV CSp-11 | 648 | U.S. Pat. No. 8,734,809 SEQ ID NO: 47 |
| AAV CSp-2 | 649 | U.S. Pat. No. 8,734,809 SEQ ID NO: 48 |
| AAV CSp-3 | 650 | U.S. Pat. No. 8,734,809 SEQ ID NO: 49 |
| AAV CSp-4 | 651 | U.S. Pat. No. 8,734,809 SEQ ID NO: 50 |
| AAV CSp-6 | 652 | U.S. Pat. No. 8,734,809 SEQ ID NO: 51 |
| AAV CSp-7 | 653 | U.S. Pat. No. 8,734,809 SEQ ID NO: 52 |
| AAV CSp-8 | 654 | U.S. Pat. No. 8,734,809 SEQ ID NO: 53 |
| AAV CSp-9 | 655 | U.S. Pat. No. 8,734,809 SEQ ID NO: 54 |
| AAV CHt-2 | 656 | U.S. Pat. No. 8,734,809 SEQ ID NO: 55 |
| AAV CHt-3 | 657 | U.S. Pat. No. 8,734,809 SEQ ID NO: 56 |
| AAV CKd-1 | 658 | U.S. Pat. No. 8,734,809 SEQ ID NO: 57 |
| AAV CKd-10 | 659 | U.S. Pat. No. 8,734,809 SEQ ID NO: 58 |
| AAV CKd-2 | 660 | U.S. Pat. No. 8,734,809 SEQ ID NO: 59 |
| AAV CKd-3 | 661 | U.S. Pat. No. 8,734,809 SEQ ID NO: 60 |
| AAV CKd-4 | 662 | U.S. Pat. No. 8,734,809 SEQ ID NO: 61 |
| AAV CKd-6 | 663 | U.S. Pat. No. 8,734,809 SEQ ID NO: 62 |
| AAV CKd-7 | 664 | U.S. Pat. No. 8,734,809 SEQ ID NO: 63 |
| AAV CKd-8 | 665 | U.S. Pat. No. 8,734,809 SEQ ID NO: 64 |
| AAV CLv-1 | 666 | U.S. Pat. No. 8,734,809 SEQ ID NO: 65 |
| AAV CLv-12 | 667 | U.S. Pat. No. 8,734,809 SEQ ID NO: 66 |
| AAV CLv-13 | 668 | U.S. Pat. No. 8,734,809 SEQ ID NO: 67 |
| AAV CLv-2 | 669 | U.S. Pat. No. 8,734,809 SEQ ID NO: 68 |
| AAV CLv-3 | 670 | U.S. Pat. No. 8,734,809 SEQ ID NO: 69 |
| AAV CLv-4 | 671 | U.S. Pat. No. 8,734,809 SEQ ID NO: 70 |
| AAV CLv-6 | 672 | U.S. Pat. No. 8,734,809 SEQ ID NO: 71 |
| AAV CLv-8 | 673 | U.S. Pat. No. 8,734,809 SEQ ID NO: 72 |
| AAV CKd-B1 | 674 | U.S. Pat. No. 8,734,809 SEQ ID NO: 73 |
| AAV CKd-B2 | 675 | U.S. Pat. No. 8,734,809 SEQ ID NO: 74 |
| AAV CKd-B3 | 676 | U.S. Pat. No. 8,734,809 SEQ ID NO: 75 |
| AAV CKd-B4 | 677 | U.S. Pat. No. 8,734,809 SEQ ID NO: 76 |
| AAV CKd-B5 | 678 | U.S. Pat. No. 8,734,809 SEQ ID NO: 77 |
| AAV CKd-B6 | 679 | U.S. Pat. No. 8,734,809 SEQ ID NO: 78 |
| AAV CKd-B7 | 680 | U.S. Pat. No. 8,734,809 SEQ ID NO: 79 |
| AAV CKd-B8 | 681 | U.S. Pat. No. 8,734,809 SEQ ID NO: 80 |
| AAV CKd-H1 | 682 | U.S. Pat. No. 8,734,809 SEQ ID NO: 81 |
| AAV CKd-H2 | 683 | U.S. Pat. No. 8,734,809 SEQ ID NO: 82 |
| AAV CKd-H3 | 684 | U.S. Pat. No. 8,734,809 SEQ ID NO: 83 |
| AAV CKd-H4 | 685 | U.S. Pat. No. 8,734,809 SEQ ID NO: 84 |
| AAV CKd-H5 | 686 | U.S. Pat. No. 8,734,809 SEQ ID NO: 85 |
| AAV CKd-H6 | 687 | U.S. Pat. No. 8,734,809 SEQ ID NO: 77 |
| AAV CHt-1 | 688 | U.S. Pat. No. 8,734,809 SEQ ID NO: 86 |
| AAV CLvl-1 | 689 | U.S. Pat. No. 8,734,809 SEQ ID NO: 171 |
| AAV CLv1-2 | 690 | U.S. Pat. No. 8,734,809 SEQ ID NO: 172 |
| AAV CLv1-3 | 691 | U.S. Pat. No. 8,734,809 SEQ ID NO: 173 |
| AAV CLv1-4 | 692 | U.S. Pat. No. 8,734,809 SEQ ID NO: 174 |
| AAV Clv1-7 | 693 | U.S. Pat. No. 8,734,809 SEQ ID NO: 175 |
| AAV Clv1-8 | 694 | U.S. Pat. No. 8,734,809 SEQ ID NO: 176 |
| AAV Clv1-9 | 695 | U.S. Pat. No. 8,734,809 SEQ ID NO: 177 |
| AAV Clv1-10 | 696 | U.S. Pat. No. 8,734,809 SEQ ID NO: 178 |
| AAV.VR-355 | 697 | U.S. Pat. No. 8,734,809 SEQ ID NO: 181 |
| AAV.hu.48R3 | 698 | U.S. Pat. No. 8,734,809 SEQ ID NO: 183 |
| AAV CBr-E1 | 699 | U.S. Pat. No. 8,734,809 SEQ ID NO: 87 |
| AAV CBr-E2 | 700 | U.S. Pat. No. 8,734,809 SEQ ID NO: 88 |
| AAV CBr-E3 | 701 | U.S. Pat. No. 8,734,809 SEQ ID NO: 89 |
| AAV CBr-E4 | 702 | U.S. Pat. No. 8,734,809 SEQ ID NO: 90 |
| AAV CBr-E5 | 703 | U.S. Pat. No. 8,734,809 SEQ ID NO: 91 |
| AAV CBr-e5 | 704 | U.S. Pat. No. 8,734,809 SEQ ID NO: 92 |
| AAV CBr-E6 | 705 | U.S. Pat. No. 8,734,809 SEQ ID NO: 93 |
| AAV CBr-E7 | 706 | U.S. Pat. No. 8,734,809 SEQ ID NO: 94 |
| AAV CBr-E8 | 707 | U.S. Pat. No. 8,734,809 SEQ ID NO: 95 |
| AAV CLv-D1 | 708 | U.S. Pat. No. 8,734,809 SEQ ID NO: 96 |
| AAV CLv-D2 | 709 | U.S. Pat. No. 8,734,809 SEQ ID NO: 97 |
| AAV CLv-D3 | 710 | U.S. Pat. No. 8,734,809 SEQ ID NO: 98 |
| AAV CLv-D4 | 711 | U.S. Pat. No. 8,734,809 SEQ ID NO: 99 |
| AAV CLv-D5 | 712 | U.S. Pat. No. 8,734,809 SEQ ID NO: 100 |
| AAV CLv-D6 | 713 | U.S. Pat. No. 8,734,809 SEQ ID NO: 101 |
| AAV CLv-D7 | 714 | U.S. Pat. No. 8,734,809 SEQ ID NO: 102 |
| AAV CLv-D8 | 715 | U.S. Pat. No. 8,734,809 SEQ ID NO: 103 |
| AAV CLv-E1 | 716 | U.S. Pat. No. 8,734,809 SEQ ID NO: 87 |
| AAV CLv-R1 | 717 | U.S. Pat. No. 8,734,809 SEQ ID NO: 104 |
| AAV CLv-R2 | 718 | U.S. Pat. No. 8,734,809 SEQ ID NO: 105 |
| AAV CLv-R3 | 719 | U.S. Pat. No. 8,734,809 SEQ ID NO: 106 |
| AAV CLv-R4 | 720 | U.S. Pat. No. 8,734,809 SEQ ID NO: 107 |
| AAV CLv-R5 | 721 | U.S. Pat. No. 8,734,809 SEQ ID NO: 108 |
| AAV CLv-R6 | 722 | U.S. Pat. No. 8,734,809 SEQ ID NO: 109 |
| AAV CLv-R7 | 723 | U.S. Pat. No. 8,734,809 SEQ ID NO: 110 |
| AAV CLv-R8 | 724 | U.S. Pat. No. 8,734,809 SEQ ID NO: 111 |
| AAV CLv-R9 | 725 | U.S. Pat. No. 8,734,809 SEQ ID NO: 112 |
| AAV CLg-F1 | 726 | U.S. Pat. No. 8,734,809 SEQ ID NO: 113 |
| AAV CLg-F2 | 727 | U.S. Pat. No. 8,734,809 SEQ ID NO: 114 |
| AAV CLg-F3 | 728 | U.S. Pat. No. 8,734,809 SEQ ID NO: 115 |
| AAV CLg-F4 | 729 | U.S. Pat. No. 8,734,809 SEQ ID NO: 116 |
| AAV CLg-F5 | 730 | U.S. Pat. No. 8,734,809 SEQ ID NO: 117 |
| AAV CLg-F6 | 731 | U.S. Pat. No. 8,734,809 SEQ ID NO: 117 |
| AAV CLg-F7 | 732 | U.S. Pat. No. 8,734,809 SEQ ID NO: 118 |
| AAV CLg-F8 | 733 | U.S. Pat. No. 8,734,809 SEQ ID NO: 117 |
| AAV CSp-1 | 734 | U.S. Pat. No. 8,734,809 SEQ ID NO: 119 |
| AAV CSp-10 | 735 | U.S. Pat. No. 8,734,809 SEQ ID NO: 120 |
| AAV CSp-11 | 736 | U.S. Pat. No. 8,734,809 SEQ ID NO: 121 |
| AAV CSp-2 | 737 | U.S. Pat. No. 8,734,809 SEQ ID NO: 122 |
| AAV CSp-3 | 738 | U.S. Pat. No. 8,734,809 SEQ ID NO: 123 |
| AAV CSp-4 | 739 | U.S. Pat. No. 8,734,809 SEQ ID NO: 124 |
| AAV CSp-6 | 740 | U.S. Pat. No. 8,734,809 SEQ ID NO: 125 |
| AAV CSp-7 | 741 | U.S. Pat. No. 8,734,809 SEQ ID NO: 126 |
| AAV CSp-8 | 742 | U.S. Pat. No. 8,734,809 SEQ ID NO: 127 |
| AAV CSp-9 | 743 | U.S. Pat. No. 8,734,809 SEQ ID NO: 128 |
| AAV CHt-2 | 744 | U.S. Pat. No. 8,734,809 SEQ ID NO: 129 |
| AAV CHt-3 | 745 | U.S. Pat. No. 8,734,809 SEQ ID NO: 130 |
| AAV CKd-1 | 746 | U.S. Pat. No. 8,734,809 SEQ ID NO: 131 |
| AAV CKd-10 | 747 | U.S. Pat. No. 8,734,809 SEQ ID NO: 132 |
| AAV CKd-2 | 748 | U.S. Pat. No. 8,734,809 SEQ ID NO: 133 |
| AAV CKd-3 | 749 | U.S. Pat. No. 8,734,809 SEQ ID NO: 134 |
| AAV CKd-4 | 750 | U.S. Pat. No. 8,734,809 SEQ ID NO: 135 |
| AAV CKd-6 | 751 | U.S. Pat. No. 8,734,809 SEQ ID NO: 136 |
| AAV CKd-7 | 752 | U.S. Pat. No. 8,734,809 SEQ ID NO: 137 |
| AAV CKd-8 | 753 | U.S. Pat. No. 8,734,809 SEQ ID NO: 138 |
| AAV CLv-1 | 754 | U.S. Pat. No. 8,734,809 SEQ ID NO: 139 |
| AAV CLv-12 | 755 | U.S. Pat. No. 8,734,809 SEQ ID NO: 140 |
| AAV CLv-13 | 756 | U.S. Pat. No. 8,734,809 SEQ ID NO: 141 |
| AAV CLv-2 | 757 | U.S. Pat. No. 8,734,809 SEQ ID NO: 142 |
| AAV CLv-3 | 758 | U.S. Pat. No. 8,734,809 SEQ ID NO: 143 |
| AAV CLv-4 | 759 | U.S. Pat. No. 8,734,809 SEQ ID NO: 144 |
| AAV CLv-6 | 760 | U.S. Pat. No. 8,734,809 SEQ ID NO: 145 |
| AAV CLv-8 | 761 | U.S. Pat. No. 8,734,809 SEQ ID NO: 146 |
| AAV CKd-B1 | 762 | U.S. Pat. No. 8,734,809 SEQ ID NO: 147 |
| AAV CKd-B2 | 763 | U.S. Pat. No. 8,734,809 SEQ ID NO: 148 |
| AAV CKd-B3 | 764 | U.S. Pat. No. 8,734,809 SEQ ID NO: 149 |
| AAV CKd-B4 | 765 | U.S. Pat. No. 8,734,809 SEQ ID NO: 150 |
| AAV CKd-B5 | 766 | U.S. Pat. No. 8,734,809 SEQ ID NO: 151 |
| AAV CKd-B6 | 767 | U.S. Pat. No. 8,734,809 SEQ ID NO: 152 |
| AAV CKd-B7 | 768 | U.S. Pat. No. 8,734,809 SEQ ID NO: 153 |
| AAV CKd-B8 | 769 | U.S. Pat. No. 8,734,809 SEQ ID NO: 154 |
| AAV CKd-H1 | 770 | U.S. Pat. No. 8,734,809 SEQ ID NO: 155 |
| AAV CKd-H2 | 771 | U.S. Pat. No. 8,734,809 SEQ ID NO: 156 |
| AAV CKd-H3 | 772 | U.S. Pat. No. 8,734,809 SEQ ID NO: 157 |
| AAV CKd-H4 | 773 | U.S. Pat. No. 8,734,809 SEQ ID NO: 158 |
| AAV CKd-H5 | 774 | U.S. Pat. No. 8,734,809 SEQ ID NO: 159 |
| AAV CKd-H6 | 775 | U.S. Pat. No. 8,734,809 SEQ ID NO: 151 |
| AAV CHt-1 | 776 | U.S. Pat. No. 8,734,809 SEQ ID NO: 160 |
| AAV CHt-P2 | 777 | WO2016065001 SEQ ID NO: 1 |
| AAV CHt-P5 | 778 | WO2016065001 SEQ ID NO: 2 |
| AAV CHt-P9 | 779 | WO2016065001 SEQ ID NO: 3 |
| AAV CBr-7.1 | 780 | WO2016065001 SEQ ID NO: 4 |
| AAV CBr-7.2 | 781 | WO2016065001 SEQ ID NO: 5 |
| AAV CBr-7.3 | 782 | WO2016065001 SEQ ID NO: 6 |
| AAV CBr-7.4 | 783 | WO2016065001 SEQ ID NO: 7 |
| AAV CBr-7.5 | 784 | WO2016065001 SEQ ID NO: 8 |
| AAV CBr-7.7 | 785 | WO2016065001 SEQ ID NO: 9 |
| AAV CBr-7.8 | 786 | WO2016065001 SEQ ID NO: 10 |
| AAV CBr-7.10 | 787 | WO2016065001 SEQ ID NO: 11 |
| AAV CKd-N3 | 788 | WO2016065001 SEQ ID NO: 12 |
| AAV CKd-N4 | 789 | WO2016065001 SEQ ID NO: 13 |
| AAV CKd-N9 | 790 | WO2016065001 SEQ ID NO: 14 |
| AAV CLv-L4 | 791 | WO2016065001 SEQ ID NO: 15 |
| AAV CLv-L5 | 792 | WO2016065001 SEQ ID NO: 16 |
| AAV CLv-L6 | 793 | WO2016065001 SEQ ID NO: 17 |
| AAV CLv-K1 | 794 | WO2016065001 SEQ ID NO: 18 |
| AAV CLv-K3 | 795 | WO2016065001 SEQ ID NO: 19 |
| AAV CLv-K6 | 796 | WO2016065001 SEQ ID NO: 20 |
| AAV CLv-M1 | 797 | WO2016065001 SEQ ID NO: 21 |
| AAV CLv-M11 | 798 | WO2016065001 SEQ ID NO: 22 |
| AAV CLv-M2 | 799 | WO2016065001 SEQ ID NO: 23 |
| AAV CLv-M5 | 800 | WO2016065001 SEQ ID NO: 24 |
| AAV CLv-M6 | 801 | WO2016065001 SEQ ID NO: 25 |
| AAV CLv-M7 | 802 | WO2016065001 SEQ ID NO: 26 |
| AAV CLv-M8 | 803 | WO2016065001 SEQ ID NO: 27 |
| AAV CLv-M9 | 804 | WO2016065001 SEQ ID NO: 28 |
| AAV CHt-P1 | 805 | WO2016065001 SEQ ID NO: 29 |
| AAV CHt-P6 | 806 | WO2016065001 SEQ ID NO: 30 |
| AAV CHt-P8 | 807 | WO2016065001 SEQ ID NO: 31 |
| AAV CHt-6.1 | 808 | WO2016065001 SEQ ID NO: 32 |
| AAV CHt-6.10 | 809 | WO2016065001 SEQ ID NO: 33 |
| AAV CHt-6.5 | 810 | WO2016065001 SEQ ID NO: 34 |
| AAV CHt-6.6 | 811 | WO2016065001 SEQ ID NO: 35 |
| AAV CHt-6.7 | 812 | WO2016065001 SEQ ID NO: 36 |
| AAV CHt-6.8 | 813 | WO2016065001 SEQ ID NO: 37 |
| AAV CSp-8.10 | 814 | WO2016065001 SEQ ID NO: 38 |
| AAV CSp-8.2 | 815 | WO2016065001 SEQ ID NO: 39 |
| AAV CSp-8.4 | 816 | WO2016065001 SEQ ID NO: 40 |
| AAV CSp-8.5 | 817 | WO2016065001 SEQ ID NO: 41 |
| AAV CSp-8.6 | 818 | WO2016065001 SEQ ID NO: 42 |
| AAV CSp-8.7 | 819 | WO2016065001 SEQ ID NO: 43 |
| AAV CSp-8.8 | 820 | WO2016065001 SEQ ID NO: 44 |
| AAV CSp-8.9 | 821 | WO2016065001 SEQ ID NO: 45 |
| AAV CBr-B7.3 | 822 | WO2016065001 SEQ ID NO: 46 |
| AAV CBr-B7.4 | 823 | WO2016065001 SEQ ID NO: 47 |
| AAV3B | 824 | WO2016065001 SEQ ID NO: 48 |
| AAV4 | 825 | WO2016065001 SEQ ID NO: 49 |
| AAV5 | 826 | WO2016065001 SEQ ID NO: 50 |
| AAV CHt-P2 | 827 | WO2016065001 SEQ ID NO: 51 |
| AAV CHt-P5 | 828 | WO2016065001 SEQ ID NO: 52 |
| AAV CHt-P9 | 829 | WO2016065001 SEQ ID NO: 53 |
| AAV CBr-7.1 | 830 | WO2016065001 SEQ ID NO: 54 |
| AAV CBr-7.2 | 831 | WO2016065001 SEQ ID NO: 55 |
| AAV CBr-7.3 | 832 | WO2016065001 SEQ ID NO: 56 |
| AAV CBr-7.4 | 833 | WO2016065001 SEQ ID NO: 57 |
| AAV CBr-7.5 | 834 | WO2016065001 SEQ ID NO: 58 |
| AAV CBr-7.7 | 835 | WO2016065001 SEQ ID NO: 59 |
| AAV CBr-7.8 | 836 | WO2016065001 SEQ ID NO: 60 |
| AAV CBr-7.10 | 837 | WO2016065001 SEQ ID NO: 61 |
| AAV CKd-N3 | 838 | WO2016065001 SEQ ID NO: 62 |
| AAV CKd-N4 | 839 | WO2016065001 SEQ ID NO: 63 |
| AAV CKd-N9 | 840 | WO2016065001 SEQ ID NO: 64 |
| AAV CLv-L4 | 841 | WO2016065001 SEQ ID NO: 65 |
| AAV CLv-L5 | 842 | WO2016065001 SEQ ID NO: 66 |
| AAV CLv-L6 | 843 | WO2016065001 SEQ ID NO: 67 |
| AAV CLv-K1 | 844 | WO2016065001 SEQ ID NO: 68 |
| AAV CLv-K3 | 845 | WO2016065001 SEQ ID NO: 69 |
| AAV CLv-K6 | 846 | WO2016065001 SEQ ID NO: 70 |
| AAV CLv-M1 | 847 | WO2016065001 SEQ ID NO: 71 |
| AAV CLv-M11 | 848 | WO2016065001 SEQ ID NO: 72 |
| AAV CLv-M2 | 849 | WO2016065001 SEQ ID NO: 73 |
| AAV CLv-M5 | 850 | WO2016065001 SEQ ID NO: 74 |
| AAV CLv-M6 | 851 | WO2016065001 SEQ ID NO: 75 |
| AAV CLv-M7 | 852 | WO2016065001 SEQ ID NO: 76 |
| AAV CLv-M8 | 853 | WO2016065001 SEQ ID NO: 77 |
| AAV CLv-M9 | 854 | WO2016065001 SEQ ID NO: 78 |
| AAV CHt-P1 | 855 | WO2016065001 SEQ ID NO: 79 |
| AAV CHt-P6 | 856 | WO2016065001 SEQ ID NO: 80 |
| AAV CHt-P8 | 857 | WO2016065001 SEQ ID NO: 81 |
| AAV CHt-6.1 | 858 | WO2016065001 SEQ ID NO: 82 |
| AAV CHt-6.10 | 859 | WO2016065001 SEQ ID NO: 83 |
| AAV CHt-6.5 | 860 | WO2016065001 SEQ ID NO: 84 |
| AAV CHt-6.6 | 861 | WO2016065001 SEQ ID NO: 85 |
| AAV CHt-6.7 | 862 | WO2016065001 SEQ ID NO: 86 |
| AAV CHt-6.8 | 863 | WO2016065001 SEQ ID NO: 87 |
| AAV CSp-8.10 | 864 | WO2016065001 SEQ ID NO: 88 |
| AAV CSp-8.2 | 865 | WO2016065001 SEQ ID NO: 89 |
| AAV CSp-8.4 | 866 | WO2016065001 SEQ ID NO: 90 |
| AAV CSp-8.5 | 867 | WO2016065001 SEQ ID NO: 91 |
| AAV CSp-8.6 | 868 | WO2016065001 SEQ ID NO: 92 |
| AAV CSp-8.7 | 869 | WO2016065001 SEQ ID NO: 93 |
| AAV CSp-8.8 | 870 | WO2016065001 SEQ ID NO: 94 |
| AAV CSp-8.9 | 871 | WO2016065001 SEQ ID NO: 95 |
| AAV CBr-B7.3 | 872 | WO2016065001 SEQ ID NO: 96 |
| AAV CBr-B7.4 | 873 | WO2016065001 SEQ ID NO: 97 |
| AAV3B | 874 | WO2016065001 SEQ ID NO: 98 |
| AAV4 | 875 | WO2016065001 SEQ ID NO: 99 |
| AAV5 | 876 | WO2016065001 SEQ ID NO: 100 |
| GPV | 877 | U.S. Pat. No. 9,624,274B2 SEQ ID NO: 192 |
| B19 | 878 | U.S. Pat. No. 9,624,274B2 SEQ ID NO: 193 |
| MVM | 879 | U.S. Pat. No. 9,624,274B2 SEQ ID NO: 194 |
| FPV | 880 | U.S. Pat. No. 9,624,274B2 SEQ ID NO: 195 |
| CPV | 881 | U.S. Pat. No. 9,624,274B2 SEQ ID NO: 196 |
| AAV6 | 882 | U.S. Pat. No. 9,546,112B2 SEQ ID NO: 5 |
| AAV6 | 883 | U.S. Pat. No. 9,457,103B2 SEQ ID NO: 1 |
| AAV2 | 884 | U.S. Pat. No. 9,457,103B2 SEQ ID NO: 2 |
| ShH10 | 885 | U.S. Pat. No. 9,457,103B2 SEQ ID NO: 3 |
| ShH13 | 886 | U.S. Pat. No. 9,457,103B2 SEQ ID NO: 4 |
| ShH10 | 887 | U.S. Pat. No. 9,457,103B2 SEQ ID NO: 5 |
| ShH10 | 888 | U.S. Pat. No. 9,457,103B2 SEQ ID NO: 6 |
| ShH10 | 889 | U.S. Pat. No. 9,457,103B2 SEQ ID NO: 7 |
| ShH10 | 890 | U.S. Pat. No. 9,457,103B2 SEQ ID NO: 8 |
| ShH10 | 891 | U.S. Pat. No. 9,457,103B2 SEQ ID NO: 9 |
| rh74 | 892 | U.S. Pat. No. 9,434,928B2 SEQ ID NO: 1, |
| | | US2015023924A1 SEQ ID NO: 2 |
| rh74 | 893 | U.S. Pat. No. 9,434,928B2 SEQ ID NO: 2, |
| | | US2015023924A1 SEQ ID NO: 1 |
| AAV8 | 894 | U.S. Pat. No. 9,434,928B2 SEQ ID NO: 4 |
| rh74 | 895 | U.S. Pat. No. 9,434,928B2 SEQ ID NO: 5 |
| rh74 (RHM4-1) | 896 | US2015023924A1 SEQ ID NO: 5, |
| | | US20160375110A1 SEQ ID NO: 4 |
| rh74 (RHM15-1) | 897 | US2015023924A1 SEQ ID NO: 6, |
| | | US20160375110A1 SEQ ID NO: 5 |
| rh74 (RHM15-2) | 898 | US2015023924A1 SEQ ID NO: 7, |
| | | US20160375110A1 SEQ ID NO: 6 |
| rh74 (RHM15-3/RHM15-5) | 899 | US2015023924A1 SEQ ID NO: 8, |
| | | US20160375110A1 SEQ ID NO: 7 |
| rh74 (RHM15-4) | 900 | US2015023924A1 SEQ ID NO: 9, |
| | | US20160375110A1 SEQ ID NO: 8 |
| rh74 (RHM15-6) | 901 | US2015023924A1 SEQ ID NO: 10, |
| | | US20160375110A1 SEQ ID NO: 9 |
| rh74 (RHM4-1) | 902 | US2015023924A1 SEQ ID NO: 11 |
| rh74 (RHM15-1) | 903 | US2015023924A1 SEQ ID NO: 12 |
| rh74 (RHM15-2) | 904 | US2015023924A1 SEQ ID NO: 13 |
| rh74 (RHM15-3/RHM15-5) | 905 | US2015023924A1 SEQ ID NO: 14 |
| rh74 (RHM15-4) | 906 | US2015023924A1 SEQ ID NO: 15 |
| rh74 (RHM15-6) | 907 | US2015023924A1 SEQ ID NO: 16 |
| AAV2 (comprising lung | 908 | US20160175389A1 SEQ ID NO: 9 |
| specific polypeptide) | | |
| AAV2 (comprising lung | 909 | US20160175389A1 SEQ ID NO: 10 |
| specific polypeptide) | | |
| Anc80 | 910 | US20170051257A1 SEQ ID NO: 1 |
| Anc80 | 911 | US20170051257A1 SEQ ID NO: 2 |
| Anc81 | 912 | US20170051257A1 SEQ ID NO: 3 |
| Anc80 | 913 | US20170051257A1 SEQ ID NO: 4 |
| Anc82 | 914 | US20170051257A1 SEQ ID NO: 5 |
| Anc82 | 915 | US20170051257A1 SEQ ID NO: 6 |
| Anc83 | 916 | US20170051257A1 SEQ ID NO: 7 |
| Anc83 | 917 | US20170051257A1 SEQ ID NO: 8 |
| Anc84 | 918 | US20170051257A1 SEQ ID NO: 9 |
| Anc84 | 919 | US20170051257A1 SEQ ID NO: 10 |
| Anc94 | 920 | US20170051257A1 SEQ ID NO: 11 |
| Anc94 | 921 | US20170051257A1 SEQ ID NO: 12 |
| Anc113 | 922 | US20170051257A1 SEQ ID NO: 13 |
| Anc113 | 923 | US20170051257A1 SEQ ID NO: 14 |
| Anc126 | 924 | US20170051257A1 SEQ ID NO: 15 |
| Anc126 | 925 | US20170051257A1 SEQ ID NO: 16 |
| Anc127 | 926 | US20170051257A1 SEQ ID NO: 17 |
| Anc127 | 927 | US20170051257A1 SEQ ID NO: 18 |
| Anc80L27 | 928 | US20170051257A1 SEQ ID NO: 19 |
| Anc80L59 | 929 | US20170051257A1 SEQ ID NO: 20 |
| Anc80L60 | 930 | US20170051257A1 SEQ ID NO: 21 |
| Anc80L62 | 931 | US20170051257A1 SEQ ID NO: 22 |
| Anc80L65 | 932 | US20170051257A1 SEQ ID NO: 23 |
| Anc80L33 | 933 | US20170051257A1 SEQ ID NO: 24 |
| Anc80L36 | 934 | US20170051257A1 SEQ ID NO: 25 |
| Anc80L44 | 935 | US20170051257A1 SEQ ID NO: 26 |
| Anc80L1 | 936 | US20170051257A1 SEQ ID NO: 35 |
| Anc80L1 | 937 | US20170051257A1 SEQ ID NO: 36 |
| AAV-X1 | 938 | U.S. Pat. No. 8,283,151B2 SEQ ID NO: 11 |
| AAV-X1b | 939 | U.S. Pat. No. 8,283,151B2 SEQ ID NO: 12 |
| AAV-X5 | 940 | U.S. Pat. No. 8,283,151B2 SEQ ID NO: 13 |
| AAV-X19 | 941 | U.S. Pat. No. 8,283,151B2 SEQ ID NO: 14 |
| AAV-X21 | 942 | U.S. Pat. No. 8,283,151B2 SEQ ID NO: 15 |
| AAV-X22 | 943 | U.S. Pat. No. 8,283,151B2 SEQ ID NO: 16 |
| AAV-X23 | 944 | U.S. Pat. No. 8,283,151B2 SEQ ID NO: 17 |
| AAV-X24 | 945 | U.S. Pat. No. 8,283,151B2 SEQ ID NO: 18 |
| AAV-X25 | 946 | U.S. Pat. No. 8,283,151B2 SEQ ID NO: 19 |
| AAV-X26 | 947 | U.S. Pat. No. 8,283,151B2 SEQ ID NO: 20 |
| AAV-X1 | 948 | U.S. Pat. No. 8,283,151B2 SEQ ID NO: 21 |
| AAV-X1b | 949 | U.S. Pat. No. 8,283,151B2 SEQ ID NO: 22 |
| AAV-X5 | 950 | U.S. Pat. No. 8,283,151B2 SEQ ID NO: 23 |
| AAV-X19 | 951 | U.S. Pat. No. 8,283,151B2 SEQ ID NO: 24 |
| AAV-X21 | 952 | U.S. Pat. No. 8,283,151B2 SEQ ID NO: 25 |
| AAV-X22 | 953 | U.S. Pat. No. 8,283,151B2 SEQ ID NO: 26 |
| AAV-X23 | 954 | U.S. Pat. No. 8,283,151B2 SEQ ID NO: 27 |
| AAV-X24 | 955 | U.S. Pat. No. 8,283,151B2 SEQ ID NO: 28 |
| AAV-X25 | 956 | U.S. Pat. No. 8,283,151B2 SEQ ID NO: 29 |
| AAV-X26 | 957 | U.S. Pat. No. 8,283,151B2 SEQ ID NO: 30 |
| AAVrh8 | 958 | WO2016054554A1 SEQ ID NO: 8 |
| AAVrh8VP2FC5 | 959 | WO2016054554A1 SEQ ID NO: 9 |
| AAVrh8VP2FC44 | 960 | WO2016054554A1 SEQ ID NO: 10 |
| AAVrh8VP2ApoB100 | 961 | WO2016054554A1 SEQ ID NO: 11 |
| AAVrh8VP2RVG | 962 | WO2016054554A1 SEQ ID NO: 12 |
| AA Vrh8VP2Angiopep-2 VP2 | 963 | WO2016054554A1 SEQ ID NO: 13 |
| AAV9.47VP1.3 | 964 | WO2016054554A1 SEQ ID NO: 14 |
| AAV9.47VP2ICAMg3 | 965 | WO2016054554A1 SEQ ID NO: 15 |
| AAV9.47VP2RVG | 966 | WO2016054554A1 SEQ ID NO: 16 |
| AAV9.47VP2Angiopep-2 | 967 | WO2016054554A1 SEQ ID NO: 17 |
| AAV9.47VP2A-string | 968 | WO2016054554A1 SEQ ID NO: 18 |
| AAVrh8VP2FC5 VP2 | 969 | WO2016054554A1 SEQ ID NO: 19 |
| AAVrh8VP2FC44 VP2 | 970 | WO2016054554A1 SEQ ID NO: 20 |
| AAVrh8VP2ApoB100 VP2 | 971 | WO2016054554A1 SEQ ID NO: 21 |
| AAVrh8VP2RVG VP2 | 972 | WO2016054554A1 SEQ ID NO: 22 |
| AAVrh8VP2Angiopep-2 VP2 | 973 | WO2016054554A1 SEQ ID NO: 23 |
| AAV9.47VP2ICAMg3 VP2 | 974 | WO2016054554A1 SEQ ID NO: 24 |
| AAV9.47VP2RVG VP2 | 975 | WO2016054554A1 SEQ ID NO: 25 |
| AAV9.47VP2Angiopep-2 VP2 | 976 | WO2016054554A1 SEQ ID NO: 26 |
| AAV9.47VP2A-string VP2 | 977 | WO2016054554A1 SEQ ID NO: 27 |
| rAAV-B1 | 978 | WO2016054557A1 SEQ ID NO: 1 |
| rAAV-B2 | 979 | WO2016054557A1 SEQ ID NO: 2 |
| rAAV-B3 | 980 | WO2016054557A1 SEQ ID NO: 3 |
| rAAV-B4 | 981 | WO2016054557A1 SEQ ID NO: 4 |
| rAAV-B1 | 982 | WO2016054557A1 SEQ ID NO: 5 |
| rAAV-B2 | 983 | WO2016054557A1 SEQ ID NO: 6 |
| rAAV-B3 | 984 | WO2016054557A1 SEQ ID NO: 7 |
| rAAV-B4 | 985 | WO2016054557A1 SEQ ID NO: 8 |
| rAAV-L1 | 986 | WO2016054557A1 SEQ ID NO: 9 |
| rAAV-L2 | 987 | WO2016054557A1 SEQ ID NO: 10 |
| rAAV-L3 | 988 | WO2016054557A1 SEQ ID NO: 11 |
| rAAV-L4 | 989 | WO2016054557A1 SEQ ID NO: 12 |
| rAAV-L1 | 990 | WO2016054557A1 SEQ ID NO: 13 |
| rAAV-L2 | 991 | WO2016054557A1 SEQ ID NO: 14 |
| rAAV-L3 | 992 | WO2016054557A1 SEQ ID NO: 15 |
| rAAV-L4 | 993 | WO2016054557A1 SEQ ID NO: 16 |
| AAV9 | 994 | WO2016073739A1 SEQ ID NO: 3 |
| rAAV | 995 | WO2016081811A1 SEQ ID NO: 1 |
| rAAV | 996 | WO2016081811A1 SEQ ID NO: 2 |
| rAAV | 997 | WO2016081811A1 SEQ ID NO: 3 |
| rAAV | 998 | WO2016081811A1 SEQ ID NO: 4 |
| rAAV | 999 | WO2016081811A1 SEQ ID NO: 5 |
| rAAV | 1000 | WO2016081811A1 SEQ ID NO: 6 |
| rAAV | 1001 | WO2016081811A1 SEQ ID NO: 7 |
| rAAV | 1002 | WO2016081811A1 SEQ ID NO: 8 |
| rAAV | 1003 | WO2016081811A1 SEQ ID NO: 9 |
| rAAV | 1004 | WO2016081811A1 SEQ ID NO: 10 |
| rAAV | 1005 | WO2016081811A1 SEQ ID NO: 11 |
| rAAV | 1006 | WO2016081811A1 SEQ ID NO: 12 |
| rAAV | 1007 | WO2016081811A1 SEQ ID NO: 13 |
| rAAV | 1008 | WO2016081811A1 SEQ ID NO: 14 |
| rAAV | 1009 | WO2016081811A1 SEQ ID NO: 15 |
| rAAV | 1010 | WO2016081811A1 SEQ ID NO: 16 |
| rAAV | 1011 | WO2016081811A1 SEQ ID NO: 17 |
| rAAV | 1012 | WO2016081811A1 SEQ ID NO: 18 |
| rAAV | 1013 | WO2016081811A1 SEQ ID NO: 19 |
| rAAV | 1014 | WO2016081811A1 SEQ ID NO: 20 |
| rAAV | 1015 | WO2016081811A1 SEQ ID NO: 21 |
| rAAV | 1016 | WO2016081811A1 SEQ ID NO: 22 |
| rAAV | 1017 | WO2016081811A1 SEQ ID NO: 23 |
| rAAV | 1018 | WO2016081811A1 SEQ ID NO: 24 |
| rAAV | 1019 | WO2016081811A1 SEQ ID NO: 25 |
| rAAV | 1020 | WO2016081811A1 SEQ ID NO: 26 |
| rAAV | 1021 | WO2016081811A1 SEQ ID NO: 27 |
| rAAV | 1022 | WO2016081811A1 SEQ ID NO: 28 |
| rAAV | 1023 | WO2016081811A1 SEQ ID NO: 29 |
| rAAV | 1024 | WO2016081811A1 SEQ ID NO: 30 |
| rAAV | 1025 | WO2016081811A1 SEQ ID NO: 31 |
| rAAV | 1026 | WO2016081811A1 SEQ ID NO: 32 |
| rAAV | 1027 | WO2016081811A1 SEQ ID NO: 33 |
| rAAV | 1028 | WO2016081811A1 SEQ ID NO: 34 |
| rAAV | 1029 | WO2016081811A1 SEQ ID NO: 35 |
| rAAV | 1030 | WO2016081811A1 SEQ ID NO: 36 |
| rAAV | 1031 | WO2016081811A1 SEQ ID NO: 37 |
| rAAV | 1032 | WO2016081811A1 SEQ ID NO: 38 |
| rAAV | 1033 | WO2016081811A1 SEQ ID NO: 39 |
| rAAV | 1034 | WO2016081811A1 SEQ ID NO: 40 |
| rAAV | 1035 | WO2016081811A1 SEQ ID NO: 41 |
| rAAV | 1036 | WO2016081811A1 SEQ ID NO: 42 |
| rAAV | 1037 | WO2016081811A1 SEQ ID NO: 43 |
| rAAV | 1038 | WO2016081811A1 SEQ ID NO: 44 |
| rAAV | 1039 | WO2016081811A1 SEQ ID NO: 45 |
| rAAV | 1040 | WO2016081811A1 SEQ ID NO: 46 |
| rAAV | 1041 | WO2016081811A1 SEQ ID NO: 47 |
| rAAV | 1042 | WO2016081811A1 SEQ ID NO: 48 |
| rAAV | 1043 | WO2016081811A1 SEQ ID NO: 49 |
| rAAV | 1044 | WO2016081811A1 SEQ ID NO: 50 |
| rAAV | 1045 | WO2016081811A1 SEQ ID NO: 51 |
| rAAV | 1046 | WO2016081811A1 SEQ ID NO: 52 |
| rAAV | 1047 | WO2016081811A1 SEQ ID NO: 53 |
| rAAV | 1048 | WO2016081811A1 SEQ ID NO: 54 |
| rAAV | 1049 | WO2016081811A1 SEQ ID NO: 55 |
| rAAV | 1050 | WO2016081811A1 SEQ ID NO: 56 |
| rAAV | 1051 | WO2016081811A1 SEQ ID NO: 57 |
| rAAV | 1052 | WO2016081811A1 SEQ ID NO: 58 |
| rAAV | 1053 | WO2016081811A1 SEQ ID NO: 59 |
| rAAV | 1054 | WO2016081811A1 SEQ ID NO: 60 |
| rAAV | 1055 | WO2016081811A1 SEQ ID NO: 61 |
| rAAV | 1056 | WO2016081811A1 SEQ ID NO: 62 |
| rAAV | 1057 | WO2016081811A1 SEQ ID NO: 63 |
| rAAV | 1058 | WO2016081811A1 SEQ ID NO: 64 |
| rAAV | 1059 | WO2016081811A1 SEQ ID NO: 65 |
| rAAV | 1060 | WO2016081811A1 SEQ ID NO: 66 |
| rAAV | 1061 | WO2016081811A1 SEQ ID NO: 67 |
| rAAV | 1062 | WO2016081811A1 SEQ ID NO: 68 |
| rAAV | 1063 | WO2016081811A1 SEQ ID NO: 69 |
| rAAV | 1064 | WO2016081811A1 SEQ ID NO: 70 |
| rAAV | 1065 | WO2016081811A1 SEQ ID NO: 71 |
| rAAV | 1066 | WO2016081811A1 SEQ ID NO: 72 |
| rAAV | 1067 | WO2016081811A1 SEQ ID NO: 73 |
| rAAV | 1068 | WO2016081811A1 SEQ ID NO: 74 |
| rAAV | 1069 | WO2016081811A1 SEQ ID NO: 75 |
| rAAV | 1070 | WO2016081811A1 SEQ ID NO: 76 |
| rAAV | 1071 | WO2016081811A1 SEQ ID NO: 77 |
| rAAV | 1072 | WO2016081811A1 SEQ ID NO: 78 |
| rAAV | 1073 | WO2016081811A1 SEQ ID NO: 79 |
| rAAV | 1074 | WO2016081811A1 SEQ ID NO: 80 |
| rAAV | 1075 | WO2016081811A1 SEQ ID NO: 81 |
| rAAV | 1076 | WO2016081811A1 SEQ ID NO: 82 |
| rAAV | 1077 | WO2016081811A1 SEQ ID NO: 83 |
| rAAV | 1078 | WO2016081811A1 SEQ ID NO: 84 |
| rAAV | 1079 | WO2016081811A1 SEQ ID NO: 85 |
| rAAV | 1080 | WO2016081811A1 SEQ ID NO: 86 |
| rAAV | 1081 | WO2016081811A1 SEQ ID NO: 87 |
| rAAV | 1082 | WO2016081811A1 SEQ ID NO: 88 |
| rAAV | 1083 | WO2016081811A1 SEQ ID NO: 89 |
| rAAV | 1084 | WO2016081811A1 SEQ ID NO: 90 |
| rAAV | 1085 | WO2016081811A1 SEQ ID NO: 91 |
| rAAV | 1086 | WO2016081811A1 SEQ ID NO: 92 |
| rAAV | 1087 | WO2016081811A1 SEQ ID NO: 93 |
| rAAV | 1088 | WO2016081811A1 SEQ ID NO: 94 |
| rAAV | 1089 | WO2016081811A1 SEQ ID NO: 95 |
| rAAV | 1090 | WO2016081811A1 SEQ ID NO: 96 |
| rAAV | 1091 | WO2016081811A1 SEQ ID NO: 97 |
| rAAV | 1092 | WO2016081811A1 SEQ ID NO: 98 |
| rAAV | 1093 | WO2016081811A1 SEQ ID NO: 99 |
| rAAV | 1094 | WO2016081811A1 SEQ ID NO: 100 |
| rAAV | 1095 | WO2016081811A1 SEQ ID NO: 101 |
| rAAV | 1096 | WO2016081811A1 SEQ ID NO: 102 |
| rAAV | 1097 | WO2016081811A1 SEQ ID NO: 103 |
| rAAV | 1098 | WO2016081811A1 SEQ ID NO: 104 |
| rAAV | 1099 | WO2016081811A1 SEQ ID NO: 105 |
| rAAV | 1100 | WO2016081811A1 SEQ ID NO: 106 |
| rAAV | 1101 | WO2016081811A1 SEQ ID NO: 107 |
| rAAV | 1102 | WO2016081811A1 SEQ ID NO: 108 |
| rAAV | 1103 | WO2016081811A1 SEQ ID NO: 109 |
| rAAV | 1104 | WO2016081811A1 SEQ ID NO: 110 |
| rAAV | 1105 | WO2016081811A1 SEQ ID NO: 111 |
| rAAV | 1106 | WO2016081811A1 SEQ ID NO: 112 |
| rAAV | 1107 | WO2016081811A1 SEQ ID NO: 113 |
| rAAV | 1108 | WO2016081811A1 SEQ ID NO: 114 |
| rAAV | 1109 | WO2016081811A1 SEQ ID NO: 115 |
| rAAV | 1110 | WO2016081811A1 SEQ ID NO: 116 |
| rAAV | 1111 | WO2016081811A1 SEQ ID NO: 117 |
| rAAV | 1112 | WO2016081811A1 SEQ ID NO: 118 |
| rAAV | 1113 | WO2016081811A1 SEQ ID NO: 119 |
| rAAV | 1114 | WO2016081811A1 SEQ ID NO: 120 |
| rAAV | 1115 | WO2016081811A1 SEQ ID NO: 121 |
| rAAV | 1116 | WO2016081811A1 SEQ ID NO: 122 |
| rAAV | 1117 | WO2016081811A1 SEQ ID NO: 123 |
| rAAV | 1118 | WO2016081811A1 SEQ ID NO: 124 |
| rAAV | 1119 | WO2016081811A1 SEQ ID NO: 125 |
| rAAV | 1120 | WO2016081811A1 SEQ ID NO: 126 |
| rAAV | 1121 | WO2016081811A1 SEQ ID NO: 127 |
| rAAV | 1122 | WO2016081811A1 SEQ ID NO: 128 |
| AAV8 E532K | 1123 | WO2016081811A1 SEQ ID NO: 133 |
| AAV8 E532K | 1124 | WO2016081811A1 SEQ ID NO: 134 |
| rAAV4 | 1125 | WO2016115382A1 SEQ ID NO: 2 |
| rAAV4 | 1126 | WO2016115382A1 SEQ ID NO: 3 |
| rAAV4 | 1127 | WO2016115382A1 SEQ ID NO: 4 |
| rAAV4 | 1128 | WO2016115382A1 SEQ ID NO: 5 |
| rAAV4 | 1129 | WO2016115382A1 SEQ ID NO: 6 |
| rAAV4 | 1130 | WO2016115382A1 SEQ ID NO: 7 |
| rAAV4 | 1131 | WO2016115382A1 SEQ ID NO: 8 |
| rAAV4 | 1132 | WO2016115382A1 SEQ ID NO: 9 |
| rAAV4 | 1133 | WO2016115382A1 SEQ ID NO: 10 |
| rAAV4 | 1134 | WO2016115382A1 SEQ ID NO: 11 |
| rAAV4 | 1135 | WO2016115382A1 SEQ ID NO: 12 |
| rAAV4 | 1136 | WO2016115382A1 SEQ ID NO: 13 |
| rAAV4 | 1137 | WO2016115382A1 SEQ ID NO: 14 |
| rAAV4 | 1138 | WO2016115382A1 SEQ ID NO: 15 |
| rAAV4 | 1139 | WO2016115382A1 SEQ ID NO: 16 |
| rAAV4 | 1140 | WO2016115382A1 SEQ ID NO: 17 |
| rAAV4 | 1141 | WO2016115382A1 SEQ ID NO: 18 |
| rAAV4 | 1142 | WO2016115382A1 SEQ ID NO: 19 |
| rAAV4 | 1143 | WO2016115382A1 SEQ ID NO: 20 |
| rAAV4 | 1144 | WO2016115382A1 SEQ ID NO: 21 |
| AAV11 | 1145 | WO2016115382A1 SEQ ID NO: 22 |
| AAV12 | 1146 | WO2016115382A1 SEQ ID NO: 23 |
| rh32 | 1147 | WO2016115382A1 SEQ ID NO: 25 |
| rh33 | 1148 | WO2016115382A1 SEQ ID NO: 26 |
| rh34 | 1149 | WO2016115382A1 SEQ ID NO: 27 |
| rAAV4 | 1150 | WO2016115382A1 SEQ ID NO: 28 |
| rAAV4 | 1151 | WO2016115382A1 SEQ ID NO: 29 |
| rAAV4 | 1152 | WO2016115382A1 SEQ ID NO: 30 |
| rAAV4 | 1153 | WO2016115382A1 SEQ ID NO: 31 |
| rAAV4 | 1154 | WO2016115382A1 SEQ ID NO: 32 |
| rAAV4 | 1155 | WO2016115382A1 SEQ ID NO: 33 |
| AAV2/8 | 1156 | WO2016131981A1 SEQ ID NO: 47 |
| AAV2/8 | 1157 | WO2016131981A1 SEQ ID NO: 48 |
| ancestral AAV | 1158 | WO2016154344A1 SEQ ID NO: 7 |
| ancestral AAV variant C4 | 1159 | WO2016154344A1 SEQ ID NO: 13 |
| ancestral AAV variant C7 | 1160 | WO2016154344A1 SEQ ID NO: 14 |
| ancestral AAV variant G4 | 1161 | WO2016154344A1 SEQ ID NO: 15 |
| consensus amino acid | 1162 | WO2016154344A1 SEQ ID NO: 16 |
| sequence of ancestral AAV | | |
| variants, C4, C7 and G4 | | |
| consensus amino acid | 1163 | WO2016154344A1 SEQ ID NO: 17 |
| sequence of ancestral AAV | | |
| variants, C4 and C7 | | |
| AAV8 (with an AAV2 | 1164 | WO2016150403A1 SEQ ID NO: 13 |
| phospholipase domain) | | |
| AAV VR-942n | 1165 | US20160289275A1 SEQ ID NO: 10 |
| AAV5-A (M569V) | 1166 | US20160289275A1 SEQ ID NO: 13 |
| AAV5-A (M569V) | 1167 | US20160289275A1 SEQ ID NO: 14 |
| AAV5-A (Y585V) | 1168 | US20160289275A1 SEQ ID NO: 16 |
| AAV5-A (Y585V) | 1169 | US20160289275A1 SEQ ID NO: 17 |
| AAV5-A (L587T) | 1170 | US20160289275A1 SEQ ID NO: 19 |
| AAV5-A (L587T) | 1171 | US20160289275A1 SEQ ID NO: 20 |
| AAV5-A (Y585V/L587T) | 1172 | US20160289275A1 SEQ ID NO: 22 |
| AAV5-A (Y585V/L587T) | 1173 | US20160289275A1 SEQ ID NO: 23 |
| AAV5-B (D652A) | 1174 | US20160289275A1 SEQ ID NO: 25 |
| AAV5-B (D652A) | 1175 | US20160289275A1 SEQ ID NO: 26 |
| AAV5-B (T362M) | 1176 | US20160289275A1 SEQ ID NO: 28 |
| AAV5-B (T362M) | 1177 | US20160289275A1 SEQ ID NO: 29 |
| AAV5-B (Q359D) | 1178 | US20160289275A1 SEQ ID NO: 31 |
| AAV5-B (Q359D) | 1179 | US20160289275A1 SEQ ID NO: 32 |
| AAV5-B (E350Q) | 1180 | US20160289275A1 SEQ ID NO: 34 |
| AAV5-B (E350Q) | 1181 | US20160289275A1 SEQ ID NO: 35 |
| AAV5-B (P533S) | 1182 | US20160289275A1 SEQ ID NO: 37 |
| AAV5-B (P533S) | 1183 | US20160289275A1 SEQ ID NO: 38 |
| AAV5-B (P533G) | 1184 | US20160289275A1 SEQ ID NO: 40 |
| AAV5-B (P533G) | 1185 | US20160289275A1 SEQ ID NO: 41 |
| AAV5-mutation in loop VII | 1186 | US20160289275A1 SEQ ID NO: 43 |
| AAV5-mutation in loop VII | 1187 | US20160289275A1 SEQ ID NO: 44 |
| AAV8 | 1188 | US20160289275A1 SEQ ID NO: 47 |
| Mut A (LK03/AAV8) | 1189 | WO2016181123A1 SEQ ID NO: 1 |
| Mut B (LK03/AAV5) | 1190 | WO2016181123A1 SEQ ID NO: 2 |
| Mut C (AAV8/AAV3B) | 1191 | WO2016181123A1 SEQ ID NO: 3 |
| Mut D (AAV5/AAV3B) | 1192 | WO2016181123A1 SEQ ID NO: 4 |
| Mut E (AAV8/AAV3B) | 1193 | WO2016181123A1 SEQ ID NO: 5 |
| Mut F (AAV3B/AAV8) | 1194 | WO2016181123A1 SEQ ID NO: 6 |
| AAV44.9 | 1195 | WO2016183297A1 SEQ ID NO: 4 |
| AAV44.9 | 1196 | WO2016183297A1 SEQ ID NO: 5 |
| AAVrh8 | 1197 | WO2016183297A1 SEQ ID NO: 6 |
| AAV44.9 (S470N) | 1198 | WO2016183297A1 SEQ ID NO: 9 |
| rh74 VP1 | 1199 | US20160375110A1 SEQ ID NO: 1 |
| AAV-LK03 (L125I) | 1200 | WO2017015102A1 SEQ ID NO: 5 |
| AAV3B (S663V + T492V) | 1201 | WO2017015102A1 SEQ ID NO: 6 |
| Anc80 | 1202 | WO2017019994A2 SEQ ID NO: 1 |
| Anc80 | 1203 | WO2017019994A2 SEQ ID NO: 2 |
| Anc81 | 1204 | WO2017019994A2 SEQ ID NO: 3 |
| Anc81 | 1205 | WO2017019994A2 SEQ ID NO: 4 |
| Anc82 | 1206 | WO2017019994A2 SEQ ID NO: 5 |
| Anc82 | 1207 | WO2017019994A2 SEQ ID NO: 6 |
| Anc83 | 1208 | WO2017019994A2 SEQ ID NO: 7 |
| Anc83 | 1209 | WO2017019994A2 SEQ ID NO: 8 |
| Anc84 | 1210 | WO2017019994A2 SEQ ID NO: 9 |
| Anc84 | 1211 | WO2017019994A2 SEQ ID NO: 10 |
| Anc94 | 1212 | WO2017019994A2 SEQ ID NO: 11 |
| Anc94 | 1213 | WO2017019994A2 SEQ ID NO: 12 |
| Anc113 | 1214 | WO2017019994A2 SEQ ID NO: 13 |
| Anc113 | 1215 | WO2017019994A2 SEQ ID NO: 14 |
| Anc126 | 1216 | WO2017019994A2 SEQ ID NO: 15 |
| Anc126 | 1217 | WO2017019994A2 SEQ ID NO: 16 |
| Anc127 | 1218 | WO2017019994A2 SEQ ID NO: 17 |
| Anc127 | 1219 | WO2017019994A2 SEQ ID NO: 18 |
| Anc80L27 | 1220 | WO2017019994A2 SEQ ID NO: 19 |
| Anc80L59 | 1221 | WO2017019994A2 SEQ ID NO: 20 |
| Anc80L60 | 1222 | WO2017019994A2 SEQ ID NO: 21 |
| Anc80L62 | 1223 | WO2017019994A2 SEQ ID NO: 22 |
| Anc80L65 | 1224 | WO2017019994A2 SEQ ID NO: 23 |
| Anc80L33 | 1225 | WO2017019994A2 SEQ ID NO: 24 |
| Anc80L36 | 1226 | WO2017019994A2 SEQ ID NO: 25 |
| Anc80L44 | 1227 | WO2017019994A2 SEQ ID NO: 26 |
| Anc80L1 | 1228 | WO2017019994A2 SEQ ID NO: 35 |
| Anc80L1 | 1229 | WO2017019994A2 SEQ ID NO: 36 |
| AAVrh10 | 1230 | WO2017019994A2 SEQ ID NO: 41 |
| Anc110 | 1231 | WO2017019994A2 SEQ ID NO: 42 |
| Anc110 | 1232 | WO2017019994A2 SEQ ID NO: 43 |
| AAVrh32.33 | 1233 | WO2017019994A2 SEQ ID NO: 45 |
| AAVrh74 | 1234 | WO2017049031A1 SEQ ID NO: 1 |
| AAV2 | 1235 | WO2017053629A2 SEQ ID NO: 49 |
| AAV2 | 1236 | WO2017053629A2 SEQ ID NO: 50 |
| AAV2 | 1237 | WO2017053629A2 SEQ ID NO: 82 |
| Parvo-like virus | 1238 | WO2017070476A2 SEQ ID NO: 1 |
| Parvo-like virus | 1239 | WO2017070476A2 SEQ ID NO: 2 |
| Parvo-like virus | 1240 | WO2017070476A2 SEQ ID NO: 3 |
| Parvo-like virus | 1241 | WO2017070476A2 SEQ ID NO: 4 |
| Parvo-like virus | 1242 | WO2017070476A2 SEQ ID NO: 5 |
| Parvo-like virus | 1243 | WO2017070476A2 SEQ ID NO: 6 |
| AAVrh.10 | 1244 | WO2017070516A1 SEQ ID NO: 7 |
| AAVrh.10 | 1245 | WO2017070516A1 SEQ ID NO: 14 |
| AAV2tYF | 1246 | WO2017070491A1 SEQ ID NO: 1 |
| AAV-SPK | 1247 | WO2017075619A1 SEQ ID NO: 28 |
| AAV2.5 | 1248 | US20170128528A1 SEQ ID NO: 13 |
| AAV1.1 | 1249 | US20170128528A1 SEQ ID NO: 15 |
| AAV6.1 | 1250 | US20170128528A1 SEQ ID NO: 17 |
| AAV6.3.1 | 1251 | US20170128528A1 SEQ ID NO: 18 |
| AAV2i8 | 1252 | US20170128528A1 SEQ ID NO: 28 |
| AAV2i8 | 1253 | US20170128528A1 SEQ ID NO: 29 |
| ttAAV | 1254 | US20170128528A1 SEQ ID NO: 30 |
| ttAAV-S312N | 1255 | US20170128528A1 SEQ ID NO: 32 |
| ttAAV-S312N | 1256 | US20170128528A1 SEQ ID NO: 33 |
| AAV6 (Y705, Y731, | 1257 | WO2016134337A1 SEQ ID NO: 24 |
| and T492) | | |
| AAV2 | 1258 | WO2016134375A1 SEQ ID NO: 9 |
| AAV2 | 1259 | WO2016134375A1 SEQ ID NO: 10 |

[0084] Each of the patents, applications and or publications listed in Table 1 are hereby incorporated by reference in their entirety.

[0085] In some embodiments, the AAV serotype may be, or may have a sequence as described in International Patent Publication WO2015038958, the contents of which are herein incorporated by reference in their entirety, such as, but not limited to, AAV9 (SEQ ID NO: 2 and 11 of WO2015038958 or SEQ TD NO: 135 and 136 respectively herein), PHP.B (SEQ ID NO: 8 and 9 of WO2015038958, herein SEQ ID NO: 3 and 4), G2B-13 (SEQ ID NO: 12 of WO2015038958, herein SEQ ID NO: 5), G2B-26 (SEQ ID NO: 13 of WO2015038958, herein SEQ ID NO: 3), TH1.1-32 (SEQ ID NO: 14 of WO2015038958, herein SEQ ID NO: 6), TH1.1-35 (SEQ ID NO: 15 of WO2015038958, herein SEQ ID NO: 7) or variants thereof. Further, any of the targeting peptides or amino acid inserts described in WO2015038958, may be inserted into any parent AAV serotype, such as, but not limited to, AAV9 (SEQ ID NO: 135 for the DNA sequence and SEQ ID NO: 136 for the amino acid sequence). In some embodiments, the amino acid insert is inserted between amino acids 586-592 of the parent AAV (e.g., AAV9). In another embodiment, the amino acid insert is inserted between amino acids 588-589 of the parent AAV sequence. The amino acid insert may be, but is not limited to, any of the following amino acid sequences, TLAVPFK (SEQ ID NO: 1 of WO2015038958; herein SEQ ID NO: 1260), KFPVALT (SEQ ID NO: 3 of WO2015038958; herein SEQ ID NO: 1261), LAVPFK (SEQ ID NO: 31 of WO2015038958; herein SEQ ID NO: 1262), AVPFK (SEQ ID NO: 32 of WO2015038958; herein SEQ ID NO: 1263), VPFK (SEQ ID NO: 33 of WO2015038958; herein SEQ ID NO: 1264), TLAVPF (SEQ ID NO: 34 of WO2015038958; herein SEQ ID NO: 1265), TLAVP (SEQ ID NO: 35 of WO2015038958; herein SEQ ID NO: 1266), TLAV (SEQ ID NO: 36 of WO2015038958; herein SEQ ID NO: 1267), SVSKPFL (SEQ ID NO: 28 of WO2015038958; herein SEQ ID NO: 1268), FTLTTPK (SEQ ID NO: 29 of WO2015038958; herein SEQ ID NO: 1269), MNATKNV (SEQ ID NO: 30 of WO2015038958; herein SEQ ID NO: 1270), QSSQTPR (SEQ ID NO: 54 of WO2015038958; herein SEQ ID NO: 1271), ILGTGTS (SEQ ID NO: 55 of WO2015038958; herein SEQ ID NO: 1272), TRTNPEA (SEQ ID NO: 56 of WO2015038958; herein SEQ ID NO: 1273), NGGTSSS (SEQ ID NO: 58 of WO2015038958; herein SEQ ID NO: 1274), or YTLSQGW (SEQ ID NO: 60 of WO2015038958; herein SEQ ID NO: 1275). Non-limiting examples of nucleotide sequences that may encode the amino acid inserts include the following, AAGTTTCCTGTGGCGTTGACT (for SEQ ID NO: 3 of WO2015038958; herein SEQ ID NO: 1276), ACTTTGGCGGTGCCTTTTAAG (SEQ ID NO: 24 and 49 of WO2015038958; herein SEQ ID NO: 1277), AGTGTGAGTAAGCCTTTTTTG (SEQ ID NO: 25 of WO2015038958; herein SEQ ID NO: 1278), TTTACGTTGACGACGCCTAAG (SEQ ID NO: 26 of WO2015038958; herein SEQ ID NO: 1279), ATGAATGCTACGAAGAATGTG (SEQ ID NO: 27 of WO2015038958; herein SEQ ID NO: 1280), CAGTCGTCGCAGACGCCTAGG (SEQ ID NO: 48 of WO2015038958; herein SEQ ID NO: 1281), ATTCTGGGGACTGGTACTTCG (SEQ ID NO: 50 and 52 of WO2015038958; herein SEQ ID NO: 1282), ACGCGGACTAATCCTGAGGCT (SEQ ID NO: 51 of WO2015038958; herein SEQ ID NO: 1283), AATGGGGGGACTAGTAGTTCT (SEQ ID NO: 53 of WO2015038958; herein SEQ ID NO: 1284), or TATACTTTGTCGCAGGGTTGG (SEQ ID NO: 59 of WO2015038958; herein SEQ ID NO: 1285).

[0086] In some embodiments, the AAV serotype may be, or may have a sequence as described in International Patent Publication WO2017100671, the contents of which are herein incorporated by reference in their entirety, such as, but not limited to, AAV9 (SEQ ID NO: 45 of WO2017100671, herein SEQ ID NO: 9), PHP.N (SEQ ID NO: 46 of WO2017100671, herein SEQ ID NO: 2), PHP.S (SEQ ID NO: 47 of WO2017100671, herein SEQ ID NO: 8), or variants thereof. Further, any of the targeting peptides or amino acid inserts described in WO2017100671 may be inserted into any parent AAV serotype, such as, but not limited to, AAV9 (SEQ ID NO: 9 or SEQ ID NO: 131). In some embodiments, the amino acid insert is inserted between amino acids 586-592 of the parent AAV (e.g., AAV9). In another embodiment, the amino acid insert is inserted between amino acids 588-589 of the parent AAV sequence. The amino acid insert may be, but is not limited to, any of the following amino acid sequences, AQTLAVPFKAQ (SEQ ID NO: 1 of WO2017100671; herein SEQ ID NO: 1286), AQSVSKPFLAQ (SEQ ID NO: 2 of WO2017100671; herein SEQ ID NO: 1287), AQFTLTTPKAQ (SEQ ID NO: 3 in the sequence listing of WO2017100671; herein SEQ ID NO: 1288), DGTLAVPFKAQ (SEQ ID NO: 4 in the sequence listing of WO2017100671; herein SEQ ID NO: 1289), ESTLAVPFKAQ (SEQ ID NO: 5 of WO2017100671; herein SEQ ID NO: 1290), GGTLAVPFKAQ (SEQ ID NO: 6 of WO2017100671; herein SEQ ID NO: 1291), AQTLATPFKAQ (SEQ ID NO: 7 and 33 of WO2017100671; herein SEQ ID NO: 1292), ATTLATPFKAQ (SEQ ID NO: 8 of WO2017100671; herein SEQ ID NO: 1293), DGTLATPFKAQ (SEQ ID NO: 9 of WO2017100671; herein SEQ ID NO: 1294), GGTLATPFKAQ (SEQ ID NO: 10 of WO2017100671; herein SEQ ID NO: 1295), SGSLAVPFKAQ (SEQ ID NO: 11 of WO2017100671; herein SEQ ID NO: 1296), AQTLAQPFKAQ (SEQ ID NO: 12 of WO2017100671; herein SEQ ID NO: 1297), AQTLQQPFKAQ (SEQ ID NO: 13 of WO2017100671; herein SEQ ID NO: 1298), AQTLSNPFKAQ (SEQ ID NO: 14 of WO2017100671; herein SEQ ID NO: 1299), AQTLAVPFSNP (SEQ ID NO: 15 of WO2017100671; herein SEQ ID NO: 1300), QGTLAVPFKAQ (SEQ ID NO: 16 of WO2017100671; herein SEQ ID NO: 1301), NQTLAVPFKAQ (SEQ ID NO: 17 of WO2017100671; herein SEQ ID NO: 1302), EGSLAVPFKAQ (SEQ ID NO: 18 of WO2017100671; herein SEQ ID NO: 1303), SGNLAVPFKAQ (SEQ ID NO: 19 of WO2017100671; herein SEQ ID NO: 1304), EGTLAVPFKAQ (SEQ ID NO: 20 of WO2017100671; herein SEQ ID NO: 1305), DSTLAVPFKAQ (SEQ ID NO: 21 in Table 1 of WO2017100671; herein SEQ ID NO: 1306), AVTLAVPFKAQ (SEQ ID NO: 22 of WO2017100671; herein SEQ ID NO: 1307), AQTLSTPFKAQ (SEQ ID NO: 23 of WO2017100671; herein SEQ ID NO: 1308), AQTLPQPFKAQ (SEQ ID NO: 24 and 32 of WO2017100671; herein SEQ ID NO: 1309), AQTLSQPFKAQ (SEQ ID NO: 25 of WO2017100671; herein SEQ ID NO: 1310), AQTLQLPFKAQ (SEQ ID NO: 26 of WO2017100671; herein SEQ ID NO: 1311), AQTLTMPFKAQ (SEQ ID NO: 27, and 34 of WO2017100671 and SEQ ID NO: 35 in the sequence listing of WO2017100671; herein SEQ ID NO: 1312), AQTLTTPFKAQ (SEQ ID NO: 28 of WO2017100671; herein SEQ ID NO: 1313), AQYTLSQGWAQ (SEQ ID NO: 29 of WO2017100671; herein SEQ ID NO: 1314), AQMNATKNVAQ (SEQ ID NO: 30 of WO2017100671; herein SEQ ID NO: 1315), AQVSGGHHSAQ (SEQ ID NO: 31 of WO2017100671; herein SEQ ID NO: 1316), AQTLTAPFKAQ (SEQ ID NO: 35 in Table 1 of WO2017100671; herein SEQ ID NO: 1317), AQTLSKPFKAQ (SEQ ID NO: 36 of WO2017100671; herein SEQ ID NO: 1318), QAVRTSL (SEQ ID NO: 37 of WO2017100671; herein SEQ ID NO: 1319), YTLSQGW (SEQ ID NO: 38 of WO2017100671; herein SEQ ID NO: 1275), LAKERLS (SEQ ID NO: 39 of WO2017100671; herein SEQ ID NO: 1320), TLAVPFK (SEQ ID NO: 40 in the sequence listing of WO2017100671; herein SEQ ID NO: 1260), SVSKPFL (SEQ ID NO: 41 of WO2017100671; herein SEQ ID NO: 1268), FTLTTPK (SEQ ID NO: 42 of WO2017100671; herein SEQ ID NO: 1269), MNSTKNV (SEQ ID NO: 43 of WO2017100671; herein SEQ ID NO: 1321), VSGGHHS (SEQ ID NO: 44 of WO2017100671; herein SEQ ID NO: 1322), SAQTLAVPFKAQAQ (SEQ ID NO: 48 of WO2017100671; herein SEQ ID NO: 1323), SXXXLAVPFKAQAQ (SEQ ID NO: 49 of WO2017100671 wherein X may be any amino acid; herein SEQ ID NO: 1324), SAQXXXVPFKAQAQ (SEQ ID NO: 50 of WO2017100671 wherein X may be any amino acid; herein SEQ ID NO: 1325), SAQTLXXXFKAQAQ (SEQ ID NO: 51 of WO2017100671 wherein X may be any amino acid; herein SEQ ID NO: 1326), SAQTLAVXXXAQAQ (SEQ ID NO: 52 of WO2017100671 wherein X may be any amino acid; herein SEQ ID NO: 1327), SAQTLAVPFXXXAQ (SEQ ID NO: 53 of WO2017100671 wherein X may be any amino acid; herein SEQ ID NO: 1328), TNHQSAQ (SEQ ID NO: 65 of WO2017100671; herein SEQ ID NO: 1329), AQAQTGW (SEQ ID NO: 66 of WO2017100671; herein SEQ ID NO: 1330), DGTLATPFK (SEQ ID NO: 67 of WO2017100671; herein SEQ ID NO: 1331), DGTLATPFKXX (SEQ ID NO: 68 of WO2017100671 wherein X may be any amino acid; herein SEQ ID NO: 1332), LAVPFKAQ (SEQ ID NO: 80 of WO2017100671; herein SEQ ID NO: 1333), VPFKAQ (SEQ ID NO: 81 of WO2017100671; herein SEQ ID NO: 1334), FKAQ (SEQ ID NO: 82 of WO2017100671; herein SEQ ID NO: 1335), AQTLAV (SEQ ID NO: 83 of WO2017100671; herein SEQ ID NO: 1336), AQTLAVPF (SEQ ID NO: 84 of WO2017100671; herein SEQ ID NO: 1337), QAVR (SEQ ID NO: 85 of WO2017100671; herein SEQ ID NO: 1338), AVRT (SEQ ID NO: 86 of WO2017100671; herein SEQ ID NO: 1339), VRTS (SEQ ID NO: 87 of WO2017100671; herein SEQ ID NO: 1340), RTSL (SEQ ID NO: 88 of WO2017100671; herein SEQ ID NO: 1341), QAVRT (SEQ ID NO: 89 of WO2017100671; herein SEQ ID NO: 1342), AVRTS (SEQ ID NO: 90 of WO2017100671; herein SEQ ID NO: 1343), VRTSL (SEQ ID NO: 91 of WO2017100671; herein SEQ ID NO: 1344), QAVRTS (SEQ ID NO: 92 of WO2017100671; herein SEQ ID NO: 1345), or AVRTSL (SEQ ID NO: 93 of WO2017100671; herein SEQ ID NO: 1346).

[0087] Non-limiting examples of nucleotide sequences that may encode the amino acid inserts include the following, GATGGGACTTTGGCGGTGCCTTTTAAGGCACAG (SEQ ID NO: 54 of WO2017100671; herein SEQ ID NO: 1347), GATGGGACGTTGGCGGTGCCTTTTAAGGCACAG (SEQ ID NO: 55 of WO2017100671; herein SEQ ID NO: 1348), CAGGCGGTTAGGACGTCTTTG (SEQ ID NO: 56 of WO2017100671; herein SEQ ID NO: 1349), CAGGTCTTCACGGACTCAGACTATCAG (SEQ ID NO: 57 and 78 of WO2017100671; herein SEQ ID NO: 1350), CAAGTAAAACCTCTACAAATGTGGTAAAATCG (SEQ ID NO: 58 of WO2017100671; herein SEQ ID NO: 1351), ACTCATCGACCAATACTTGTACTATCTCTCTAGAAC (SEQ ID NO: 59 of WO2017100671; herein SEQ ID NO: 1352), GGAAGTATTCCTTGGTTTTGAACCCA (SEQ ID NO: 60 of WO2017100671; herein SEQ ID NO: 1353), GGTCGCGGTTCTTGTTTGTGGAT (SEQ ID NO: 61 of WO2017100671; herein SEQ ID NO: 1354), CGACCTTGAAGCGCATGAACTCCT (SEQ ID NO: 62 of WO2017100671; herein SEQ ID NO: 1355), GTATTCCTTGGTTTTGAACCCAACCGGTCTGCGCCTGTGCMNNMNNMNNMNNMNN MNNMNNTTGGGCACTCTGGTGGTTTGTC (SEQ ID NO: 63 of WO2017100671 wherein N may be A, C, T, or G; herein SEQ ID NO: 1356), GTATTCCTTGGTTTTGAACCCAACCGGTCTGCGCMNNMNNMNNAAAAGGCACCGCC AAAGTTTG (SEQ ID NO: 69 of WO2017100671 wherein N may be A, C, T, or G; herein SEQ ID NO: 1357), GTATTCCTTGGTTTTGAACCCAACCGGTCTGCGCCTGTGCMNNMNNMNNCACCGCC AAAGTTTGGGCACT (SEQ ID NO: 70 of WO2017100671 wherein N may be A, C, T, or G; herein SEQ ID NO: 1358), GTATTCCTTGGTTTTGAACCCAACCGGTCTGCGCCTGTGCCTTAAAMNNMNNMNNC AAAGTTTGGGCACTCTGGTGG (SEQ ID NO: 71 of WO2017100671 wherein N may be A, C, T, or G; herein SEQ ID NO: 1359), GTATTCCTTGGTTTTGAACCCAACCGGTCTGCGCCTGTGCCTTAAAAGGCACMNNMN NMNNTTGGGCACTCTGGTGGTTTGTG (SEQ ID NO: 72 of WO2017100671 wherein N may be A, C, T, or G; herein SEQ ID NO: 1360), ACTTTGGCGGTGCCTTTTAAG (SEQ ID NO: 74 of WO2017100671; herein SEQ ID NO: 1277), AGTGTGAGTAAGCCTTTTTTG (SEQ ID NO: 75 of WO2017100671; herein SEQ ID NO: 1278), TTTACGTTGACGACGCCTAAG (SEQ ID NO: 76 of WO2017100671; herein SEQ ID NO: 1279), TATACTTTGTCGCAGGGTTGG (SEQ ID NO: 77 of WO2017100671; herein SEQ ID NO: 1285), or CTTGCGAAGGAGCGGCTTTCG (SEQ ID NO: 79 of WO2017100671; herein SEQ ID NO: 1361).

[0088] In some embodiments, the AAV serotype may be, or may have a sequence as described in U.S. Pat. No. 9,624,274, the contents of which are herein incorporated by reference in their entirety, such as, but not limited to, AAV1 (SEQ ID NO: 181 of U.S. Pat. No. 9,624,274), AAV6 (SEQ ID NO: 182 of U.S. Pat. No. 9,624,274), AAV2 (SEQ ID NO: 183 of U.S. Pat. No. 9,624,274), AAV3b (SEQ ID NO: 184 of U.S. Pat. No. 9,624,274), AAV7 (SEQ ID NO: 185 of U.S. Pat. No. 9,624,274), AAV8 (SEQ ID NO: 186 of U.S. Pat. No. 9,624,274), AAV10 (SEQ ID NO: 187 of U.S. Pat. No. 9,624,274), AAV4 (SEQ ID NO: 188 of U.S. Pat. No. 9,624,274), AAV11 (SEQ ID NO: 189 of U.S. Pat. No. 9,624,274), bAAV (SEQ ID NO: 190 of U.S. Pat. No. 9,624,274), AAV5 (SEQ ID NO: 191 of U.S. Pat. No. 9,624,274), GPV (SEQ ID NO: 192 of U.S. Pat. No. 9,624,274; herein SEQ ID NO: 992), B19 (SEQ ID NO: 193 of U.S. Pat. No. 9,624,274; herein SEQ ID NO: 993), MVM (SEQ ID NO: 194 of U.S. Pat. No. 9,624,274; herein SEQ ID NO: 994), FPV (SEQ ID NO: 195 of U.S. Pat. No. 9,624,274; herein SEQ ID NO: 995), CPV (SEQ ID NO: 196 of U.S. Pat. No. 9,624,274; herein SEQ ID NO: 996) or variants thereof. Further, any of the structural protein inserts described in U.S. Pat. No. 9,624,274, may be inserted into, but not limited to, I-453 and I-587 of any parent AAV serotype, such as, but not limited to, AAV2 (SEQ ID NO: 183 of U.S. Pat. No. 9,624,274). The amino acid insert may be, but is not limited to, any of the following amino acid sequences, VNLTWSRASG (SEQ ID NO: 50 of U.S. Pat. No. 9,624,274; herein SEQ ID NO: 1362), EFCINHRGYWVCGD (SEQ ID NO:55 of U.S. Pat. No. 9,624,274; herein SEQ ID NO: 1363), EDGQVMDVDLS (SEQ ID NO: 85 of U.S. Pat. No. 9,624,274; herein SEQ ID NO: 1364), EKQRNGTLT (SEQ ID NO: 86 of U.S. Pat. No. 9,624,274; herein SEQ ID NO: 1365), TYQCRVTHPHLPRALMR (SEQ ID NO: 87 of U.S. Pat. No. 9,624,274; herein SEQ ID NO: 1366), RHSTTQPRKTKGSG (SEQ ID NO: 88 of U.S. Pat. No. 9,624,274; herein SEQ ID NO: 1367), DSNPRGVSAYLSR (SEQ ID NO: 89 of U.S. Pat. No. 9,624,274; herein SEQ ID NO: 1368), TITCLWDLAPSK (SEQ ID NO: 90 of U.S. Pat. No. 9,624,274; herein SEQ ID NO: 1369), KTKGSGFFVF (SEQ ID NO: 91 of U.S. Pat. No. 9,624,274; herein SEQ ID NO: 1370), THPHLPRALMRS (SEQ ID NO: 92 of U.S. Pat. No. 9,624,274; herein SEQ ID NO: 1371), GETYQCRVTHPHLPRALMRSTTK (SEQ ID NO: 93 of U.S. Pat. No. 9,624,274; herein SEQ ID NO: 1372), LPRALMRS (SEQ ID NO: 94 of U.S. Pat. No. 9,624,274; herein SEQ ID NO: 1373), INHRGYWV (SEQ ID NO: 95 of U.S. Pat. No. 9,624,274; herein SEQ ID NO: 1374), CDAGSVRTNAPD (SEQ ID NO: 60 of U.S. Pat. No. 9,624,274; herein SEQ ID NO: 1375), AKAVSNLTESRSESLQS (SEQ ID NO: 96 of U.S. Pat. No. 9,624,274; herein SEQ ID NO: 1376), SLTGDEFKKVLET (SEQ ID NO: 97 of U.S. Pat. No. 9,624,274; herein SEQ ID NO: 1377), REAVAYRFEED (SEQ ID NO: 98 of U.S. Pat. No. 9,624,274; herein SEQ ID NO: 1378), INPEIITLDG (SEQ ID NO: 99 of U.S. Pat. No. 9,624,274; herein SEQ ID NO: 1379), DISVTGAPVITATYL (SEQ ID NO: 100 of U.S. Pat. No. 9,624,274; herein SEQ ID NO: 1380), DISVTGAPVITA (SEQ ID NO: 101 of U.S. Pat. No. 9,624,274; herein SEQ ID NO: 1381), PKTVSNLTESSSESVQS (SEQ ID NO: 102 of U.S. Pat. No. 9,624,274; herein SEQ ID NO: 1382), SLMGDEFKAVLET (SEQ ID NO: 103 of U.S. Pat. No. 9,624,274; herein SEQ ID NO: 1383), QHSVAYTFEED (SEQ ID NO: 104 of U.S. Pat. No. 9,624,274; herein SEQ ID NO: 1384), INPEIITRDG (SEQ ID NO: 105 of U.S. Pat. No. 9,624,274; herein SEQ ID NO: 1385), DISLTGDPVITASYL (SEQ ID NO: 106 of U.S. Pat. No. 9,624,274; herein SEQ ID NO: 1386), DISLTGDPVITA (SEQ ID NO: 107 of U.S. Pat. No. 9,624,274; herein SEQ ID NO: 1387), DQSIDFEIDSA (SEQ ID NO: 108 of U.S. Pat. No. 9,624,274; herein SEQ ID NO: 1388), KNVSEDLPLPTFSPTLLGDS (SEQ ID NO: 109 of U.S. Pat. No. 9,624,274; herein SEQ ID NO: 1389), KNVSEDLPLPT (SEQ ID NO: 110 of U.S. Pat. No. 9,624,274; herein SEQ ID NO: 1390), CDSGRVRTDAPD (SEQ ID NO: 111 of U.S. Pat. No. 9,624,274; herein SEQ ID NO: 1391), FPEHLLVDFLQSLS (SEQ ID NO: 112 of U.S. Pat. No. 9,624,274; herein SEQ ID NO: 1392), DAEFRHDSG (SEQ ID NO: 65 of U.S. Pat. No. 9,624,274; herein SEQ ID NO: 1393), HYAAAQWDFGNTMCQL (SEQ ID NO: 113 of U.S. Pat. No. 9,624,274; herein SEQ ID NO: 1394), YAAQWDFGNTMCQ (SEQ ID NO: 114 of U.S. Pat. No. 9,624,274; herein SEQ ID NO: 1395), RSQKEGLHYT (SEQ ID NO: 115 of U.S. Pat. No. 9,624,274; herein SEQ ID NO: 1396), SSRTPSDKPVAHWANPQAE (SEQ ID NO: 116 of U.S. Pat. No. 9,624,274; herein SEQ ID NO: 1397), SRTPSDKPVAHWANP (SEQ ID NO: 117 of U.S. Pat. No. 9,624,274; herein SEQ ID NO: 1398), SSRTPSDKP (SEQ ID NO: 118 of U.S. Pat. No. 9,624,274; herein SEQ ID NO: 1399), NADGNVDYHMNSVP (SEQ ID NO: 119 of U.S. Pat. No. 9,624,274; herein SEQ ID NO: 1400), DGNVDYHMNSV (SEQ ID NO: 120 of U.S. Pat. No. 9,624,274; herein SEQ ID NO: 1401), RSFKEFLQSSLRALRQ (SEQ ID NO: 121 of U.S. Pat. No. 9,624,274; herein SEQ ID NO: 1402); FKEFLQSSLRA (SEQ ID NO: 122 of U.S. Pat. No. 9,624,274; herein SEQ ID NO: 1403), or QMWAPQWGPD (SEQ ID NO: 123 of U.S. Pat. No. 9,624,274; herein SEQ ID NO: 1404).

[0089] In some embodiments, the AAV serotype may be, or may have a sequence as described in U.S. Pat. No. 9,475,845, the contents of which are herein incorporated by reference in their entirety, such as, but not limited to, AAV capsid proteins comprising modification of one or more amino acids at amino acid positions 585 to 590 of the native AAV2 capsid protein. Further the modification may result in, but not limited to, the amino acid sequence RGNRQA (SEQ ID NO: 3 of U.S. Pat. No. 9,475,845; herein SEQ ID NO: 1405), SSSTDP (SEQ ID NO: 4 of U.S. Pat. No. 9,475,845; herein SEQ ID NO: 1406), SSNTAP (SEQ ID NO: 5 of U.S. Pat. No. 9,475,845; herein SEQ ID NO: 1407), SNSNLP (SEQ ID NO: 6 of U.S. Pat. No. 9,475,845; herein SEQ ID NO: 1408), SSTTAP (SEQ ID NO: 7 of U.S. Pat. No. 9,475,845; herein SEQ ID NO: 1409), AANTAA (SEQ ID NO: 8 of U.S. Pat. No. 9,475,845; herein SEQ ID NO: 1410), QQNTAP (SEQ ID NO: 9 of U.S. Pat. No. 9,475,845; herein SEQ ID NO: 1411), SAQAQA (SEQ ID NO: 10 of U.S. Pat. No. 9,475,845; herein SEQ ID NO: 1412), QANTGP (SEQ ID NO: 11 of U.S. Pat. No. 9,475,845; herein SEQ ID NO: 1413), NATTAP (SEQ ID NO: 12 of U.S. Pat. No. 9,475,845; herein SEQ ID NO: 1414), SSTAGP (SEQ ID NO: 13 and 20 of U.S. Pat. No. 9,475,845; herein SEQ ID NO: 1415), QQNTAA (SEQ ID NO: 14 of U.S. Pat. No. 9,475,845; herein SEQ ID NO: 1416), PSTAGP (SEQ ID NO: 15 of U.S. Pat. No. 9,475,845; herein SEQ ID NO: 1417), NQNTAP (SEQ ID NO: 16 of U.S. Pat. No. 9,475,845; herein SEQ ID NO: 1418), QAANAP (SEQ ID NO: 17 of U.S. Pat. No. 9,475,845; herein SEQ ID NO: 1419), SIVGLP (SEQ ID NO: 18 of U.S. Pat. No. 9,475,845; herein SEQ ID NO: 1420), AASTAA (SEQ ID NO: 19, and 27 of U.S. Pat. No. 9,475,845; herein SEQ ID NO: 1421), SQNTTA (SEQ ID NO: 21 of U.S. Pat. No. 9,475,845; herein SEQ ID NO: 1422), QQDTAP (SEQ ID NO: 22 of U.S. Pat. No. 9,475,845; herein SEQ ID NO: 1423), QTNTGP (SEQ ID NO: 23 of U.S. Pat. No. 9,475,845; herein SEQ ID NO: 1424), QTNGAP (SEQ ID NO: 24 of U.S. Pat. No. 9,475,845; herein SEQ ID NO: 1425), QQNAAP (SEQ ID NO: 25 of U.S. Pat. No. 9,475,845; herein SEQ ID NO: 1426), or AANTQA (SEQ ID NO: 26 of U.S. Pat. No. 9,475,845; herein SEQ ID NO: 1427). In some embodiments, the amino acid modification is a substitution at amino acid positions 262 through 265 in the native AAV2 capsid protein or the corresponding position in the capsid protein of another AAV with a targeting sequence. The targeting sequence may be, but is not limited to, any of the amino acid sequences, NGRAHA (SEQ ID NO: 38 of U.S. Pat. No. 9,475,845; herein SEQ ID NO: 1428), QPEHSST (SEQ ID NO: 39 and 50 of U.S. Pat. No. 9,475,845; herein SEQ ID NO: 1429), VNTANST (SEQ ID NO: 40 of U.S. Pat. No. 9,475,845; herein SEQ ID NO: 1430), HGPMQKS (SEQ ID NO: 41 of U.S. Pat. No. 9,475,845; herein SEQ ID NO: 1431), PHKPPLA (SEQ ID NO: 42 of U.S. Pat. No. 9,475,845; herein SEQ ID NO: 1432), IKNNEMW (SEQ ID NO: 43 of U.S. Pat. No. 9,475,845; herein SEQ ID NO: 1433), RNLDTPM (SEQ ID NO: 44 of U.S. Pat. No. 9,475,845; herein SEQ ID NO: 1434), VDSHRQS (SEQ ID NO: 45 of U.S. Pat. No. 9,475,845; herein SEQ ID NO: 1435), YDSKTKT (SEQ ID NO: 46 of U.S. Pat. No. 9,475,845; herein SEQ ID NO: 1436), SQLPHQK (SEQ ID NO: 47 of U.S. Pat. No. 9,475,845; herein SEQ ID NO: 1437), STMQQNT (SEQ ID NO: 48 of U.S. Pat. No. 9,475,845; herein SEQ ID NO: 1438), TERYMTQ (SEQ ID NO: 49 of U.S. Pat. No. 9,475,845; herein SEQ ID NO: 1439), DASLSTS (SEQ ID NO: 51 of U.S. Pat. No. 9,475,845; herein SEQ ID NO: 1440), DLPNKKT (SEQ ID NO: 52 of U.S. Pat. No. 9,475,845; herein SEQ ID NO: 1441), DLTAARL (SEQ ID NO: 53 of U.S. Pat. No. 9,475,845; herein SEQ ID NO: 1442), EPHQFNY (SEQ ID NO: 54 of U.S. Pat. No. 9,475,845; herein SEQ ID NO: 1443), EPQSNHT (SEQ ID NO: 55 of U.S. Pat. No. 9,475,845; herein SEQ ID NO: 1444), MSSWPSQ (SEQ ID NO: 56 of U.S. Pat. No. 9,475,845; herein SEQ ID NO: 1445), NPKHNAT (SEQ ID NO: 57 of U.S. Pat. No. 9,475,845; herein SEQ ID NO: 1446), PDGMRTT (SEQ ID NO: 58 of U.S. Pat. No. 9,475,845; herein SEQ ID NO: 1447), PNNNKTT (SEQ ID NO: 59 of U.S. Pat. No. 9,475,845; herein SEQ ID NO: 1448), QSTTHDS (SEQ ID NO: 60 of U.S. Pat. No. 9,475,845; herein SEQ ID NO: 1449), TGSKQKQ (SEQ ID NO: 61 of U.S. Pat. No. 9,475,845; herein SEQ ID NO: 1450), SLKHQAL (SEQ ID NO: 62 of U.S. Pat. No. 9,475,845; herein SEQ ID NO: 1451), SPIDGEQ (SEQ ID NO: 63 of U.S. Pat. No. 9,475,845; herein SEQ ID NO: 1452), WIFPWIQL (SEQ ID NO: 64 and 112 of U.S. Pat. No. 9,475,845; herein SEQ ID NO: 1453), CDCRGDCFC (SEQ ID NO: 65 of U.S. Pat. No. 9,475,845; herein SEQ ID NO: 1454), CNGRC (SEQ ID NO: 66 of U.S. Pat. No. 9,475,845; herein SEQ ID NO: 1455), CPRECES (SEQ ID NO: 67 of U.S. Pat. No. 9,475,845; herein SEQ ID NO: 1456), CTTHWGFTLC (SEQ ID NO: 68 and 123 of U.S. Pat. No. 9,475,845; herein SEQ ID NO: 1457), CGRRAGGSC (SEQ ID NO: 69 of U.S. Pat. No. 9,475,845; herein SEQ ID NO: 1458), CKGGRAKDC (SEQ ID NO: 70 of U.S. Pat. No. 9,475,845; herein SEQ ID NO: 1459), CVPELGHEC (SEQ ID NO: 71 and 115 of U.S. Pat. No. 9,475,845; herein SEQ ID NO: 1460), CRRETAWAK (SEQ ID NO: 72 of U.S. Pat. No. 9,475,845; herein SEQ ID NO: 1461), VSWFSHRYSPFAVS (SEQ ID NO: 73 of U.S. Pat. No. 9,475,845; herein SEQ ID NO: 1462), GYRDGYAGPILYN (SEQ ID NO: 74 of U.S. Pat. No. 9,475,845; herein SEQ ID NO: 1463), XXXYXXX (SEQ ID NO: 75 of U.S. Pat. No. 9,475,845; herein SEQ ID NO: 1464), YXNW (SEQ ID NO: 76 of U.S. Pat. No. 9,475,845; herein SEQ ID NO: 1465), RPLPPLP (SEQ ID NO: 77 of U.S. Pat. No. 9,475,845; herein SEQ ID NO: 1466), APPLPPR (SEQ ID NO: 78 of U.S. Pat. No. 9,475,845; herein SEQ ID NO: 1467), DVFYPYPYASGS (SEQ ID NO: 79 of U.S. Pat. No. 9,475,845; herein SEQ ID NO: 1468), MYWYPY (SEQ ID NO: 80 of U.S. Pat. No. 9,475,845; herein SEQ ID NO: 1469), DITWDQLWDLMK (SEQ ID NO: 81 of U.S. Pat. No. 9,475,845; herein SEQ ID NO: 1470), CWDDXWLC (SEQ ID NO: 82 of U.S. Pat. No. 9,475,845; herein SEQ ID NO: 1471), EWCEYLGGYLRCYA (SEQ ID NO: 83 of U.S. Pat. No. 9,475,845; herein SEQ ID NO: 1472), YXCXXGPXTWXCXP (SEQ ID NO: 84 of U.S. Pat. No. 9,475,845; herein SEQ ID NO: 1473), IEGPTLRQWLAARA (SEQ ID NO: 85 of U.S. Pat. No. 9,475,845; herein SEQ ID NO: 1474), LWXXX (SEQ ID NO: 86 of U.S. Pat. No. 9,475,845; herein SEQ ID NO: 1475), XFXXYLW (SEQ ID NO: 87 of U.S. Pat. No. 9,475,845; herein SEQ ID NO: 1476), SSIISHFRWGLCD (SEQ ID NO: 88 of U.S. Pat. No. 9,475,845; herein SEQ ID NO: 1477), MSRPACPPNDKYE (SEQ ID NO: 89 of U.S. Pat. No. 9,475,845; herein SEQ ID NO: 1478), CLRSGRGC (SEQ ID NO: 90 of U.S. Pat. No. 9,475,845; herein SEQ ID NO: 1479), CHWMFSPWC (SEQ ID NO: 91 of U.S. Pat. No. 9,475,845; herein SEQ ID NO: 1480), WXXF (SEQ ID NO: 92 of U.S. Pat. No. 9,475,845; herein SEQ ID NO: 1481), CSSRLDAC (SEQ ID NO: 93 of U.S. Pat. No. 9,475,845; herein SEQ ID NO: 1482), CLPVASC (SEQ ID NO: 94 of U.S. Pat. No. 9,475,845; herein SEQ ID NO: 1483), CGFECVRQCPERC (SEQ ID NO: 95 of U.S. Pat. No. 9,475,845; herein SEQ ID NO: 1484), CVALCREACGEGC (SEQ ID NO: 96 of U.S. Pat. No. 9,475,845; herein SEQ ID NO: 1485), SWCEPGWCR (SEQ ID NO: 97 of U.S. Pat. No. 9,475,845; herein SEQ ID NO: 1486), YSGKWGW (SEQ ID NO: 98 of U.S. Pat. No. 9,475,845; herein SEQ ID NO: 1487), GLSGGRS (SEQ ID NO: 99 of U.S. Pat. No. 9,475,845; herein SEQ ID NO: 1488), LMLPRAD (SEQ ID NO: 100 of U.S. Pat. No. 9,475,845; herein SEQ ID NO: 1489), CSCFRDVCC (SEQ ID NO: 101 of U.S. Pat. No. 9,475,845; herein SEQ ID NO: 1490), CRDVVSVIC (SEQ ID NO: 102 of U.S. Pat. No. 9,475,845; herein SEQ ID NO: 1491), MARSGL (SEQ ID NO: 103 of U.S. Pat. No. 9,475,845; herein SEQ ID NO: 1492), MARAKE (SEQ ID NO: 104 of U.S. Pat. No. 9,475,845; herein SEQ ID NO: 1493), MSRTMS (SEQ ID NO: 105 of U.S. Pat. No. 9,475,845; herein SEQ ID NO: 1494), KCCYSL (SEQ ID NO: 106 of U.S. Pat. No. 9,475,845; herein SEQ ID NO: 1495), MYWGDSHWLQYWYE (SEQ ID NO: 107 of U.S. Pat. No. 9,475,845; herein SEQ ID NO: 1496), MQLPLAT (SEQ ID NO: 108 of U.S. Pat. No. 9,475,845; herein SEQ ID NO: 1497), EWLS (SEQ ID NO: 109 of U.S. Pat. No. 9,475,845; herein SEQ ID NO: 1498), SNEW (SEQ ID NO: 110 of U.S. Pat. No. 9,475,845; herein SEQ ID NO: 1499), TNYL (SEQ ID NO: 111 of U.S. Pat. No. 9,475,845; herein SEQ ID NO: 1500), WDLAWMFRLPVG (SEQ ID NO: 113 of U.S. Pat. No. 9,475,845; herein SEQ ID NO: 1501), CTVALPGGYVRVC (SEQ ID NO: 114 of U.S. Pat. No. 9,475,845; herein SEQ ID NO: 1502), CVAYCIEHHCWTC (SEQ ID NO: 116 of U.S. Pat. No. 9,475,845; herein SEQ ID NO: 1503), CVFAHNYDYLVC (SEQ ID NO: 117 of U.S. Pat. No. 9,475,845; herein SEQ ID NO: 1504), CVFTSNYAFC (SEQ ID NO: 118 of U.S. Pat. No. 9,475,845; herein SEQ ID NO: 1505), VHSPNKK (SEQ ID NO: 119 of U.S. Pat. No. 9,475,845; herein SEQ ID NO: 1506), CRGDGWC (SEQ ID NO: 120 of U.S. Pat. No. 9,475,845; herein SEQ ID NO: 1507), XRGCDX (SEQ ID NO: 121 of U.S. Pat. No. 9,475,845; herein SEQ ID NO: 1508), PXXX (SEQ ID NO: 122 of U.S. Pat. No. 9,475,845; herein SEQ ID NO: 1509), SGKGPRQITAL (SEQ ID NO: 124 of U.S. Pat. No. 9,475,845; herein SEQ ID NO: 1510), AAAAAAAAAXXXXX (SEQ ID NO: 125 of U.S. Pat. No. 9,475,845; herein SEQ ID NO: 1511), VYMSPF (SEQ ID NO: 126 of U.S. Pat. No. 9,475,845; herein SEQ ID NO: 1512), ATWLPPR (SEQ ID NO: 127 of U.S. Pat. No. 9,475,845; herein SEQ ID NO: 1513), HTMYYHHYQHHL (SEQ ID NO: 128 of U.S. Pat. No. 9,475,845; herein SEQ ID NO: 1514), SEVGCRAGPLQWLCEKYFG (SEQ ID NO: 129 of U.S. Pat. No. 9,475,845; herein SEQ ID NO: 1515), CGLLPVGRPDRNVWRWLC (SEQ ID NO: 130 of U.S. Pat. No. 9,475,845; herein SEQ ID NO: 1516), CKGQCDRFKGLPWEC (SEQ ID NO: 131 of U.S. Pat. No. 9,475,845; herein SEQ ID NO: 1517), SGRSA (SEQ ID NO: 132 of U.S. Pat. No. 9,475,845; herein SEQ ID NO: 1518), WGFP (SEQ ID NO: 133 of U.S. Pat. No. 9,475,845; herein SEQ ID NO: 1519), AEPMPHSLNFSQYLWYT (SEQ ID NO: 134 of U.S. Pat. No. 9,475,845; herein SEQ ID NO: 1520), WAYXSP (SEQ ID NO: 135 of U.S. Pat. No. 9,475,845; herein SEQ ID NO: 1521), IELLQAR (SEQ ID NO: 136 of U.S. Pat. No. 9,475,845; herein SEQ ID NO: 1522), AYTKCSRQWRTCMTTH (SEQ ID NO: 137 of U.S. Pat. No. 9,475,845; herein SEQ ID NO: 1523), PQNSKIPGPTFLDPH (SEQ ID NO: 138 of U.S. Pat. No. 9,475,845; herein SEQ ID NO: 1524), SMEPALPDWWWKMFK (SEQ ID NO: 139 of U.S. Pat. No. 9,475,845; herein SEQ ID NO: 1525), ANTPCGPYTHDCPVKR (SEQ ID NO: 140 of U.S. Pat. No. 9,475,845; herein SEQ ID NO: 1526), TACHQHVRMVRP (SEQ ID NO: 141 of U.S. Pat. No. 9,475,845; herein SEQ ID NO: 1527), VPWMEPAYQRFL (SEQ ID NO: 142 of U.S. Pat. No. 9,475,845; herein SEQ ID NO: 1528), DPRATPGS (SEQ ID NO: 143 of U.S. Pat. No. 9,475,845; herein SEQ ID NO: 1529), FRPNRAQDYNTN (SEQ ID NO: 144 of U.S. Pat. No. 9,475,845; herein SEQ ID NO: 1530), CTKNSYLMC (SEQ ID NO: 145 of U.S. Pat. No. 9,475,845; herein SEQ ID NO: 1531), CXXTXXXGXGC (SEQ ID NO: 146 of U.S. Pat. No. 9,475,845; herein SEQ ID NO: 1532), CPIEDRPMC (SEQ ID NO: 147 of U.S. Pat. No. 9,475,845; herein SEQ ID NO: 1533), HEWSYLAPYPWF (SEQ ID NO: 148 of U.S. Pat. No. 9,475,845; herein SEQ ID NO: 1534), MCPKHPLGC (SEQ ID NO: 149 of U.S. Pat. No. 9,475,845; herein SEQ ID NO: 1535), RMWPSSTVNLSAGRR (SEQ ID NO: 150 of U.S. Pat. No. 9,475,845; herein SEQ ID NO: 1536), SAKTAVSQRVWLPSHRGGEP (SEQ ID NO: 151 of U.S. Pat. No. 9,475,845; herein SEQ ID NO: 1537), KSREHVNNSACPSKRITAAL (SEQ ID NO: 152 of U.S. Pat. No. 9,475,845; herein SEQ ID NO: 1538), EGFR (SEQ ID NO: 153 of U.S. Pat. No. 9,475,845; herein SEQ ID NO: 1539), AGLGVR (SEQ ID NO: 154 of U.S. Pat. No. 9,475,845; herein SEQ ID NO: 1540), GTRQGHTMRLGVSDG (SEQ ID NO: 155 of U.S. Pat. No. 9,475,845; herein SEQ ID NO: 1541), IAGLATPGWSHWLAL (SEQ ID NO: 156 of U.S. Pat. No. 9,475,845; herein SEQ ID NO: 1542), SMSIARL (SEQ ID NO: 157 of U.S. Pat. No. 9,475,845; herein SEQ ID NO: 1543), HTFEPGV (SEQ ID NO: 158 of U.S. Pat. No. 9,475,845; herein SEQ ID NO: 1544), NTSLKRISNKRIRRK (SEQ ID NO: 159 of U.S. Pat. No. 9,475,845; herein SEQ ID NO: 1545), LRIKRKRRKRKKTRK (SEQ ID NO: 160 of U.S. Pat. No. 9,475,845; herein SEQ ID NO: 1546), GGG, GFS, LWS, EGG, LLV, LSP, LBS, AGG, GRR, GGH and GTV.

[0090] In some embodiments, the AAV serotype may be, or may have a sequence as described in U.S. Patent Application Publication No. US 20160369298, the contents of which are herein incorporated by reference in their entirety, such as, but not limited to, site-specific mutated capsid protein of AAV2 (SEQ ID NO: 97 of US 20160369298; herein SEQ ID NO: 1547) or variants thereof, wherein the specific site is at least one site selected from sites R447, G453, S578, N587, N587+1, S662 of VP1 or fragment thereof.

[0091] Further, any of the mutated sequences described in US 20160369298, may be or may have, but not be limited to, any of the following sequences SDSGASN (SEQ ID NO: 1 and SEQ ID NO: 231 of US20160369298; herein SEQ ID NO: 1548), SPSGASN (SEQ ID NO: 2 of US20160369298; herein SEQ ID NO: 1549), SHSGASN (SEQ ID NO: 3 of US20160369298; herein SEQ ID NO: 1550), SRSGASN (SEQ ID NO: 4 of US20160369298; herein SEQ ID NO: 1551), SKSGASN (SEQ ID NO: 5 of US20160369298; herein SEQ ID NO: 1552), SNSGASN (SEQ ID NO: 6 of US20160369298; herein SEQ ID NO: 1553), SGSGASN (SEQ ID NO: 7 of US20160369298; herein SEQ ID NO: 1554), SASGASN (SEQ ID NO: 8, 175, and 221 of US20160369298; herein SEQ ID NO: 1555), SESGTSN (SEQ ID NO: 9 of US20160369298; herein SEQ ID NO: 1556), STTGGSN (SEQ ID NO: 10 of US20160369298; herein SEQ ID NO: 1557), SSAGSTN (SEQ ID NO: 11 of US20160369298; herein SEQ ID NO: 1558), NNDSQA (SEQ ID NO: 12 of US20160369298; herein SEQ ID NO: 1559), NNRNQA (SEQ ID NO: 13 of US20160369298; herein SEQ ID NO: 1560), NNNKQA (SEQ ID NO: 14 of US20160369298; herein SEQ ID NO: 1561), NAKRQA (SEQ ID NO: 15 of US20160369298; herein SEQ ID NO: 1562), NDEHQA (SEQ ID NO: 16 of US20160369298; herein SEQ ID NO: 1563), NTSQKA (SEQ ID NO: 17 of US20160369298; herein SEQ ID NO: 1564), YYLSRTNTPSGTDTQSRLVFSQAGA (SEQ ID NO: 18 of US20160369298; herein SEQ ID NO: 1565), YYLSRTNTDSGTETQSGLDFSQAGA (SEQ ID NO: 19 of US20160369298; herein SEQ ID NO: 1566), YYLSRTNTESGTPTQSALEFSQAGA (SEQ ID NO: 20 of US20160369298; herein SEQ ID NO: 1567), YYLSRTNTHSGTHTQSPLHFSQAGA (SEQ ID NO: 21 of US20160369298; herein SEQ ID NO: 1568), YYLSRTNTSSGTITISHLIFSQAGA (SEQ ID NO: 22 of US20160369298; herein SEQ ID NO: 1569), YYLSRTNTRSGIMTKSSLMFSQAGA (SEQ ID NO: 23 of US20160369298; herein SEQ ID NO: 1570), YYLSRTNTKSGRKTLSNLSFSQAGA (SEQ ID NO: 24 of US20160369298; herein SEQ ID NO: 1571), YYLSRTNDGSGPVTPSKLRFSQRGA (SEQ ID NO: 25 of US20160369298; herein SEQ ID NO: 1572), YYLSRTNAASGHATHSDLKFSQPGA (SEQ ID NO: 26 of US20160369298; herein SEQ ID NO: 1573), YYLSRTNGQAGSLTMSELGFSQVGA (SEQ ID NO: 27 of US20160369298; herein SEQ ID NO: 1574), YYLSRTNSTGGNQTTSQLLFSQLSA (SEQ ID NO: 28 of US20160369298; herein SEQ ID NO: 1575), YFLSRTNNNTGLNTNSTLNFSQGRA (SEQ ID NO: 29 of US20160369298; herein SEQ ID NO: 1576), SKTGADNNNSEYSWTG (SEQ ID NO: 30 of US20160369298; herein SEQ ID NO: 1577), SKTDADNNNSEYSWTG (SEQ ID NO: 31 of US20160369298; herein SEQ ID NO: 1578), SKTEADNNNSEYSWTG (SEQ ID NO: 32 of US20160369298; herein SEQ ID NO: 1579), SKTPADNNNSEYSWTG (SEQ ID NO: 33 of US20160369298; herein SEQ ID NO: 1580), SKTHADNNNSEYSWTG (SEQ ID NO: 34 of US20160369298; herein SEQ ID NO: 1581), SKTQADNNNSEYSWTG (SEQ ID NO: 35 of US20160369298; herein SEQ ID NO: 1582), SKTIADNNNSEYSWTG (SEQ ID NO: 36 of US20160369298; herein SEQ ID NO: 1583), SKTMADNNNSEYSWTG (SEQ ID NO: 37 of US20160369298; herein SEQ ID NO: 1584), SKTRADNNNSEYSWTG (SEQ ID NO: 38 of US20160369298; herein SEQ ID NO: 1585), SKTNADNNNSEYSWTG (SEQ ID NO: 39 of US20160369298; herein SEQ ID NO: 1586), SKTVGRNNNSEYSWTG (SEQ ID NO: 40 of US20160369298; herein SEQ ID NO: 1587), SKTADRNNNSEYSWTG (SEQ ID NO: 41 of US20160369298; herein SEQ ID NO: 1588), SKKLSQNNNSKYSWQG (SEQ ID NO: 42 of US20160369298; herein SEQ ID NO: 1589), SKPTTGNNNSDYSWPG (SEQ ID NO: 43 of US20160369298; herein SEQ ID NO: 1590), STQKNENNNSNYSWPG (SEQ ID NO: 44 of US20160369298; herein SEQ ID NO: 1591), HKDDEGKF (SEQ ID NO: 45 of US20160369298; herein SEQ ID NO: 1592), HKDDNRKF (SEQ ID NO: 46 of US20160369298; herein SEQ ID NO: 1593), HKDDTNKF (SEQ ID NO: 47 of US20160369298; herein SEQ ID NO: 1594), HEDSDKNF (SEQ ID NO: 48 of US20160369298; herein SEQ ID NO: 1595), HRDGADSF (SEQ ID NO: 49 of US20160369298; herein SEQ ID NO: 1596), HGDNKSRF (SEQ ID NO: 50 of US20160369298; herein SEQ ID NO: 1597), KQGSEKTNVDFEEV (SEQ ID NO: 51 of US20160369298; herein SEQ ID NO: 1598), KQGSEKTNVDSEEV (SEQ ID NO: 52 of US20160369298; herein SEQ ID NO: 1599), KQGSEKTNVDVEEV (SEQ ID NO: 53 of US20160369298; herein SEQ ID NO: 1600), KQGSDKTNVDDAGV (SEQ ID NO: 54 of US20160369298; herein SEQ ID NO: 1601), KQGSSKTNVDPREV (SEQ ID NO: 55 of US20160369298; herein SEQ ID NO: 1602), KQGSRKTNVDHKQV (SEQ ID NO: 56 of US20160369298; herein SEQ ID NO: 1603), KQGSKGGNVDTNRV (SEQ ID NO: 57 of US20160369298; herein SEQ ID NO: 1604), KQGSGEANVDNGDV (SEQ ID NO: 58 of US20160369298; herein SEQ ID NO: 1605), KQDAAADNIDYDHV (SEQ ID NO: 59 of US20160369298; herein SEQ ID NO: 1606), KQSGTRSNAAASSV (SEQ ID NO: 60 of US20160369298; herein SEQ ID NO: 1607), KENTNTNDTELTNV (SEQ ID NO: 61 of US20160369298; herein SEQ ID NO: 1608), QRGNNVAATADVNT (SEQ ID NO: 62 of US20160369298; herein SEQ ID NO: 1609), QRGNNEAATADVNT (SEQ ID NO: 63 of US20160369298; herein SEQ ID NO: 1610), QRGNNPAATADVNT (SEQ ID NO: 64 of US20160369298; herein SEQ ID NO: 1611), QRGNNHAATADVNT (SEQ ID NO: 65 of US20160369298; herein SEQ ID NO: 1612), QEENNIAATPGVNT (SEQ ID NO: 66 of US20160369298; herein SEQ ID NO: 1613), QPPNNMAATHEVNT (SEQ ID NO: 67 of US20160369298; herein SEQ ID NO: 1614), QFHHNNSAATTIVNT (SEQ ID NO: 68 of US20160369298; herein SEQ ID NO: 1615), QTTNNRAAFNMVET (SEQ ID NO: 69 of US20160369298; herein SEQ ID NO: 1616), QKKNNNAASKKVAT (SEQ ID NO: 70 of US20160369298; herein SEQ ID NO: 1617), QGGNNKAADDAVKT (SEQ ID NO: 71 of US20160369298; herein SEQ ID NO: 1618), QAAKGGAADDAVKT (SEQ ID NO: 72 of US20160369298; herein SEQ ID NO: 1619), QDDRAAAANESVDT (SEQ ID NO: 73 of US20160369298; herein SEQ ID NO: 1620), QQQHDDAAYQRVHT (SEQ ID NO: 74 of US20160369298; herein SEQ ID NO: 1621), QSSSSLAAVSTVQT (SEQ ID NO: 75 of US20160369298; herein SEQ ID NO: 1622), QNNQTTAAIRNVTT (SEQ ID NO: 76 of US20160369298; herein SEQ ID NO: 1623), NYNKKSDNVDFT (SEQ ID NO: 77 of US20160369298; herein SEQ ID NO: 1624), NYNKKSENVDFT (SEQ ID NO: 78 of US20160369298; herein SEQ ID NO: 1625), NYNKKSLNVDFT (SEQ ID NO: 79 of US20160369298; herein SEQ ID NO: 1626), NYNKKSPNVDFT (SEQ ID NO: 80 of US20160369298; herein SEQ ID NO: 1627), NYSKKSHCVDFT (SEQ ID NO: 81 of US20160369298; herein SEQ ID NO: 1628), NYRKTIYVDFT (SEQ ID NO: 82 of US20160369298; herein SEQ ID NO: 1629), NYKEKKDVHFT (SEQ ID NO: 83 of US20160369298; herein SEQ ID NO: 1630), NYGHRAIVQFT (SEQ ID NO: 84 of US20160369298; herein SEQ ID NO: 1631), NYANHQFVVCT (SEQ ID NO: 85 of US20160369298; herein SEQ ID NO: 1632), NYDDDPTGVLLT (SEQ ID NO: 86 of US20160369298; herein SEQ ID NO: 1633), NYDDPTGVLLT (SEQ ID NO: 87 of US20160369298; herein SEQ ID NO: 1634), NFEQQNSVEWT (SEQ ID NO: 88 of US20160369298; herein SEQ ID NO: 1635), SQSGASN (SEQ ID NO: 89 and SEQ ID NO: 241 of US20160369298; herein SEQ ID NO: 1636), NNGSQA (SEQ ID NO: 90 of US20160369298; herein SEQ ID NO: 1637), YYLSRTNTPSGTTTWSRLQFSQAGA (SEQ ID NO: 91 of US20160369298; herein SEQ ID NO: 1638), SKTSADNNNSEYSWTG (SEQ ID NO: 92 of US20160369298; herein SEQ ID NO: 1639), HKDDEEKF (SEQ ID NO: 93, 209, 214, 219, 224, 234, 239, and 244 of US20160369298; herein SEQ ID NO: 1640), KQGSEKTNVDIEEV (SEQ ID NO: 94 of US20160369298; herein SEQ ID NO: 1641), QRGNNQAATADVNT (SEQ ID NO: 95 of US20160369298; herein SEQ ID NO: 1642), NYNKKSVNVDFT (SEQ ID NO: 96 of US20160369298; herein SEQ ID NO: 1643), SQSGASNYNTPSGTTTQSRLQFSTSADNNNSEYSWTGATKYH (SEQ ID NO: 106 of US20160369298; herein SEQ ID NO: 1644), SASGASNFNSEGGSLTQSSLGFSTDGENNNSDFSWTGATKYH (SEQ ID NO: 107 of US20160369298; herein SEQ ID NO: 1645), SQSGASNYNTPSGTTTQSRLQFSTDGENNNSDFSWTGATKYH (SEQ ID NO: 108 of US20160369298; herein SEQ ID NO: 1646), SASGASNYNTPSGTTTQSRLQFSTSADNNNSEFSWPGATTYH (SEQ ID NO: 109 of US20160369298; herein SEQ ID NO: 1647), SQSGASNFNSEGGSLTQSSLGFSTDGENNNSDFSWTGATKYH (SEQ ID NO: 110 of US20160369298; herein SEQ ID NO: 1648), SASGASNYNTPSGSLTQSSLGFSTDGENNNSDFSWTGATKYH (SEQ ID NO: 111 of US20160369298; herein SEQ ID NO: 1649), SQSGASNYNTPSGTTTQSRLQFSTSADNNNSDFSWTGATKYH (SEQ ID NO: 112 of US20160369298; herein SEQ ID NO: 1650), SGAGASNFNSEGGSLTQSSLGFSTDGENNNSDFSWTGATKYH (SEQ ID NO: 113 of US20160369298; herein SEQ ID NO: 1651), SGAGASN (SEQ ID NO: 176 of US20160369298; herein SEQ ID NO: 1652), NSEGGSLTQSSLGFS (SEQ ID NO: 177, 185, 193 and 202 of US20160369298; herein SEQ ID NO: 1653), TDGENNNSDFS (SEQ ID NO: 178 of US20160369298; herein SEQ ID NO: 1654), SEFSWPGATT (SEQ ID NO: 179 of US20160369298; herein SEQ ID NO: 1655), TSADNNNSDFSWT (SEQ ID NO: 180 of US20160369298; herein SEQ ID NO: 1656), SQSGASNY (SEQ ID NO: 181, 187, and 198 of US20160369298; herein SEQ ID NO: 1657), NTPSGTTTQSRLQFS (SEQ ID NO: 182, 188, 191, and 199 of US20160369298; herein SEQ ID NO: 1658), TSADNNNSEYSWTGATKYH (SEQ ID NO: 183 of US20160369298; herein SEQ ID NO: 1659), SASGASNF (SEQ ID NO: 184 of US20160369298; herein SEQ ID NO: 1660), TDGENNNSDFSWTGATKYH (SEQ ID NO: 186, 189, 194, 197, and 203 of US20160369298; herein SEQ ID NO: 1661), SASGASNY (SEQ ID NO: 190 and SEQ ID NO: 195 of US20160369298; herein SEQ ID NO: 1662), TSADNNNSEFSWPGATTYH (SEQ ID NO: 192 of US20160369298; herein SEQ ID NO: 1663), NTPSGSLTQSSLGFS (SEQ ID NO: 196 of US20160369298; herein SEQ ID NO: 1664), TSADNNNSDFSWTGATKYH (SEQ ID NO: 200 of US20160369298; herein SEQ ID NO: 1665), SGAGASNF (SEQ ID NO: 201 of US20160369298; herein SEQ ID NO: 1666), CTCCAGVVSVVSMRSRVCVNSGCAGCTDHCVVSRNSGTCVMSACACAA (SEQ ID NO: 204 of US20160369298; herein SEQ ID NO: 1667), CTCCAGAGAGGCAACAGACAAGCAGCTACCGCAGATGTCAACACACAA (SEQ ID NO: 205 of US20160369298; herein SEQ ID NO: 1668), SAAGASN (SEQ ID NO: 206 of US20160369298; herein SEQ ID NO: 1669), YFLSRTNTESGSTTQSTLRFSQAG (SEQ ID NO: 207 of US20160369298; herein SEQ ID NO: 1670), SKTSADNNNSDFS (SEQ ID NO: 208, 228, and 253 of US20160369298; herein SEQ ID NO: 1671), KQGSEKTDVDIDKV (SEQ ID NO: 210 of US20160369298; herein SEQ ID NO: 1672), STAGASN (SEQ ID NO: 211 of US20160369298; herein SEQ ID NO: 1673), YFLSRTNTTSGIETQSTLRFSQAG (SEQ ID NO: 212 and SEQ ID NO: 247 of US20160369298; herein SEQ ID NO: 1674), SKTDGENNNSDFS (SEQ ID NO: 213 and SEQ ID NO: 248 of US20160369298; herein SEQ ID NO: 1675), KQGAAADDVEIDGV (SEQ ID NO: 215 and SEQ ID NO: 250 of US20160369298; herein SEQ ID NO: 1676), SEAGASN (SEQ ID NO: 216 of US20160369298; herein SEQ ID NO: 1677), YYLSRTNTPSGTTTQSRLQFSQAG (SEQ ID NO: 217, 232 and 242 of US20160369298; herein SEQ ID NO: 1678), SKTSADNNNSEYS (SEQ ID NO: 218, 233, 238, and 243 of US20160369298; herein SEQ ID NO: 1679), KQGSEKTNVDIEKV (SEQ ID NO: 220, 225 and 245 of US20160369298; herein SEQ ID NO: 1680), YFLSRTNDASGSDTKSTLLFSQAG (SEQ ID NO: 222 of US20160369298; herein SEQ ID NO: 1681), STTPSENNNSEYS (SEQ ID NO: 223 of US20160369298; herein SEQ ID NO: 1682), SAAGATN (SEQ ID NO: 226 and SEQ ID NO: 251 of US20160369298; herein SEQ ID NO: 1683), YFLSRTNGEAGSATLSELRFSQAG (SEQ ID NO: 227 of US20160369298; herein SEQ ID NO: 1684), HGDDADRF (SEQ ID NO: 229 and SEQ ID NO: 254 of US20160369298; herein SEQ ID NO: 1685), KQGAEKSDVEVDRV (SEQ ID NO: 230 and SEQ ID NO: 255 of US20160369298; herein SEQ ID NO: 1686), KQDSGGDNIDIDQV (SEQ ID NO: 235 of US20160369298; herein SEQ ID NO: 1687), SDAGASN (SEQ ID NO: 236 of US20160369298; herein SEQ ID NO: 1688), YFLSRTNTEGGHDTQSTLRFSQAG (SEQ ID NO: 237 of US20160369298; herein SEQ ID NO: 1689), KEDGGGSDVAIDEV (SEQ ID NO: 240 of US20160369298; herein SEQ ID NO: 1690), SNAGASN (SEQ ID NO: 246 of US20160369298; herein SEQ ID NO: 1691), and YFLSRTNGEAGSATLSELRFSQPG (SEQ ID NO: 252 of US20160369298; herein SEQ ID NO: 1692). Non-limiting examples of nucleotide sequences that may encode the amino acid mutated sites include the following, AGCVVMDCAGGARSCASCAAC (SEQ ID NO: 97 of US20160369298; herein SEQ ID NO: 1693), AACRACRRSMRSMAGGCA (SEQ ID NO: 98 of US20160369298; herein SEQ ID NO: 1694), CACRRGGACRRCRMSRRSARSTTT (SEQ ID NO: 99 of US20160369298; herein SEQ ID NO: 1695), TATTTCTTGAGCAGAACAAACRVCVVSRSCGGAMNCVHSACGMHSTCAVVSCTTVDS TTTTCTCAGSBCRGSGCG (SEQ ID NO: 100 of US20160369298; herein SEQ ID NO: 1696), TCAAMAMMAVNSRVCSRSAACAACAACAGTRASTTCTCGTGGMMAGGA (SEQ ID NO: 101 of US20160369298; herein SEQ ID NO: 1697), AAGSAARRCRSCRVSRVARVCRATRYCGMSNHCRVMVRSGTC (SEQ ID NO: 102 of US20160369298; herein SEQ ID NO: 1698), CAGVVSVVSMRSRVCVNSGCAGCTDHCVVSRNSGTCVMSACA (SEQ ID NO: 103 of US20160369298; herein SEQ ID NO: 1699), AACTWCRVSVASMVSVHSDDTGTGSWSTKSACT (SEQ ID NO: 104 of US20160369298; herein SEQ ID NO: 1700), TTGTTGAACATCACCACGTGACGCACGTTC (SEQ ID NO: 256 of US20160369298; herein SEQ ID NO: 1701), TCCCCGTGGTTCTACTACATAATGTGGCCG (SEQ ID NO: 257 of US20160369298; herein SEQ ID NO: 1702), TTCCACACTCCGTTTTGGATAATGTTGAAC (SEQ ID NO: 258 of US20160369298; herein SEQ ID NO: 1703), AGGGACATCCCCAGCTCCATGCTGTGGTCG (SEQ ID NO: 259 of US20160369298; herein SEQ ID NO: 1704), AGGGACAACCCCTCCGACTCGCCCTAATCC (SEQ ID NO: 260 of US20160369298; herein SEQ ID NO: 1705), TCCTAGTAGAAGACACCCTCTCACTGCCCG (SEQ ID NO: 261 of US20160369298; herein SEQ ID NO: 1706), AGTACCATGTACACCCACTCTCCCAGTGCC (SEQ ID NO: 262 of US20160369298; herein SEQ ID NO: 1707), ATATGGACGTTCATGCTGATCACCATACCG (SEQ ID NO: 263 of US20160369298; herein SEQ ID NO: 1708), AGCAGGAGCTCCTTGGCCTCAGCGTGCGAG (SEQ ID NO: 264 of US20160369298; herein SEQ ID NO: 1709), ACAAGCAGCTTCACTATGACAACCACTGAC (SEQ ID NO: 265 of US20160369298; herein SEQ ID NO: 1710), CAGCCTAGGAACTGGCTTCCTGGACCCTGTTACCGCCAGCAGAGAGTCTCAAMAMM AVNSRVCSRSAACAACAACAGTRASTTCTCCTGGMMAGGAGCTACCAAGTACCACC TCAATGGCAGAGACTCTCTGGTGAATCCCGGACCAGCTATGGCAAGCCACRRGGAC RRCRMSRRSARSTTTTTTCCTCAGAGCGGGGTTCTCATCTTTGGGAAGSAARRCRSCR VSRVARVCRATRYCGMSNHCRVMVRSGTCATGATTACAGACGAAGAGGAGATCTGG AC (SEQ ID NO: 266 of US20160369298; herein SEQ ID NO: 1711), TGGGACAATGGCGGTCGTCTCTCAGAGTTKTKKT (SEQ ID NO: 267 of US20160369298; herein SEQ ID NO: 1712), AGAGGACCKKTCCTCGATGGTTCATGGTGGAGTTA (SEQ ID NO: 268 of US20160369298; herein SEQ ID NO: 1713), CCACTTAGGGCCTGGTCGATACCGTTCGGTG (SEQ ID NO: 269 of US20160369298; herein SEQ ID NO: 1714), and TCTCGCCCCAAGAGTAGAAACCCTTCSTTYYG (SEQ ID NO: 270 of US20160369298; herein SEQ ID NO: 1715).

[0092] In some embodiments, the AAV serotype may comprise an ocular cell targeting peptide as described in International Patent Publication WO2016134375, the contents of which are herein incorporated by reference in their entirety, such as, but not limited to SEQ ID NO: 9, and SEQ ID NO:10 of WO2016134375. Further, any of the ocular cell targeting peptides or amino acids described in WO2016134375, may be inserted into any parent AAV serotype, such as, but not limited to, AAV2 (SEQ ID NO:8 of WO2016134375; herein SEQ ID NO: 1716), or AAV9 (SEQ ID NO: 11 of WO2016134375; herein SEQ ID NO: 1717). In some embodiments, modifications, such as insertions are made in AAV2 proteins at P34-A35, T138-A139, A139-P140, G453-T454, N587-R588, and/or R588-Q589. In certain embodiments, insertions are made at D384, G385, 1560, T561, N562, E563, E564, E565, N704, and/or Y705 of AAV9. The ocular cell targeting peptide may be, but is not limited to, any of the following amino acid sequences, GSTPPPM (SEQ ID NO: 1 of WO2016134375; herein SEQ ID NO: 1718), or GETRAPL (SEQ ID NO: 4 of WO2016134375; herein SEQ ID NO: 1719).

[0093] In some embodiments, the AAV serotype may be modified as described in the U.S. Patent Application Publication No. US 20170145405, the contents of which are herein incorporated by reference in their entirety. AAV serotypes may include, modified AAV2 (e.g., modifications at Y444F, Y500F, Y730F and/or S662V), modified AAV3 (e.g., modifications at Y705F, Y731F and/or T492V), and modified AAV6 (e.g., modifications at S663V and/or T492V).

[0094] In some embodiments, the AAV serotype may be modified as described in the International Publication No. WO2017083722, the contents of which are herein incorporated by reference in their entirety. AAV serotypes may include, AAV1 (Y705+731F+T492V), AAV2 (Y444+500+730F+T491V), AAV3 (Y705+731F), AAV5, AAV 5(Y436+693+719F), AAV6 (VP3 variant Y705F/Y731F/T492V), AAV8 (Y733F), AAV9, AAV9 (VP3 variant Y731F), and AAV10 (Y733F).

[0095] In some embodiments, the AAV serotype may comprise, as described in International Patent Publication No. WO2017015102, the contents of which are herein incorporated by reference in their entirety, an engineered epitope comprising the amino acids SPAKFA (SEQ ID NO: 24 of WO2017015102; herein SEQ ID NO: 1720) or NKDKLN (SEQ ID NO:2 of WO2017015102; herein SEQ ID NO: 1721). The epitope may be inserted in the region of amino acids 665 to 670 based on the numbering of the VP1 capsid of AAV8 (SEQ ID NO: 3 of WO2017015102) and/or residues 664 to 668 of AAV3B (SEQ ID NO: 3).

[0096] In some embodiments, the AAV serotype may be, or may have a sequence as described in International Patent Publication No. WO2017058892, the contents of which are herein incorporated by reference in their entirety, such as, but not limited to, AAV variants with capsid proteins that may comprise a substitution at one or more (e.g., 2, 3, 4, 5, 6, or 7) of amino acid residues 262-268, 370-379, 451-459, 472-473, 493-500, 528-534, 547-552, 588-597, 709-710, 716-722 of AAV1, in any combination, or the equivalent amino acid residues in AAV2, AAV3, AAV4, AAV5, AAV6, AAV7, AAV8, AAV9, AAV10, AAV11, AAV12, AAVrh8, AAVrh10, AAVrh32.33, bovine AAV or avian AAV. The amino acid substitution may be, but is not limited to, any of the amino acid sequences described in WO2017058892. In some embodiments, the AAV may comprise an amino acid substitution at residues 256L, 258K, 259Q, 261S, 263A, 264S, 265T, 266G, 272H, 385S, 386Q, S472R, V473D, N500E 547S, 709A, 710N, 716D, 717N, 718N, 720L, A456T, Q457T, N458Q, K459S, T492S, K493A, S586R, S587G, S588N, T589R and/or 722T of AAV1 (SEQ ID NO: 1 of WO2017058892) in any combination, 244N, 246Q, 248R, 249E, 2501, 251K, 252S, 253G, 254S, 255V, 256D, 263Y, 377E, 378N, 453L, 456R, 532Q, 533P, 535N, 536P, 537G, 538T, 539T, 540A, 541T, 542Y, 543L, 546N, 653V, 654P, 656S, 697Q, 698F, 704D, 705S, 706T, 707G, 708E, 709Y and/or 710R of AAV5 (SEQ ID NO:5 of WO2017058892) in any combination, 248R, 316V, 317Q, 318D, 319S, 443N, 530N, 531S, 532Q 533P, 534A, 535N, 540A, 541 T, 542Y, 543L, 545G, 546N, 697Q, 704D, 706T, 708E, 709Y and/or 710R of AAV5 (SEQ ID NO: 5 of WO2017058892) in any combination, 264S, 266G, 269N, 272H, 457Q, 588S and/or 5891 of AAV6 (SEQ ID NO:6 WO2017058892) in any combination, 457T, 459N, 496G, 499N, 500N, 589Q, 590N and/or 592A of AAV8 (SEQ ID NO: 8 WO2017058892) in any combination, 451I, 452N, 453G, 454S, 455G, 456Q, 457N and/or 458Q of AAV9 (SEQ ID NO: 9 WO2017058892) in any combination.

[0097] In some embodiments, the AAV may include a sequence of amino acids at positions 155, 156 and 157 of VP1 or at positions 17, 18, 19 and 20 of VP2, as described in International Publication No. WO 2017066764, the contents of which are herein incorporated by reference in their entirety. The sequences of amino acid may be, but not limited to, N-S-S, S-X-S, S-S-Y, N-X-S, N-S-Y, S-X-Y and N-X-Y, where N, X and Y are, but not limited to, independently non-serine, or non-threonine amino acids, wherein the AAV may be, but not limited to AAV1, AAV2, AAV3, AAV4, AAV5, AAV6, AAV7, AAV8, AAV9, AAV10, AAV11 and AAV12. In some embodiments, the AAV may include a deletion of at least one amino acid at positions 156, 157 or 158 of VP1 or at positions 19, 20 or 21 of VP2, wherein the AAV may be, but not limited to AAV1, AAV2, AAV3, AAV4, AAV5, AAV6, AAV7, AAV8, AAV9, AAV10, AAV 11 and AAV12.

[0098] In some embodiments, the AAV may be a serotype generated by Cre-recombination-based AAV targeted evolution (CREATE) as described by Deverman et al., (Nature Biotechnology 34(2):204-209 (2016)), the contents of which are herein incorporated by reference in their entirety. In some embodiments, AAV serotypes generated in this manner have improved CNS transduction and/or neuronal and astrocytic tropism, as compared to other AAV serotypes. As non-limiting examples, the AAV serotype may include a peptide such as, but not limited to, PHP.B, PHP.B2, PHP.B3, PHP.A, PUPS, G2A12, G2A15, G2A3, G2B4, and G2B5. In some embodiments, these AAV serotypes may be AAV9 (SEQ ID NO: 9 or 136) derivatives with a 7-amino acid insert between amino acids 588-589. Non-limiting examples of these 7-amino acid inserts include TLAVPFK (PHP.B; SEQ ID NO: 1260), SVSKPFL (PHP.B2; SEQ ID NO: 1268), FTLTTPK (PHP.B3; SEQ ID NO: 1269), YTLSQGW (PHP.A; SEQ ID NO: 1275), QAVRTSL (PHP.S; SEQ ID NO: 1319), LAKERLS (G2A3; SEQ ID NO: 1320), MNSTKNV (G2B4; SEQ ID NO: 1321), and/or VSGGHHS (G2B5; SEQ ID NO: 1322).

[0099] In some embodiments, the AAV serotype may be as described in Jackson et al (Frontiers in Molecular Neuroscience 9:154 (2016)), the contents of which are herein incorporated by reference in their entirety.

[0100] In the DNA and RNA sequences referenced and/or described herein, the single letter symbol has the following description: A for adenine; C for cytosine; G for guanine; T for thymine; U for Uracil; W for weak bases such as adenine or thymine; S for strong nucleotides such as cytosine and guanine; M for amino nucleotides such as adenine and cytosine; K for keto nucleotides such as guanine and thymine; R for purines adenine and guanine; Y for pyrimidine cytosine and thymine; B for any base that is not A (e.g., cytosine, guanine, and thymine); D for any base that is not C (e.g., adenine, guanine, and thymine); H for any base that is not G (e.g., adenine, cytosine, and thymine); V for any base that is not T (e.g., adenine, cytosine, and guanine); N for any nucleotide (which is not a gap); and Z is for zero.

[0101] In any of the amino acid sequences referenced and/or described herein, the single letter symbol has the following description: G (Gly) for Glycine; A (Ala) for Alanine; L (Leu) for Leucine; M (Met) for Methionine; F (Phe) for Phenylalanine; W (Trp) for Tryptophan; K (Lys) for Lysine; Q (Gln) for Glutamine; E (Glu) for Glutamic Acid; S (Ser) for Serine; P (Pro) for Proline; V (Val) for Valine; I (Ile) for Isoleucine; C (Cys) for Cysteine; Y (Tyr) for Tyrosine; H (His) for Histidine; R (Arg) for Arginine; N (Asn) for Asparagine; D (Asp) for Aspartic Acid; T (Thr) for Threonine; B (Asx) for Aspartic acid or Asparagine; J (Xle) for Leucine or Isoleucine; O (Pyl) for Pyrrolysine; U (Sec) for Selenocysteine; X (Xaa) for any amino acid; and Z (Glx) for Glutamine or Glutamic acid.

[0102] In some embodiments, the AAV serotype is PHP.B or AAV9. In some embodiments, the AAV serotype is paired with a synapsin promoter to enhance neuronal transduction, as compared to when more ubiquitous promoters are used (i.e., CBA or CMV).

[0103] In some embodiments, the AAV serotype is a serotype comprising the AAVPHP.N (PHP.N) peptide, or a variant thereof.

[0104] In some embodiments the AAV serotypes is a serotype comprising the AAVPHP.B (PHP.B) peptide, or a variant thereof.

[0105] In some embodiments, the AAV serotype is a serotype comprising the AAVPHP.A (PHP.A) peptide, or a variant thereof.

[0106] In some embodiments, the AAV serotype is a serotype comprising the PHP.S peptide, or a variant thereof.

[0107] In some embodiments, the AAV serotype is a serotype comprising the PHP.B2 peptide, or a variant thereof.

[0108] In some embodiments, the AAV serotype is a serotype comprising the PHP.B3 peptide, or a variant thereof.

[0109] In some embodiments, the AAV serotype is a serotype comprising the G2B4 peptide, or a variant thereof.

[0110] In some embodiments, the AAV serotype is a serotype comprising the G2B5 peptide, or a variant thereof.

[0111] In some embodiments, the AAV serotype is VOY101, or a variant thereof. In one preferred embodiment, the VOY101 comprises the amino acid sequence of SEQ ID NO. 1. In another embodiment, the capsid sequence comprises the nucleic acid sequence of SEQ ID NO. 1809.

[0112] In some embodiments, the AAV serotype is VOY201, or a variant thereof. In one preferred embodiment, the VOY201 comprises the amino acid sequence of SEQ ID NO. 1823. In another embodiment, the capsid sequence comprises the nucleic acid sequence of SEQ ID NO. 1810.

[0113] In some embodiments, the AAV serotype is VOY701, or a variant thereof. In one preferred embodiment, the VOY701 comprises the nucleic acid sequence of SEQ ID NO. 1828.

[0114] In some embodiments, the AAV serotype is VOY701, or a variant thereof. In one preferred embodiment, the VOY701 comprises the amino acid sequence of SEQ ID NO. 1829.

[0115] In some embodiments, the AAV serotype is VOY801, or a variant thereof. In one preferred embodiment, the VOY801 comprises the nucleic acid sequence of SEQ ID NO. 1824.

[0116] In some embodiments, the AAV serotype is VOY1101, or a variant thereof. In one preferred embodiment, the VOY1101 comprises the nucleic acid sequence of SEQ ID NO. 1825.

[0117] In some embodiments the AAV capsid is one that allows for blood brain barrier penetration following intravenous administration. Non-limiting examples of such AAV capsids include VOY101, VOY201, VOY701, VOY801, VOY1101 or AAV capsids comprising a peptide insert such as, but not limited to, AAVPHP.N (PHP.N), AAVPHP.B (PHP.B), PHP.S, G2A3, G2B4, G2B5, G2A12, G2A15, PHP.B2, PHP.B3, and AAVPHP.A (PHP.A). In some embodiments, the blood brain barrier penetrating capsid is VOY101. In some embodiments, the blood brain barrier penetrating capsid is VOY201. In some embodiments, the blood brain barrier penetrating capsid is VOY701. In some embodiments, the blood brain barrier penetrating capsid is VOY801. In some embodiments, the blood brain barrier penetrating capsid is VOY1101. In some embodiments, the blood brain barrier penetrating capsid comprises the PHP.A peptide insert. In some embodiments, the blood brain barrier penetrating capsid comprises the PHP.B peptide insert. In some embodiments, the blood brain barrier penetrating capsid comprises the PHP.B2 peptide insert. In some embodiments, the blood brain barrier penetrating capsid comprises the PHP.B3 peptide insert. In some embodiments, the blood brain barrier penetrating capsid comprises the G2A3 peptide insert. In some embodiments, the blood brain barrier penetrating capsid comprises the G2B4 peptide insert. In some embodiments, the blood brain barrier penetrating capsid comprises the G2B5 peptide insert. In some embodiments, the blood brain barrier penetrating capsid comprises the PHP.N peptide insert. In some embodiments, the blood brain barrier penetrating capsid comprises the PHP.S peptide insert. In some embodiments, the blood brain barrier penetrating capsid comprises the PHP.B-EST peptide insert. In some embodiments, the blood brain barrier penetrating capsid comprises the PHP.B-DGT-T peptide insert. In some embodiments, the blood brain barrier penetrating capsid comprises the PHP.B-GGT peptide insert.

[0118] In some embodiments, the initiation codon for translation of the AAV VP1 capsid protein may be CTG, TTG, or GTG as described in U.S. Pat. No. 8,163,543, the contents of which are herein incorporated by reference in its entirety.

[0119] The present disclosure refers to structural capsid proteins (including VP1, VP2 and VP3) which are encoded by capsid (Cap) genes. These capsid proteins form an outer protein structural shell (i.e. capsid) of a viral vector such as AAV. VP capsid proteins synthesized from Cap polynucleotides generally include a methionine as the first amino acid in the peptide sequence (Met1), which is associated with the start codon (AUG or ATG) in the corresponding Cap nucleotide sequence. However, it is common for a first-methionine (Met1) residue or generally any first amino acid (AA1) to be cleaved off after or during polypeptide synthesis by protein processing enzymes such as Met-aminopeptidases. This “Met/AA-clipping” process often correlates with a corresponding acetylation of the second amino acid in the polypeptide sequence (e.g., alanine, valine, serine, threonine, etc.). Met-clipping commonly occurs with VP1 and VP3 capsid proteins but can also occur with VP2 capsid proteins.

[0120] Where the Met/AA-clipping is incomplete, a mixture of one or more (one, two or three) VP capsid proteins comprising the viral capsid may be produced, some of which may include a Met1/AA1 amino acid (Met+/AA+) and some of which may lack a Met1/AA1 amino acid as a result of Met/AA-clipping (Met−/AA−). For further discussion regarding Met/AA-clipping in capsid proteins, see Jin, et al. Direct Liquid Chromatography/Mass Spectrometry Analysis for Complete Characterization of Recombinant Adeno-Associated Virus Capsid Proteins. Hum Gene Ther Methods. 2017 Oct. 28(5):255-267; Hwang, et al. N-Terminal Acetylation of Cellular Proteins Creates Specific Degradation Signals. Science. 2010 Feb. 19. 327(5968): 973-977; the contents of which are each incorporated herein by reference in its entirety.

[0121] According to the present disclosure, references to capsid proteins is not limited to either clipped (Met−/AA−) or unclipped (Met+/AA+) and may, in context, refer to independent capsid proteins, viral capsids comprised of a mixture of capsid proteins, and/or polynucleotide sequences (or fragments thereof) which encode, describe, produce or result in capsid proteins of the present disclosure. A direct reference to a “capsid protein” or “capsid polypeptide” (such as VP1, VP2 or VP2) may also comprise VP capsid proteins which include a Met1/AA1 amino acid (Met+/AA+) as well as corresponding VP capsid proteins which lack the Met1/AA1 amino acid as a result of Met/AA-clipping (Met−/AA−).

[0122] Further according to the present disclosure, a reference to a specific SEQ ID NO: (whether a protein or nucleic acid) which comprises or encodes, respectively, one or more capsid proteins which include a Met1/AA1 amino acid (Met+/AA+) should be understood to teach the VP capsid proteins which lack the Met1/AA1 amino acid as upon review of the sequence, it is readily apparent any sequence which merely lacks the first listed amino acid (whether or not Met1/AA1).

[0123] As a non-limiting example, reference to a VP1 polypeptide sequence which is 736 amino acids in length and which includes a “Met1” amino acid (Met+) encoded by the AUG/ATG start codon may also be understood to teach a VP1 polypeptide sequence which is 735 amino acids in length and which does not include the “Met1” amino acid (Met−) of the 736 amino acid Met+ sequence. As a second non-limiting example, reference to a VP1 polypeptide sequence which is 736 amino acids in length and which includes an “AA1” amino acid (AA1+) encoded by any NNN initiator codon may also be understood to teach a VP1 polypeptide sequence which is 735 amino acids in length and which does not include the “AA1” amino acid (AA1-) of the 736 amino acid AA1+ sequence.

[0124] References to viral capsids formed from VP capsid proteins (such as reference to specific AAV capsid serotypes), can incorporate VP capsid proteins which include a Met1/AA1 amino acid (Met+/AA1+), corresponding VP capsid proteins which lack the Met1/AA1 amino acid as a result of Met/AA1-clipping (Met−/AA1−), and combinations thereof (Met+/AA1+ and Met−/AA1−).

[0125] As a non-limiting example, an AAV capsid serotype can include VP1 (Met+/AA1+), VP1 (Met−/AA1−), or a combination of VP1 (Met+/AA1+) and VP1 (Met−/AA1−). An AAV capsid serotype can also include VP3 (Met+/AA1+), VP3 (Met−/AA1−), or a combination of VP3 (Met+/AA1+) and VP3 (Met−/AA1−); and can also include similar optional combinations of VP2 (Met+/AA1) and VP2 (Met−/AA1−).

[0126] In some embodiments, the AAV capsid sequence may comprise an amino acid sequence with 50%, 51%, 52%, 53%, 54%, 55%, 56%, 57% 58%, 59% 60%, 61%, 62%, 63%, 64%, 65%, 66%, 67%, 68%, 69%, 70%, 71%, 72%, 73%, 74%, 75%, 76%, 77%, 78%, 79%, 80%, 81%, 82%, 83%, 84%, 85%, 86%, 87%, 88%, 89%, 90%, 91%, 92%, 93%, 94%, 95%, 96%, 97%, 98%, 99%, or 100% identity to any of the those described above.

[0127] In some embodiments, the AAV capsid sequence may be encoded by a nucleotide sequence with 50%, 51%, 52%, 53%, 54%, 55%, 56%, 57%, 58%, 59%, 60%, 61%, 62%, 63%, 64%, 65%, 66%, 67%, 68%, 69%, 70%, 71%, 72%, 73%, 74%, 75%, 76%, 77%, 78%, 79%, 80%, 81%, 82%, 83%, 84%, 85%, 86%, 87%, 88%, 89%, 90%, 91%, 92%, 93%, 94%, 95%, 96%, 97%, 98%, 99%, or 100% identity to any of those described above.

[0128] The AAV particles of the present disclosure may comprise an AAV capsid protein with a targeting peptide inserted into a parent sequence. The parent capsid or serotype may comprise or be derived from any natural or recombinant AAV serotype. As used herein, a “parent” sequence is a nucleotide or amino acid sequence into which a targeting sequence is inserted (i.e., nucleotide insertion into nucleic acid sequence or amino acid sequence insertion into amino acid sequence).

[0129] In some embodiments, the parent AAV capsid is AAV9 as given by SEQ ID NO: 135 or 136.

[0130] In some embodiments, the parent AAV capsid is a K449R variant of AAV9 as given by SEQ ID NO: 9, wherein the codon encoding a lysine (e.g., AAA or AAG) at position 449 in the amino acid sequence (nucleotides 1345-1347) is exchanged for one encoding an arginine (CGT, CGC, CGA, CGG, AGA, AGG). The K449R variant has the same function as wild-type AAV9.

[0131] In some embodiments, the parent AAV capsid sequence may comprise an amino acid sequence with 50%, 51%, 52%, 53%, 54%, 55%, 56%, 57% 58%, 59% 60%, 61%, 62%, 63%, 64%, 65%, 66%, 67%, 68%, 69%, 70%, 71%, 72%, 73%, 74%, 75%, 76%, 77%, 78%, 79%, 80%, 81%, 82%, 83%, 84%, 85%, 86%, 87%, 88%, 89%, 90%, 91%, 92%, 93%, 94%, 95%, 96%, 97%, 98%, 99%, or 100% identity to any of the those described above.

[0132] In some embodiments, the parent AAV capsid sequence may be encoded by a nucleotide sequence with 50%, 51%, 52%, 53%, 54% 55%, 56%, 57%, 58%, 59%, 60%, 61%, 62%, 63%, 64%, 65%, 66%, 67%, 68%, 69%, 70%, 71%, 72%, 73%, 74%, 75%, 76%, 77%, 78%, 79%, 80%, 81%, 82%, 83%, 84%, 85%, 86%, 87%, 88%, 89%, 90%, 91%, 92%, 93%, 94%, 95%, 96%, 97%, 98%, 99%, or 100% identity to any of those described above.

[0133] In some embodiments, a targeting peptide may comprise an amino acid sequence with 50%, 51%, 52%, 53%, 54%, 55%, 56%, 57%, 58%, 59%, 60%, 61%, 62%, 63%, 64%, 65%, 66%, 67%, 68%, 69%, 70%, 71%, 72%, 73%, 74%, 75%, 76%, 77%, 78%, 79%, 80%, 8100, 82%, 83%, 84%, 85%, 86%, 87%, 88%, 89%, 90%, 91%, 92%, 93%, 94%, 95%, 96%, 97%, 98%, 99%, or 100% identity to any of the those described above.

[0134] In some embodiments, a targeting peptide may be encoded by a nucleotide sequence with 50%, 51%, 52%, 53%, 54%, 55%, 56%, 57%, 58%, 59%, 60%, 61%, 62%, 63%, 64%, 65%, 66%, 67%, 68%, 69%, 70%, 71%, 72%, 73%, 74%, 75%, 76%, 77%, 78%, 79%, 80%, 81%, 82%, 83%, 84%, 85%, 86%, 87%, 88%, 89%, 90%, 91%, 92%, 93%, 94%, 95%, 96%, 97%, 98%, 99%, or 100% identity to any of those described above. In some embodiments, a targeting peptide may comprise 4 or more contiguous amino acids of any of the targeting peptides disclosed herein. In some embodiments, a targeting peptide may comprise 5 contiguous amino acids of any of the targeting peptides disclosed herein. In some embodiments, a targeting peptide may comprise 6 contiguous amino acids of any of the targeting peptides disclosed herein.

### Capsid Engineering

[0135] Recombinant or engineered AAV vectors have shown promise for use in therapy for the treatment of human disease. However, a need still exists for AAV particles with more specific and/or enhanced tropism for target tissues. Capsid engineering methods have been used to try to identify capsids with enhanced transduction of target tissues (e.g., brain, spinal cord, DRG). A variety of methods have been used, including mutational methods, DNA barcoding, directed evolution, random peptide insertions, and capsid shuffling and/or chimeras.

[0136] Rational engineering and mutational methods have been used to direct AAV to a target tissue. In rational design, structure-function relationships are used to determine regions in which changes to the capsid sequence may be made. As non-limiting examples, surface loop structures, receptor binding sites, and/or heparin binding sites may be mutated, or otherwise altered, for rational design of recombinant AAV capsids for enhanced targeting to a target tissue. In one example of rational design, AAV capsids were modified by mutation of surface exposed tyrosines to phenylalanine, in order to evade ubiquitination, reduce proteasomal degradation and allow for increased AAV particle and viral genome expression (Lochrie M A, et al, J Virol. 2006 January; 80(2):821-34; Santiago-Ortiz J L and Schaffer D V, J Control Release. 2016 Oct. 28; 240:287-301, the contents of each of which are incorporated by reference in their entirety). Rational design also encompasses the addition of targeting peptides to a parent AAV capsid sequence, wherein the targeting peptide may have an affinity for a receptor of interest within a target tissue.

[0137] In some embodiments, rational engineering and/or mutational methods are used to identify AAV capsids and/or targeting peptides having enhanced transduction of a target tissue (e.g., CNS or PNS).

[0138] Capsid shuffling, and/or chimeras describe a method in which fragments of at least two parent AAV capsids are combined to generate a new recombinant capsid protein. The number of parent AAV capsids used may be 2-20, or more than 20.

[0139] In some embodiments, capsid shuffling is used to identify AAV capsids and/or targeting peptides having enhanced transduction of a target tissue (e.g., CNS or PNS).

[0140] Directed evolution involves the generation of AAV capsid libraries (˜10⁴-10⁸) by any of a variety of mutagenesis techniques and selection of lead candidates based on response to selective pressure by properties of interest (e.g., tropism). Directed evolution of AAV capsids allows for positive selection from a pool of diverse mutants without necessitating extensive prior characterization of the mutant library. Directed evolution libraries may be generated by any molecular biology technique known in the art, and may include, DNA shuffling, random point mutagenesis, insertional mutagenesis (e.g., targeting peptides), random peptide insertions, or ancestral reconstructions. AAV capsid libraries may be subjected to more than one round of selection using directed evolution for further optimization. Directed evolution methods are most commonly used to identify AAV capsid proteins with enhanced transduction of a target tissue. Capsids with enhanced transduction of a target tissue have been identified for the targeting human airway epithelium, neural stem cells, human pluripotent stem cells, retinal cells, and other in vitro and in vivo cells.

[0141] In some embodiments directed evolution methods are used to identify AAV capsids and/or targeting peptides having enhanced transduction of a target tissue (e.g., CNS or PNS).

[0142] One method described for high-throughput characterization of the phenotypes of a large number of AAV serotypes is known as AAV Barcode-Seq (Adachi K et al, Nature Communications 5:3075 (2014), the contents of which are herein incorporated by reference in their entirety). In this next-generation sequence (NGS) based method, AAV libraries are created comprising DNA barcode tags, which can be assessed by multi-plexed Illumina barcode sequencing. Barcode design confers the ability to detect AAV presence and expression via DNA (biodistribution) and RNA (transduction) barcodes, respectively. This method can be used to identify AAV variants with altered receptor binding, tropism, neutralization and or blood clearance as compared to wild-type or non-variant sequences. Amino acids of the AAV capsid that are important to these functions can also be identified in this manner.

[0143] As described in Adachi et al 2014, AAV capsid libraries were generated, wherein each mutant carried a wild-type AAV2 rep gene and an AAV cap gene derived from a series of variants or mutants, and a pair of left and right 12-nucleotide long DNA bar-codes downstream of an AAV2 polyadenylation signal (pA). In this manner, 7 different DNA barcode AAV capsid libraries were generated. Capsid libraries were then provided to mice. At a pre-set timepoint, samples were collected, DNA extracted and PCR-amplified using AAV-clone specific virus bar codes and sample-specific bar code attached PCR primers. All the virus barcode PCR amplicons were Illumina sequenced and converted to raw sequence read number data by a computational algorithm. The core of the Barcode-Seq approach is a 96-nucleotide cassette comprising the two DNA bar-codes (left and right) described above, three PCR primer binding sites and two restriction enzyme sites. As an exemplar, an AAV rep-cap genome was used, but the system can be applied to any AAV viral genome, including one devoid of rep and cap genes. The advantage of the Barcode Seq method is the collection of a large data set and correlation to desirable phenotype with few replicates and in a short period of time.

[0144] The DNA Barcode Seq method can be similarly applied to RNA.

[0145] In some embodiments, the Barcode Seq method is used to identify AAV capsids and/or targeting peptides having enhanced transduction of a target tissue (e.g., CNS or PNS).

[0146] One method used to generate AAV particles with desirable transduction profiles, with enhanced targeting to CNS or PNS tissues after intravenous administration, is through the use of insertion of targeting peptides into a parent AAV capsid sequence.

### Targeting Peptides

[0147] Disclosed herein are targeting peptides and associated AAV particles comprising a capsid protein with one or more targeting peptide inserts, for enhanced or improved transduction of a target tissue (e.g., cells of the CNS or PNS).

[0148] In some embodiments, the targeting peptide may direct an AAV particle to a cell or tissue of the CNS. The cell of the CNS may be, but is not limited to, neurons (e.g., excitatory, inhibitory, motor, sensory, autonomic, sympathetic, parasympathetic, Purkinje, Betz, etc), glial cells (e.g., microglia, astrocytes, oligodendrocytes) and/or supporting cells of the brain such as immune cells (e.g., T cells). The tissue of the CNS may be, but is not limited to, the cortex (e.g, frontal, parietal, occipital, temporal), thalamus, hypothalamus, striatum, putamen, caudate nucleus, hippocampus, entorhinal cortex, basal ganglia, or deep cerebellar nuclei.

[0149] In some embodiments, the targeting peptide may direct an AAV particle to a cell or tissue of the PNS. The cell or tissue of the PNS may be, but is not limited to, a dorsal root ganglion (DRG).

[0150] The targeting peptide may direct an AAV particle to the CNS (e.g., the cortex) after intravenous administration.

[0151] The targeting peptide may direct an AAV particle to the PNS (e.g., DRG) after intravenous administration.

[0152] A targeting peptide may vary in length. In some embodiments, the targeting peptide is 3-20 amino acids in length. As non-limiting examples, the targeting peptide may be 3, 4, 5, 6, 7, 8, 9, 10, 11, 12, 13, 14, 15, 16, 17, 18, 19, 20 or 3-5, 3-8, 3-10, 3-12, 3-15, 3-18, 3-20, 5-10, 5-15, 5-20, 10-12, 10-15, 10-20, 12-20, or 15-20 amino acids in length.

[0153] Targeting peptides of the present disclosure may be identified and/or designed by any method known in the art. As a non-limiting example, the CREATE system as described in Deverman et al., (Nature Biotechnology 34(2):204-209 (2016)), Chan et al., (Nature Neuroscience 20(8):1172-1179 (2017)), and in International Patent Application Publication Nos. WO2015038958 and WO2017100671, the contents of each of which are herein incorporated by reference in their entirety, may be used as a means of identifying targeting peptides, in either mice or other research animals, such as, but not limited to, non-human primates.

[0154] Targeting peptides and associated AAV particles may be identified from libraries of AAV capsids comprised of targeting peptide variants. In some embodiments, the targeting peptides may be 7 amino acid sequences (7-mers). In another embodiment, the targeting peptides may be 9 amino acid sequences (9-mers). The targeting peptides may also differ in their method of creation or design, with non-limiting examples including, random peptide selection, site saturation mutagenesis, and/or optimization of a particular region of the peptide (e.g., flanking regions or central core).

[0155] In some embodiments, a targeting peptide library comprises targeting peptides of 7 amino acids (7-mer) in length randomly generated by PCR.

[0156] In some embodiments, a targeting peptide library comprises targeting peptides with 3 mutated amino acids. In some embodiments, these 3 mutated amino acids are consecutive amino acids. In another embodiment, these 3 mutated amino acids are not consecutive amino acids. In some embodiments, the parent targeting peptide is a 7-mer. In another embodiment, the parent peptide is a 9-mer.

[0157] In some embodiments, a targeting peptide library comprises 7-mer targeting peptides, wherein the amino acids of the targeting peptide and/or the flanking sequences are evolved through site saturation mutagenesis of 3 consecutive amino acids. In some embodiments, NNK (N=any base; K=G or T) codons are used to generate the site saturated mutation sequences.

[0158] One or more targeting peptides may be inserted into a parent AAV capsid sequence to generate the AAV particles of the disclosure.

[0159] Targeting peptides may be inserted into a parent AAV capsid sequence in any location that results in fully functional AAV particles. The targeting peptide may be inserted in VP1, VP2 and/or VP3. Numbering of the amino acid residues differs across AAV serotypes, and so the exact amino acid position of the targeting peptide insertion may not be critical. As used herein, amino acid positions of the parent AAV capsid sequence are described using AAV9 (SEQ ID NO: 136) as reference.

[0160] In some embodiments, the targeting peptides are inserted in a hypervariable region of the AAV capsid sequence. Non-limiting examples of such hypervariable regions include Loop IV and Loop VIII of the parent AAV capsid. While not wishing to be bound by theory, these surface exposed loops are unstructured and poorly conserved, making them ideal regions for insertion of targeting peptides.

[0161] In some embodiments, the targeting peptide is inserted into Loop IV. In another embodiment, the targeting peptide is used to replace a portion, or all of Loop IV. As a non-limiting example, addition of the targeting peptide to the parent AAV capsid sequence may result in the replacement or mutation of at least one amino acid of the parent AAV capsid.

[0162] In some embodiments, the targeting peptide is inserted into Loop VIII. In another embodiment, the targeting peptide is used to replace a portion, or all of Loop VIII. As a non-limiting example, addition of the targeting peptide to the parent AAV capsid sequence may result in the replacement or mutation of at least one amino acid of the parent AAV capsid.

[0163] In some embodiments, more than one targeting peptide is inserted into a parent AAV capsid sequence. As a non-limiting example, targeting peptides may be inserted at both Loop IV and Loop VIII in the same parent AAV capsid sequence.

[0164] Targeting peptides may be inserted at any amino acid position of the parent AAV capsid sequence, such as, but not limited to, between amino acids at positions 586-592, 588-589, 586-589, 452-458, 262-269, 464-473, 491-495, 546-557 and/or 659-668.

[0165] In a preferred embodiment, the targeting peptides are inserted into a parent AAV capsid sequence between amino acids at positions 588 and 589 (Loop VIII). In some embodiments, the parent AAV capsid is AAV9 (SEQ ID NO: 136). In a second embodiment, the parent AAV capsid is K449R AAV9 (SEQ ID NO: 9).

[0166] The targeting peptides described herein may increase the transduction of the AAV particles of the disclosure to a target tissue as compared to the parent AAV particle lacking a targeting peptide insert. In some embodiments, the targeting peptide increases the transduction of an AAV particle to a target tissue by at least about 5%, 10%, 15%, 20%, 25%, 30%, 35%, 40%, 45%, 50%, 55%, 60%, 65%, 70%, 75%, 80%, 85%, 90%, 95%, 100%, 125%, 150%, 200%, 300%, 400%, 500%, or more as compared to a parent AAV particle lacking a targeting peptide insert.

[0167] In some embodiments, the targeting peptide increases the transduction of an AAV particle to a cell or tissue of the CNS by at least about 5%, 10%, 15%, 20%, 25%, 30%, 35%, 40%, 45%, 50%, 55%, 60%, 65%, 70%, 75%, 80%, 85%, 90%, 95%, 100%, 125%, 150%, 200%, 300%, 400%, 500%, or more as compared to a parent AAV particle lacking a targeting peptide insert.

[0168] In some embodiments, the targeting peptide increases the transduction of an AAV particle to a cell or tissue of the PNS by at least about 5%, 10%, 15%, 20%, 25%, 30%, 35%, 40%, 45%, 50%, 55%, 60%, 65%, 70%, 75%, 80%, 85%, 90%, 95%, 100%, 125%, 150%, 200%, 300%, 400%, 500%, or more as compared to a parent AAV particle lacking a targeting peptide insert.

[0169] In some embodiments, the targeting peptide increases the transduction of an AAV particle to a cell or tissue of the DRG by at least about 5%, 10%, 15%, 20%, 25%, 30%, 35%, 40%, 45%, 50%, 55%, 60%, 65%, 70%, 75%, 80%, 85%, 90%, 95%, 100%, 125%, 150%, 200%, 300%, 400%, 500%, or more as compared to a parent AAV particle lacking a targeting peptide insert.

### Viral Genome of the AAV Particle

[0170] AAV particles of the disclosure may be used for the delivery of any viral genome to a target tissue (e.g., CNS and/or DRG). In some embodiments, AAV particles of the disclosure comprise a targeting sequence. The viral genome may encode any payload, such as, but not limited to, a polypeptide, an antibody, an enzyme, an RNAi agent and/or components of a gene editing system. In some embodiments, the AAV particles of the disclosure are used to deliver a payload to cells of the CNS, after intravenous delivery. In another embodiment, the AAV particles of the disclosure are used to deliver a payload to cells of the DRG, after intravenous delivery.

[0171] A viral genome of an AAV particle of the disclosure, comprises a nucleic acid sequence with at least one payload region encoding a payload, and at least one ITR. A viral genome typically comprises two ITR sequences, one at each of the 5′ and 3′ ends. Further, a viral genome of the AAV particles of the disclosure may comprise nucleic acid sequences for additional components, such as, but not limited to, a regulatory element (e.g., promoter), untranslated regions (UTR), a polyadenylation sequence (polyA), a filler or stuffer sequence, an intron, and/or a linker sequence for enhanced expression.

[0172] These viral genome components can be selected and/or engineered to further tailor the specificity and efficiency of expression of a given payload in a target tissue (e.g., CNS or DRG).

### Viral Genome Component: Inverted Terminal Repeats (ITRs)

[0173] The AAV particles of the present disclosure comprise a viral genome with at least one ITR region and a payload region. In some embodiments, the viral genome has two ITRs. These two ITRs flank the payload region at the 5′ and 3′ ends. The ITRs function as origins of replication comprising recognition sites for replication. ITRs comprise sequence regions which can be complementary and symmetrically arranged. ITRs incorporated into viral genomes of the AAV particles described herein may be comprised of naturally occurring polynucleotide sequences or recombinantly derived polynucleotide sequences.

[0174] The ITRs may be derived from the same serotype as the capsid, selected from any of the serotypes listed in Table 1, or a derivative thereof. The ITR may be of a different serotype than the capsid. In some embodiments, the AAV particle has more than one ITR. In a non-limiting example, the AAV particle has a viral genome comprising two ITRs. In some embodiments, the ITRs are of the same serotype as one another. In another embodiment, the ITRs are of different serotypes. Non-limiting examples include zero, one or both of the ITRs having the same serotype as the capsid. In some embodiments both ITRs of the viral genome of the AAV particle are AAV2 ITRs.

[0175] Independently, each ITR may be about 100 to about 150 nucleotides in length. An ITR may be about 100-105 nucleotides in length, 106-110 nucleotides in length, 111-115 nucleotides in length, 116-120 nucleotides in length, 121-125 nucleotides in length, 126-130 nucleotides in length, 131-135 nucleotides in length, 136-140 nucleotides in length, 141-145 nucleotides in length or 146-150 nucleotides in length. In some embodiments, the ITRs are 140-142 nucleotides in length. Non-limiting examples of ITR length are 102, 105, 130, 140, 141, 142, 145 nucleotides in length, and those having at least at least 90% identity thereto, or 95% identity thereto, or at least 98% identity thereto, or at least 99% identity thereto.

### Viral Genome Component: Promoters

[0176] In some embodiments, the payload region of the viral genome comprises at least one element to enhance the transgene target specificity and expression (See e.g., Powell et al. Viral Expression Cassette Elements to Enhance Transgene Target Specificity and Expression in Gene Therapy, 2015; the contents of which are herein incorporated by reference in their entirety). Non-limiting examples of elements to enhance the transgene target specificity and expression include promoters, endogenous miRNAs, post-transcriptional regulatory elements (PREs), polyadenylation (PolyA) signal sequences and upstream enhancers (USEs), CMV enhancers and introns.

[0177] A person skilled in the art may recognize that expression of the polypeptides described herein in a target cell may require a specific promoter, including but not limited to, a promoter that is species specific, inducible, tissue-specific, or cell cycle-specific (Parr et al., Nat. Med. 3:1145-9 (1997); the contents of which are herein incorporated by reference in their entirety).

[0178] In some embodiments, the promoter is deemed to be efficient when it drives expression of the polypeptide(s) encoded in the payload region of the viral genome of the AAV particle.

[0179] In some embodiments, the promoter is a promoter deemed to be efficient when it drives expression in the cell being targeted.

[0180] In some embodiments, the promoter is a promoter having a tropism for the cell being targeted.

[0181] In some embodiments, the promoter drives expression of the payload for a period of time in targeted tissues. Expression driven by a promoter may be for a period of 1 hour, 2, hours, 3 hours, 4 hours, 5 hours, 6 hours, 7 hours, 8 hours, 9 hours, 10 hours, 11 hours, 12 hours, 13 hours, 14 hours, 15 hours, 16 hours, 17 hours, 18 hours, 19 hours, 20 hours, 21 hours, 22 hours, 23 hours, 1 day, 2 days, 3 days, 4 days, 5 days, 6 days, 1 week, 8 days, 9 days, 10 days, 11 days, 12 days, 13 days, 2 weeks, 15 days, 16 days, 17 days, 18 days, 19 days, 20 days, 3 weeks, 22 days, 23 days, 24 days, 25 days, 26 days, 27 days, 28 days, 29 days, 30 days, 31 days, 1 month, 2 months, 3 months, 4 months, 5 months, 6 months, 7 months, 8 months, 9 months, 10 months, 11 months, 1 year, 13 months, 14 months, 15 months, 16 months, 17 months, 18 months, 19 months, 20 months, 21 months, 22 months, 23 months, 2 years, 3 years, 4 years, 5 years, 6 years, 7 years, 8 years, 9 years, 10 years or more than 10 years. Expression may be for 1-5 hours, 1-12 hours, 1-2 days, 1-5 days, 1-2 weeks, 1-3 weeks, 1-4 weeks, 1-2 months, 1-4 months, 1-6 months, 2-6 months, 3-6 months, 3-9 months, 4-8 months, 6-12 months, 1-2 years, 1-5 years, 2-5 years, 3-6 years, 3-8 years, 4-8 years or 5-10 years. As a non-limiting example, the promoter is a weak promoter for sustained expression of a payload in nervous tissues.

[0182] In some embodiments, the promoter drives expression of the polypeptides described herein for at least 1 month, 2 months, 3 months, 4 months, 5 months, 6 months, 7 months, 8 months, 9 months, 10 months, 11 months, 1 year, 2 years, 3 years 4 years, 5 years, 6 years, 7 years, 8 years, 9 years, 10 years, 11 years, 12 years, 13 years, 14 years, 15 years, 16 years, 17 years, 18 years, 19 years, 20 years, 21 years, 22 years, 23 years, 24 years, 25 years, 26 years, 27 years, 28 years, 29 years, 30 years, 31 years, 32 years, 33 years, 34 years, 35 years, 36 years, 37 years, 38 years, 39 years, 40 years, 41 years, 42 years, 43 years, 44 years, 45 years, 46 years, 47 years, 48 years, 49 years, 50 years, 55 years, 60 years, 65 years, or more than 65 years.

[0183] Promoters may be naturally occurring or non-naturally occurring. Non-limiting examples of promoters include viral promoters, plant promoters and mammalian promoters. In some embodiments, the promoters may be human promoters. In some embodiments, the promoter may be truncated or mutated.

[0184] Promoters which drive or promote expression in most tissues include, but are not limited to, human elongation factor 1α-subunit (EF1α), cytomegalovirus (CMV) immediate-early enhancer and/or promoter, chicken β-actin (CBA) and its derivative CAG, R glucuronidase (GUSB), or ubiquitin C (UBC). Tissue-specific expression elements can be used to restrict expression to certain cell types such as, but not limited to, muscle specific promoters, B cell promoters, monocyte promoters, leukocyte promoters, macrophage promoters, pancreatic acinar cell promoters, endothelial cell promoters, lung tissue promoters, astrocyte promoters, or nervous system promoters which can be used to restrict expression to neurons or subtypes of neurons, astrocytes, or oligodendrocytes.

[0185] Non-limiting examples of muscle-specific promoters include mammalian muscle creatine kinase (MCK) promoter, mammalian desmin (DES) promoter, mammalian troponin I (TNNI2) promoter, and mammalian skeletal alpha-actin (ASKA) promoter (see, e.g. U.S. Patent Application Publication No. US 20110212529, the contents of which are herein incorporated by reference in their entirety)

[0186] Non-limiting examples of tissue-specific expression elements for neurons include neuron-specific enolase (NSE), platelet-derived growth factor (PDGF), platelet-derived growth factor B-chain (PDGF-β), synapsin (Syn), methyl-CpG binding protein 2 (MeCP2), Ca²⁺/calmodulin-dependent protein kinase II (CaMKII), metabotropic glutamate receptor 2 (mGluR2), neurofilament light (NFL) or heavy (NFH), β-globin minigene nβ2, preproenkephalin (PPE), enkephalin (Enk) and excitatory amino acid transporter 2 (EAAT2) promoters. Non-limiting examples of tissue-specific expression elements for astrocytes include glial fibrillary acidic protein (GFAP) and EAAT2 promoters. A non-limiting example of a tissue-specific expression element for oligodendrocytes includes the myelin basic protein (MBP) promoter.

[0187] In some embodiments, the promoter may be less than 1 kb. The promoter may have a length of 200, 210, 220, 230, 240, 250, 260, 270, 280, 290, 300, 310, 320, 330, 340, 350, 360, 370, 380, 390, 400, 410, 420, 430, 440, 450, 460, 470, 480, 490, 500, 510, 520, 530, 540, 550, 560, 570, 580, 590, 600, 610, 620, 630, 640, 650, 660, 670, 680, 690, 700, 710, 720, 730, 740, 750, 760, 770, 780, 790, 800 or more than 800 nucleotides. The promoter may have a length between 200-300, 200-400, 200-500, 200-600, 200-700, 200-800, 300-400, 300-500, 300-600, 300-700, 300-800, 400-500, 400-600, 400-700, 400-800, 500-600, 500-700, 500-800, 600-700, 600-800 or 700-800 nucleotides.

[0188] In some embodiments, the promoter may be a combination of two or more components of the same or different starting or parental promoters such as, but not limited to, CMV and CBA. Each component may have a length of 200, 210, 220, 230, 240, 250, 260, 270, 280, 290, 300, 310, 320, 330, 340, 350, 360, 370, 380, 381, 382, 383, 384, 385, 386, 387, 388, 389, 390, 400, 410, 420, 430, 440, 450, 460, 470, 480, 490, 500, 510, 520, 530, 540, 550, 560, 570, 580, 590, 600, 610, 620, 630, 640, 650, 660, 670, 680, 690, 700, 710, 720, 730, 740, 750, 760, 770, 780, 790, 800 or more than 800 nucleotides. Each component may have a length between 200-300, 200-400, 200-500, 200-600, 200-700, 200-800, 300-400, 300-500, 300-600, 300-700, 300-800, 400-500, 400-600, 400-700, 400-800, 500-600, 500-700, 500-800, 600-700, 600-800 or 700-800 nucleotides. In some embodiments, the promoter is a combination of a 382 nucleotide CMV-enhancer sequence and a 260 nucleotide CBA-promoter sequence.

[0189] In some embodiments, the viral genome comprises a ubiquitous promoter. Non-limiting examples of ubiquitous promoters include CMV, CBA (including derivatives CAG, CBh, etc.), EF-1α, PGK, UBC, GUSB (hGBp), and UCOE (promoter of HNRPA2B1-CBX3).

[0190] Yu et al. (Molecular Pain 2011, 7:63; the contents of which are herein incorporated by reference in their entirety) evaluated the expression of eGFP under the CAG, EFIα, PGK and UBC promoters in rat DRG cells and primary DRG cells using lentiviral vectors and found that UBC showed weaker expression than the other 3 promoters and only 10-12% glial expression was seen for all promoters. Soderblom et al. (E. Neuro 2015, 2(2): ENEURO.0001-15; the contents of which are herein incorporated by reference in their entirety) evaluated the expression of eGFP in AAV8 with CMV and UBC promoters and AAV2 with the CMV promoter after injection in the motor cortex. Intranasal administration of a plasmid containing a UBC or EFIα promoter showed a sustained airway expression greater than the expression with the CMV promoter (See e.g., Gill et al., Gene Therapy 2001, Vol. 8, 1539-1546; the contents of which are herein incorporated by reference in their entirety). Husain et al. (Gene Therapy 2009, 16(7): 927-932; the contents of which are herein incorporated by reference in their entirety) evaluated an HβH construct with an hGUSB promoter, a HSV-1LAT promoter and an NSE promoter and found that the HβH construct showed weaker expression than NSE in mouse brain. Passini and Wolfe (J. Virol. 2001, 12382-12392, the contents of which are herein incorporated by reference in their entirety) evaluated the long term effects of the HβH vector following an intraventricular injection in neonatal mice and found that there was sustained expression for at least 1 year. Low expression in all brain regions was found by Xu et al. (Gene Therapy 2001, 8, 1323-1332; the contents of which are herein incorporated by reference in their entirety) when NFL and NFH promoters were used as compared to the CMV-lacZ, CMV-luc, EF, GFAP, hENK, nAChR, PPE, PPE+wpre, NSE (0.3 kb), NSE (1.8 kb) and NSE (1.8 kb+wpre). Xu et al. found that the promoter activity in descending order was NSE (1.8 kb), EF, NSE (0.3 kb), GFAP, CMV, hENK, PPE, NFL and NFH. NFL is a 650 nucleotide promoter and NFH is a 920 nucleotide promoter which are both absent in the liver but NFH is abundant in the sensory proprioceptive neurons, brain and spinal cord and NFH is present in the heart. SCN8A is a 470 nucleotide promoter which expresses throughout the DRG, spinal cord and brain with particularly high expression seen in the hippocampal neurons and cerebellar Purkinje cells, cortex, thalamus and hypothalamus (See e.g., Drews et al. Identification of evolutionary conserved, functional noncoding elements in the promoter region of the sodium channel gene SCN8A, Mamm Genome (2007) 18:723-731; and Raymond et al. Expression of Alternatively Spliced Sodium Channel α-subunit genes, Journal of Biological Chemistry (2004) 279(44) 46234-46241; the contents of each of which are herein incorporated by reference in their entirety).

[0191] Any of the promoters taught by the aforementioned Yu, Soderblom, Gill, Husain, Passini, Xu, Drews or Raymond may be used in the AAV particles or viral genomes described herein.

[0192] In some embodiments, the promoter is not cell specific.

[0193] In some embodiments, the promoter is an ubiquitin c (UBC) promoter. The UBC promoter may have a size of 300-350 nucleotides. As a non-limiting example, the UBC promoter is 332 nucleotides in length.

[0194] In some embodiments, the promoter is a β-glucuronidase (GUSB) promoter. The GUSB promoter may have a size of 350-400 nucleotides. As a non-limiting example, the GUSB promoter is 378 nucleotides in length.

[0195] In some embodiments, the promoter is a neurofilament light (NFL) promoter. The NFL promoter may have a size of 600-700 nucleotides. As a non-limiting example, the NFL promoter is 650 nucleotides in length.

[0196] In some embodiments, the promoter is a neurofilament heavy (NFH) promoter. The NFH promoter may have a size of 900-950 nucleotides. As a non-limiting example, the NFH promoter is 920 nucleotides in length.

[0197] In some embodiments, the promoter is a SCN8A promoter. The SCN8A promoter may have a size of 450-500 nucleotides. As a non-limiting example, the SCN8A promoter is 470 nucleotides in length.

[0198] In some embodiments, the promoter is a frataxin (FXN) promoter.

[0199] In some embodiments, the promoter is a phosphoglycerate kinase 1 (PGK) promoter.

[0200] In some embodiments, the promoter is a chicken β-actin (CBA) promoter.

[0201] In some embodiments, the promoter is a cytomegalovirus (CMV) promoter.

[0202] In some embodiments, the promoter is a H1 promoter.

[0203] In some embodiments, the promoter is an engineered promoter.

[0204] In some embodiments, the promoter is a liver or a skeletal muscle promoter. Non-limiting examples of liver promoters include human α-1-antitrypsin (hAAT) and thyroxine binding globulin (TBG). Non-limiting examples of skeletal muscle promoters include Desmin, MCK or synthetic C5-12.

[0205] In some embodiments, the promoter is a RNA pol III promoter. As a non-limiting example, the RNA pol III promoter is U6. As a non-limiting example, the RNA pol III promoter is H1.

[0206] In some embodiments, the promoter is a cardiomyocyte-specific promoter. Non-limiting examples of cardiomyocyte-specific promoters include αMHC, cTnT, and CMV-MLC2k.

[0207] In some embodiments, the viral genome comprises two promoters. As a non-limiting example, the promoters are an EF1α promoter and a CMV promoter.

[0208] In some embodiments, the viral genome comprises an enhancer element, a promoter and/or a 5′UTR intron. The enhancer element, also referred to herein as an “enhancer,” may be, but is not limited to, a CMV enhancer, the promoter may be, but is not limited to, a CMV, CBA, UBC, GUSB, NSE, Synapsin, MeCP2, and GFAP promoter and the 5′UTR/intron may be, but is not limited to, SV40, and CBA-MVM. As a non-limiting example, the enhancer, promoter and/or intron used in combination may be: (1) CMV enhancer, CMV promoter, SV40 5′UTR intron; (2) CMV enhancer, CBA promoter, SV 40 5′UTR intron; (3) CMV enhancer, CBA promoter, CBA-MVM 5′UTR intron; (4) UBC promoter; (5) GUSB promoter; (6) NSE promoter; (7) Synapsin promoter; (8) MeCP2 promoter and (9) GFAP promoter.

[0209] In some embodiments, the viral genome comprises an engineered promoter.

[0210] In another embodiment, the viral genome comprises a promoter from a naturally expressed protein.

### Viral Genome Component: Untranslated Regions (UTRs)

[0211] By definition, wild type untranslated regions (UTRs) of a gene are transcribed but not translated. Generally, the 5′ UTR starts at the transcription start site and ends at the start codon and the 3′ UTR starts immediately following the stop codon and continues until the termination signal for transcription.

[0212] Features typically found in abundantly expressed genes of specific target organs may be engineered into UTRs to enhance the stability and protein production. As a non-limiting example, a 5′ UTR from mRNA normally expressed in the liver (e.g., albumin, serum amyloid A, Apolipoprotein A/B/E, transferrin, alpha fetoprotein, erythropoietin, or Factor VIII) may be used in the viral genomes of the AAV particles of the disclosure to enhance expression in hepatic cell lines or liver.

[0213] While not wishing to be bound by theory, wild-type 5′ untranslated regions (UTRs) include features which play roles in translation initiation. Kozak sequences, which are commonly known to be involved in the process by which the ribosome initiates translation of many genes, are usually included in 5′ UTRs. Kozak sequences have the consensus CCR(A/G)CCAUGG, where R is a purine (adenine or guanine) three bases upstream of the start codon (ATG), which is followed by another ‘G’.

[0214] In some embodiments, the 5′UTR in the viral genome includes a Kozak sequence.

[0215] In some embodiments, the 5′UTR in the viral genome does not include a Kozak sequence.

[0216] While not wishing to be bound by theory, wild-type 3′ UTRs are known to have stretches of Adenosines and Uridines embedded therein. These AU rich signatures are particularly prevalent in genes with high rates of turnover. Based on their sequence features and functional properties, the AU rich elements (AREs) can be separated into three classes (Chen et al, 1995, the contents of which are herein incorporated by reference in its entirety): Class I AREs, such as, but not limited to, c-Myc and MyoD, contain several dispersed copies of an AUUUA motif within U-rich regions. Class II AREs, such as, but not limited to, GM-CSF and TNF-α, possess two or more overlapping UUAUUUA(U/A)(U/A) nonamers. Class III ARES, such as, but not limited to, c-Jun and Myogenin, are less well defined. These U rich regions do not contain an AUUUA motif. Most proteins binding to the AREs are known to destabilize the messenger, whereas members of the ELAV family, most notably HuR, have been documented to increase the stability of mRNA. HuR binds to AREs of all the three classes. Engineering the HuR specific binding sites into the 3′ UTR of nucleic acid molecules will lead to HuR binding and thus, stabilization of the message in vivo.

[0217] Introduction, removal or modification of 3′ UTR AU rich elements (AREs) can be used to modulate the stability of polynucleotides. When engineering specific polynucleotides, e.g., payload regions of viral genomes, one or more copies of an ARE can be introduced to make polynucleotides less stable and thereby curtail translation and decrease production of the resultant protein. Likewise, AREs can be identified and removed or mutated to increase the intracellular stability and thus increase translation and production of the resultant protein.

[0218] In some embodiments, the 3′ UTR of the viral genome may include an oligo(dT) sequence for templated addition of a poly-A tail.

[0219] In some embodiments, the viral genome may include at least one miRNA seed, binding site or full sequence. microRNAs (or miRNA or miR) are 19-25 nucleotide noncoding RNAs that bind to the sites of nucleic acid targets and down-regulate gene expression either by reducing nucleic acid molecule stability or by inhibiting translation. A microRNA sequence comprises a “seed” region, i.e., a sequence in the region of positions 2-8 of the mature microRNA, which sequence has perfect Watson-Crick complementarity to the miRNA target sequence of the nucleic acid.

[0220] In some embodiments, the viral genome may be engineered to include, alter or remove at least one miRNA binding site, full sequence or seed region.

[0221] Any UTR from any gene known in the art may be incorporated into the viral genome of the AAV particle. These UTRs, or portions thereof, may be placed in the same orientation as in the gene from which they were selected or they may be altered in orientation or location. In some embodiments, the UTR used in the viral genome of the AAV particle may be inverted, shortened, lengthened, made with one or more other 5′ UTRs or 3′ UTRs known in the art. As used herein, the term “altered” as it relates to a UTR, means that the UTR has been changed in some way in relation to a reference sequence. For example, a 3′ or 5′ UTR may be altered relative to a wild type or native UTR by the change in orientation or location as taught above or may be altered by the inclusion of additional nucleotides, deletion of nucleotides, swapping or transposition of nucleotides.

[0222] In some embodiments, the viral genome of the AAV particle comprises at least one artificial UTR which is not a variant of a wild type UTR.

[0223] In some embodiments, the viral genome of the AAV particle comprises UTRs which have been selected from a family of transcripts whose proteins share a common function, structure, feature or property.

### Viral Genome Component: Polyadenylation Sequence

[0224] In some embodiments, the viral genome of the AAV particles of the present disclosure comprise at least one polyadenylation sequence. The viral genome of the AAV particle may comprise a polyadenylation sequence between the 3′ end of the payload coding sequence and the 5′ end of the 3′ITR.

[0225] In some embodiments, the polyadenylation sequence or “polyA sequence” may range from absent to about 500 nucleotides in length. The polyadenylation sequence may be, but is not limited to, 1, 2, 3, 4, 5, 6, 7, 8, 9, 10, 11, 12, 13, 14, 15, 16, 17, 18, 19, 20, 21, 22, 23, 24, 25, 26, 27, 28, 29, 30, 31, 32, 33, 34, 35, 36, 37, 38, 39, 40, 41, 42, 43, 44, 45, 46, 47, 48, 49, 50, 51, 52, 53, 54, 55, 56, 57, 58, 59, 60, 61, 62, 63, 64, 65, 66, 67, 68, 69, 70, 71, 72, 73, 74, 75, 76, 77, 78, 79, 80, 81, 82, 83, 84, 85, 86, 87, 88, 89, 90, 91, 92, 93, 94, 95, 96, 97, 98, 99, 100, 101, 102, 103, 104, 105, 106, 107, 108, 109, 110, 111, 112, 113, 114, 115, 116, 117, 118, 119, 120, 121, 122, 123, 124, 125, 126, 127, 128, 129, 130, 131, 132, 133, 134, 135, 136, 137, 138, 139, 140, 141, 142, 143, 144, 145, 146, 147, 148, 149, 150, 151, 152, 153, 154, 155, 156, 157, 158, 159, 160, 161, 162, 163, 164, 165, 166, 167, 168, 169, 170, 171, 172, 173, 174, 175, 176, 177, 178, 179, 180, 181, 182, 183, 184, 185, 186, 187, 188, 189, 190, 191, 192, 193, 194, 195, 196, 197, 198, 199, 200, 201, 202, 203, 204, 205, 206, 207, 208, 209, 210, 211, 212, 213, 214, 215, 216, 217, 218, 219, 220, 221, 222, 223, 224, 225, 226, 227, 228, 229, 230, 231, 232, 233, 234, 235, 236, 237, 238, 239, 240, 241, 242, 243, 244, 245, 246, 247, 248, 249, 250, 251, 252, 253, 254, 255, 256, 257, 258, 259, 260, 261, 262, 263, 264, 265, 266, 267, 268, 269, 270, 271, 272, 273, 274, 275, 276, 277, 278, 279, 280, 281, 282, 283, 284, 285, 286, 287, 288, 289, 290, 291, 292, 293, 294, 295, 296, 297, 298, 299, 300, 301, 302, 303, 304, 305, 306, 307, 308, 309, 310, 311, 312, 313, 314, 315, 316, 317, 318, 319, 320, 321, 322, 323, 324, 325, 326, 327, 328, 329, 330, 331, 332, 333, 334, 335, 336, 337, 338, 339, 340, 341, 342, 343, 344, 345, 346, 347, 348, 349, 350, 351, 352, 353, 354, 355, 356, 357, 358, 359, 360, 361, 362, 363, 364, 365, 366, 367, 368, 369, 370, 371, 372, 373, 374, 375, 376, 377, 378, 379, 380, 381, 382, 383, 384, 385, 386, 387, 388, 389, 390, 391, 392, 393, 394, 395, 396, 397, 398, 399, 400, 401, 402, 403, 404, 405, 406, 407, 408, 409, 410, 411, 412, 413, 414, 415, 416, 417, 418, 419, 420, 421, 422, 423, 424, 425, 426, 427, 428, 429, 430, 431, 432, 433, 434, 435, 436, 437, 438, 439, 440, 441, 442, 443, 444, 445, 446, 447, 448, 449, 450, 451, 452, 453, 454, 455, 456, 457, 458, 459, 460, 461, 462, 463, 464, 465, 466, 467, 468, 469, 470, 471, 472, 473, 474, 475, 476, 477, 478, 479, 480, 481, 482, 483, 484, 485, 486, 487, 488, 489, 490, 491, 492, 493, 494, 495, 496, 497, 498, 499, and 500 nucleotides in length.

[0226] In some embodiments, the polyadenylation sequence is 50-100 nucleotides in length.

[0227] In some embodiments, the polyadenylation sequence is 50-150 nucleotides in length.

[0228] In some embodiments, the polyadenylation sequence is 50-160 nucleotides in length.

[0229] In some embodiments, the polyadenylation sequence is 50-200 nucleotides in length.

[0230] In some embodiments, the polyadenylation sequence is 60-100 nucleotides in length.

[0231] In some embodiments, the polyadenylation sequence is 60-150 nucleotides in length.

[0232] In some embodiments, the polyadenylation sequence is 60-160 nucleotides in length.

[0233] In some embodiments, the polyadenylation sequence is 60-200 nucleotides in length.

[0234] In some embodiments, the polyadenylation sequence is 70-100 nucleotides in length.

[0235] In some embodiments, the polyadenylation sequence is 70-150 nucleotides in length.

[0236] In some embodiments, the polyadenylation sequence is 70-160 nucleotides in length.

[0237] In some embodiments, the polyadenylation sequence is 70-200 nucleotides in length.

[0238] In some embodiments, the polyadenylation sequence is 80-100 nucleotides in length.

[0239] In some embodiments, the polyadenylation sequence is 80-150 nucleotides in length.

[0240] In some embodiments, the polyadenylation sequence is 80-160 nucleotides in length.

[0241] In some embodiments, the polyadenylation sequence is 80-200 nucleotides in length.

[0242] In some embodiments, the polyadenylation sequence is 90-100 nucleotides in length.

[0243] In some embodiments, the polyadenylation sequence is 90-150 nucleotides in length.

[0244] In some embodiments, the polyadenylation sequence is 90-160 nucleotides in length.

[0245] In some embodiments, the polyadenylation sequence is 90-200 nucleotides in length.

### Viral Genome Component: Introns

[0246] In some embodiments, the viral genome of the AAV particles of the present disclosure comprises at least one element to enhance the transgene target specificity and expression (See e.g., Powell et al. Viral Expression Cassette Elements to Enhance Transgene Target Specificity and Expression in Gene Therapy, Discov. Med, 2015, 19(102): 49-57; the contents of which are herein incorporated by reference in their entirety) such as an intron. Non-limiting examples of introns include, MVM (67-97 bps), FIX truncated intron 1 (300 bps), β-globin SD/immunoglobulin heavy chain splice acceptor (250 bps), adenovirus splice donor/immunoglobin splice acceptor (500 bps), SV40 late splice donor/splice acceptor (19S/16S) (180 bps) and hybrid adenovirus splice donor/IgG splice acceptor (230 bps).

[0247] In some embodiments, the intron or intron portion may be 50-500 nucleotides in length. The intron may have a length of 60, 70, 80, 90, 100, 110, 120, 130, 140, 150, 160, 170, 171, 172, 173, 174, 175, 176, 177, 178, 179, 180, 190, 200, 210, 220, 230, 240, 250, 260, 270, 280, 290, 300, 310, 320, 330, 340, 350, 360, 370, 380, 390, 400, 410, 420, 430, 440, 450, 460, 470, 480, 490 or 500 nucleotides. The intron may have a length between 80-100, 80-120, 80-140, 80-160, 80-180, 80-200, 80-250, 80-300, 80-350, 80-400, 80-450, 80-500, 100-300, 100-400, 100-500, 200-300, 200-400, 200-500, 300-400, 300-500, or 400-500 nucleotides.

### Viral Genome Component: Stuffer Sequences

[0248] In some embodiments, the viral genome of the AAV particles of the present disclosure comprises at least one element to improve packaging efficiency and expression, such as a stuffer or filler sequence. Non-limiting examples of stuffer sequences include albumin and/or alpha-1 antitrypsin. Any known viral, mammalian, or plant sequence may be manipulated for use as a stuffer sequence.

[0249] In some embodiments, the stuffer or filler sequence may be from about 100-3500 nucleotides in length. The stuffer sequence may have a length of about 100, 200, 300, 400, 500, 600, 700, 800, 900, 1000, 1100, 1200, 1300, 1400, 1500, 1600, 1700, 1800, 1900, 2000, 2100, 2200, 2300, 2400, 2500, 2600, 2700, 2800, 2900 or 3000 nucleotides.

Viral Genome Component: miRNA

[0250] In some embodiments, the viral genome comprises at least one sequence encoding a miRNA to reduce the expression of the transgene in a specific tissue. miRNAs and their targeted tissues are well known in the art. As a non-limiting example, a miR-122 miRNA may be encoded in the viral genome to reduce the expression of the viral genome in the liver.

### Genome Size

[0251] In some embodiments, the AAV particle which comprises a payload described herein may be single stranded or double stranded viral genome. The size of the viral genome may be small, medium, large or the maximum size. Additionally, the viral genome may comprise a promoter and a polyA tail.

[0252] In some embodiments, the viral genome which comprises a payload described herein may be a small single stranded viral genome. A small single stranded viral genome may be 2.1 to 3.5 kb in size such as about 2.1, 2.2, 2.3, 2.4, 2.5, 2.6, 2.7, 2.8, 2.9, 3.0, 3.1, 3.2, 3.3, 3.4, and 3.5 kb in size. As a non-limiting example, the small single stranded viral genome may be 3.2 kb in size. As another non-limiting example, the small single stranded viral genome may be 2.2 kb in size. Additionally, the viral genome may comprise a promoter and a polyA tail.

[0253] In some embodiments, the viral genome which comprises a payload described herein may be a small double stranded viral genome. A small double stranded viral genome may be 1.3 to 1.7 kb in size such as about 1.3, 1.4, 1.5, 1.6, and 1.7 kb in size. As a non-limiting example, the small double stranded viral genome may be 1.6 kb in size. Additionally, the viral genome may comprise a promoter and a polyA tail.

[0254] In some embodiments, the viral genome which comprises a payload described herein e.g., polynucleotide, siRNA or dsRNA, may be a medium single stranded viral genome. A medium single stranded viral genome may be 3.6 to 4.3 kb in size such as about 3.6, 3.7, 3.8, 3.9, 4.0, 4.1, 4.2 and 4.3 kb in size. As a non-limiting example, the medium single stranded viral genome may be 4.0 kb in size. Additionally, the viral genome may comprise a promoter and a polyA tail.

[0255] In some embodiments, the viral genome which comprises a payload described herein may be a medium double stranded viral genome. A medium double stranded viral genome may be 1.8 to 2.1 kb in size such as about 1.8, 1.9, 2.0, and 2.1 kb in size. As a non-limiting example, the medium double stranded viral genome may be 2.0 kb in size. Additionally, the viral genome may comprise a promoter and a polyA tail.

[0256] In some embodiments, the vector genome which comprises a payload described herein may be a large single stranded viral genome. A large single stranded viral genome may be 4.4 to 6.0 kb in size such as about 4.4, 4.5, 4.6, 4.7, 4.8, 4.9, 5.0, 5.1, 5.2, 5.3, 5.4, 5.5, 5.6, 5.7, 5.8, 5.9 and 6.0 kb in size. As a non-limiting example, the large single stranded viral genome may be 4.7 kb in size. As another non-limiting example, the large single stranded viral genome may be 4.8 kb in size. As yet another non-limiting example, the large single stranded viral genome may be 6.0 kb in size. Additionally, the viral genome may comprise a promoter and a polyA tail.

[0257] In some embodiments, the viral genome which comprises a payload described herein may be a large double stranded viral genome. A large double stranded viral genome may be 2.2 to 3.0 kb in size such as about 2.2, 2.3, 2.4, 2.5, 2.6, 2.7, 2.8, 2.9 and 3.0 kb in size. As a non-limiting example, the large double stranded viral genome may be 2.4 kb in size. Additionally, the viral genome may comprise a promoter and a polyA tail.

### Payloads

[0258] The AAV particles of the present disclosure comprise at least one payload region. As used herein, “payload” or “payload region” refers to one or more polynucleotides or polynucleotide regions encoded by or within a viral genome or an expression product of such polynucleotide or polynucleotide region, e.g., a transgene, a polynucleotide encoding a polypeptide or multi-polypeptide or a modulatory nucleic acid or regulatory nucleic acid. Payloads of the present disclosure typically encode polypeptides or fragments or variants thereof.

[0259] The payload region may be constructed in such a way as to reflect a region similar to or mirroring the natural organization of an mRNA.

[0260] The payload region may comprise a combination of coding and non-coding nucleic acid sequences.

[0261] In some embodiments, the AAV payload region may encode a coding or non-coding RNA.

[0262] In some embodiments, the AAV particle comprises a viral genome with a payload region comprising nucleic acid sequences encoding more than one polypeptide of interest. In such an embodiment, a viral genome encoding more than one polypeptide may be replicated and packaged into a viral particle. A target cell transduced with a viral particle comprising more than one polypeptide may express each of the polypeptides in a single cell.

[0263] In some embodiments, the payload region may comprise the components as shown in FIG. 1. The payload region 110 is located within the viral genome 100. At the 5′ and/or the 3′ end of the payload region 110 there may be at least one inverted terminal repeat (ITR) 120. In some embodiments, within the payload region, there is a promoter region 130, an intron region 140 and a coding region 150.

[0264] Where the AAV particle payload region encodes a polypeptide, the polypeptide may be a peptide or protein. As a non-limiting example, the payload region may encode at least one allele of apolipoprotein E (APOE) such as, but not limited to ApoE2, ApoE3 and/or ApoE4. As a second non-limiting example, the payload region may encode a human or a primate frataxin protein, or fragment or variant thereof. As another non-limiting example, the payload region may encode an antibody, or a fragment thereof. The AAV viral genomes encoding polypeptides described herein may be useful in the fields of human disease, viruses, infections veterinary applications and a variety of in vivo and in vitro settings.

[0265] In some embodiments, the AAV particles are useful in the field of medicine for the treatment, prophylaxis, palliation or amelioration of neurological diseases and/or disorders.

[0266] In some embodiments, the AAV particles are useful in the field of medicine for the treatment, prophylaxis, palliation or amelioration of tauopathy.

[0267] In some embodiments, the AAV particles are useful in the field of medicine for the treatment, prophylaxis, palliation or amelioration of Alzheimer's Disease.

[0268] In some embodiments, the AAV particles are useful in the field of medicine for the treatment, prophylaxis, palliation or amelioration of Friedreich's ataxia, or any disease stemming from a loss or partial loss of frataxin protein.

[0269] In some embodiments, the AAV particles are useful in the field of medicine for the treatment, prophylaxis, palliation or amelioration of Parkinson's Disease.

[0270] In some embodiments, the AAV particles are useful in the field of medicine for the treatment, prophylaxis, palliation or amelioration of Amyotrophic lateral sclerosis.

[0271] In some embodiments, the AAV particles are useful in the field of medicine for the treatment, prophylaxis, palliation or amelioration of Huntington's Disease.

### The Nature of the Polypeptides and Variants

[0272] Amino acid sequences encoded by payload regions of the viral genomes described herein may be translated as a whole polypeptide, a plurality of polypeptides or fragments of polypeptides, which independently may be encoded by one or more nucleic acids, fragments of nucleic acids or variants of any of the aforementioned. As used herein, “polypeptide” means a polymer of amino acid residues (natural or unnatural) linked together most often by peptide bonds. The term, as used herein, refers to proteins, polypeptides, and peptides of any size, structure, or function. In some instances, the polypeptide encoded is smaller than about 50 amino acids and the polypeptide is then termed a peptide. If the polypeptide is a peptide, it will be at least about 2, 3, 4, or at least 5 amino acid residues long. Thus, polypeptides include gene products, naturally occurring polypeptides, synthetic polypeptides, homologs, orthologs, paralogs, fragments and other equivalents, variants, and analogs of the foregoing. A polypeptide may be a single molecule or may be a multi-molecular complex such as a dimer, trimer or tetramer. They may also comprise single chain or multichain polypeptides and may be associated or linked. The term polypeptide may also apply to amino acid polymers in which one or more amino acid residues are an artificial chemical analogue of a corresponding naturally occurring amino acid.

[0273] The term “polypeptide variant” refers to molecules which differ in their amino acid sequence from a native or reference sequence. The amino acid sequence variants may possess substitutions, deletions, and/or insertions at certain positions within the amino acid sequence, as compared to a native or reference sequence. Ordinarily, variants will possess at least about 50% identity (homology) to a native or reference sequence, and preferably, they will be at least about 80%, more preferably at least about 90% identical (homologous) to a native or reference sequence.

[0274] In some embodiments “variant mimics” are provided. As used herein, the term “variant mimic” is one which contains one or more amino acids which would mimic an activated sequence. For example, glutamate may serve as a mimic for phosphoro-threonine and/or phosphoro-serine. Alternatively, variant mimics may result in deactivation or in an inactivated product containing the mimic, e.g., phenylalanine may act as an inactivating substitution for tyrosine; or alanine may act as an inactivating substitution for serine.

[0275] The term “amino acid sequence variant” refers to molecules with some differences in their amino acid sequences as compared to a native or starting sequence. The amino acid sequence variants may possess substitutions, deletions, and/or insertions at certain positions within the amino acid sequence. “Native” or “starting” sequence should not be confused with a wild type sequence. As used herein, a native or starting sequence is a relative term referring to an original molecule against which a comparison may be made. “Native” or “starting” sequences or molecules may represent the wild-type (that sequence found in nature) but do not have to be the wild-type sequence.

[0276] Ordinarily, variants will possess at least about 70% homology to a native sequence, and preferably, they will be at least about 80%, more preferably at least about 90% homologous to a native sequence. “Homology” as it applies to amino acid sequences is defined as the percentage of residues in the candidate amino acid sequence that are identical with the residues in the amino acid sequence of a second sequence after aligning the sequences and introducing gaps, if necessary, to achieve the maximum percent homology. Methods and computer programs for the alignment are well known in the art. It is understood that homology depends on a calculation of percent identity but may differ in value due to gaps and penalties introduced in the calculation.

[0277] By “homologs” as it applies to amino acid sequences is meant the corresponding sequence of other species having substantial identity to a second sequence of a second species.

[0278] “Analogs” is meant to include polypeptide variants which differ by one or more amino acid alterations, e.g., substitutions, additions or deletions of amino acid residues that still maintain the properties of the parent polypeptide.

[0279] Sequence tags or amino acids, such as one or more lysines, can be added to the peptide sequences described herein (e.g., at the N-terminal or C-terminal ends). Sequence tags can be used for peptide purification or localization. Lysines can be used to increase peptide solubility or to allow for biotinylation. Alternatively, amino acid residues located at the carboxy and amino terminal regions of the amino acid sequence of a peptide or protein may optionally be deleted providing for truncated sequences. Certain amino acids (e.g., C-terminal or N-terminal residues) may alternatively be deleted depending on the use of the sequence, as for example, expression of the sequence as part of a larger sequence which is soluble, or linked to a solid support.

[0280] “Substitutional variants” when referring to proteins are those that have at least one amino acid residue in a native or starting sequence removed and a different amino acid inserted in its place at the same position. The substitutions may be single, where only one amino acid in the molecule has been substituted, or they may be multiple, where two or more amino acids have been substituted in the same molecule.

[0281] As used herein the term “conservative amino acid substitution” refers to the substitution of an amino acid that is normally present in the sequence with a different amino acid of similar size, charge, or polarity. Examples of conservative substitutions include the substitution of a non-polar (hydrophobic) residue such as isoleucine, valine and leucine for another non-polar residue. Likewise, examples of conservative substitutions include the substitution of one polar (hydrophilic) residue for another such as between arginine and lysine, between glutamine and asparagine, and between glycine and serine. Additionally, the substitution of a basic residue such as lysine, arginine or histidine for another, or the substitution of one acidic residue such as aspartic acid or glutamic acid for another acidic residue are additional examples of conservative substitutions. Examples of non-conservative substitutions include the substitution of a non-polar (hydrophobic) amino acid residue such as isoleucine, valine, leucine, alanine, methionine for a polar (hydrophilic) residue such as cysteine, glutamine, glutamic acid or lysine and/or a polar residue for a non-polar residue.

[0282] “Insertional variants” when referring to proteins are those with one or more amino acids inserted immediately adjacent to an amino acid at a particular position in a native or starting sequence. “Immediately adjacent” to an amino acid means connected to either the alpha-carboxy or alpha-amino functional group of the amino acid.

[0283] “Deletional variants” when referring to proteins, are those with one or more amino acids in the native or starting amino acid sequence removed. Ordinarily, deletional variants will have one or more amino acids deleted in a particular region of the molecule.

[0284] As used herein, the term “derivative” is used synonymously with the term “variant” and refers to a molecule that has been modified or changed in any way relative to a reference molecule or starting molecule. In some embodiments, derivatives include native or starting proteins that have been modified with an organic proteinaceous or non-proteinaceous derivatizing agent, and post-translational modifications. Covalent modifications are traditionally introduced by reacting targeted amino acid residues of the protein with an organic derivatizing agent that is capable of reacting with selected side-chains or terminal residues, or by harnessing mechanisms of post-translational modifications that function in selected recombinant host cells. The resultant covalent derivatives are useful in programs directed at identifying residues important for biological activity, for immunoassays, or for the preparation of anti-protein antibodies for immunoaffinity purification of the recombinant glycoprotein. Such modifications are within the ordinary skill in the art and are performed without undue experimentation.

[0285] Certain post-translational modifications are the result of the action of recombinant host cells on the expressed polypeptide. Glutaminyl and asparaginyl residues are frequently post-translationally deamidated to the corresponding glutamyl and aspartyl residues. Alternatively, these residues are deamidated under mildly acidic conditions. Either form of these residues may be present in the proteins used in accordance with the present disclosure.

[0286] Other post-translational modifications include hydroxylation of proline and lysine, phosphorylation of hydroxyl groups of seryl or threonyl residues, methylation of the alpha-amino groups of lysine, arginine, and histidine side chains (T. E. Creighton, Proteins: Structure and Molecular Properties, W.H. Freeman & Co., San Francisco, pp. 79-86 (1983)).

[0287] “Features” when referring to proteins are defined as distinct amino acid sequence-based components of a molecule. Features of the proteins of the present disclosure include surface manifestations, local conformational shape, folds, loops, half-loops, domains, half-domains, sites, termini or any combination thereof.

[0288] As used herein when referring to proteins the term “surface manifestation” refers to a polypeptide based component of a protein appearing on an outermost surface.

[0289] As used herein when referring to proteins the term “local conformational shape” means a polypeptide based structural manifestation of a protein which is located within a definable space of the protein.

[0290] As used herein when referring to proteins the term “fold” means the resultant conformation of an amino acid sequence upon energy minimization. A fold may occur at the secondary or tertiary level of the folding process. Examples of secondary level folds include beta sheets and alpha helices. Examples of tertiary folds include domains and regions formed due to aggregation or separation of energetic forces. Regions formed in this way include hydrophobic and hydrophilic pockets, and the like.

[0291] As used herein the term “turn” as it relates to protein conformation means a bend which alters the direction of the backbone of a peptide or polypeptide and may involve one, two, three or more amino acid residues.

[0292] As used herein when referring to proteins the term “loop” refers to a structural feature of a peptide or polypeptide which reverses the direction of the backbone of a peptide or polypeptide and comprises four or more amino acid residues. Oliva et al. have identified at least 5 classes of protein loops (J. Mol Biol 266 (4): 814-830; 1997).

[0293] As used herein when referring to proteins the term “half-loop” refers to a portion of an identified loop having at least half the number of amino acid residues as the loop from which it is derived. It is understood that loops may not always contain an even number of amino acid residues. Therefore, in those cases where a loop contains or is identified to comprise an odd number of amino acids, a half-loop of the odd-numbered loop will comprise the whole number portion or next whole number portion of the loop (number of amino acids of the loop/2+/−0.5 amino acids). For example, a loop identified as a 7 amino acid loop could produce half-loops of 3 amino acids or 4 amino acids (7/2=3.5+/−0.5 being 3 or 4).

[0294] As used herein when referring to proteins the term “domain” refers to a motif of a polypeptide having one or more identifiable structural or functional characteristics or properties (e.g., binding capacity, serving as a site for protein-protein interactions).

[0295] As used herein when referring to proteins the term “half-domain” means portion of an identified domain having at least half the number of amino acid residues as the domain from which it is derived. It is understood that domains may not always contain an even number of amino acid residues. Therefore, in those cases where a domain contains or is identified to comprise an odd number of amino acids, a half-domain of the odd-numbered domain will comprise the whole number portion or next whole number portion of the domain (number of amino acids of the domain/2+/−0.5 amino acids). For example, a domain identified as a 7 amino acid domain could produce half-domains of 3 amino acids or 4 amino acids (7/2=3.5+/−0.5 being 3 or 4). It is also understood that sub-domains may be identified within domains or half-domains, these subdomains possessing less than all of the structural or functional properties identified in the domains or half domains from which they were derived. It is also understood that the amino acids that comprise any of the domain types herein need not be contiguous along the backbone of the polypeptide (i.e., nonadjacent amino acids may fold structurally to produce a domain, half-domain or subdomain).

[0296] As used herein when referring to proteins the terms “site” as it pertains to amino acid based embodiments is used synonymous with “amino acid residue” and “amino acid side chain”. A site represents a position within a peptide or polypeptide that may be modified, manipulated, altered, derivatized or varied within the polypeptide based molecules of the present disclosure.

[0297] As used herein the terms “termini or terminus” when referring to proteins refers to an extremity of a peptide or polypeptide. Such extremity is not limited only to the first or final site of the peptide or polypeptide but may include additional amino acids in the terminal regions. The polypeptide based molecules of the present disclosure may be characterized as having both an N-terminus (terminated by an amino acid with a free amino group (NH2)) and a C-terminus (terminated by an amino acid with a free carboxyl group (COOH)). Proteins described herein are in some cases made up of multiple polypeptide chains brought together by disulfide bonds or by non-covalent forces (multimers, oligomers). These sorts of proteins will have multiple N- and C-termini. Alternatively, the termini of the polypeptides may be modified such that they begin or end, as the case may be, with a non-polypeptide based moiety such as an organic conjugate.

[0298] Once any of the features have been identified or defined as a component of a molecule of the disclosure, any of several manipulations and/or modifications of these features may be performed by moving, swapping, inverting, deleting, randomizing or duplicating. Furthermore, it is understood that manipulation of features may result in the same outcome as a modification to the molecules described herein. For example, a manipulation which involves deleting a domain would result in the alteration of the length of a molecule just as modification of a nucleic acid to encode less than a full length molecule would.

[0299] Modifications and manipulations can be accomplished by methods known in the art such as site directed mutagenesis. The resulting modified molecules may then be tested for activity using in vitro or in vivo assays such as those described herein or any other suitable screening assay known in the art.

### Payloads: Nucleic Acids Encoding a Protein of Interest

[0300] In some embodiments, the payload region of the AAV particle comprises one or more nucleic acid sequences encoding a protein of interest.

[0301] Where the payload region encodes a polypeptide, the polypeptide may be a peptide or protein. As a non-limiting example, the payload region may encode at least one allele of apolipoprotein E (APOE) such as, but not limited to ApoE2, ApoE3 and/or ApoE4. In some embodiments, the payload region encodes ApoE2 (cys112, cys158). In some embodiments, the payload region encodes ApoE3 (cys112, arg158). In some embodiments, the payload region encodes ApoE4 (arg112, arg158). As a second non-limiting example, the payload region may encode a human or a primate frataxin protein, or fragment or variant thereof. As another non-limiting example, the payload region may encode an antibody, or a fragment thereof. As another non-limiting example, the payload region may encode human aromatic L-amino acid decarboxylase (AADC), or fragment or variant thereof. As another non-limiting example, the payload region may encode human survival of motor neuron (SMN) 1 or SMN2, or fragments or variants thereof. As another non-limiting example, the payload region may encode glucocerebrocidase (GBA1), or a fragment or variant thereof. As another non-limiting example, the payload region may encode granulin precursor or progranulin (GRN), or a fragment or variant thereof. As another non-limiting example, the payload region may encode aspartoacylase (ASPA), or a fragment or variant thereof. As another non-limiting example, the payload region may encode tripeptidyl peptidase I (CLN2), or a fragment or variant thereof. As another non-limiting example, the payload region may encode beta-galactosidase (GLB1), or a fragment or variant thereof. As another non-limiting example, the payload region may encode N-sulphoglucosamine sulphohydrolase (SGSH), or a fragment or variant thereof. As another non-limiting example, the payload region may encode N-acetyl-alpha-glucosaminidase (NAGLU), or a fragment or variant thereof. As another non-limiting example, the payload region may encode iduronate 2-sulfatase (IDS), or a fragment or variant thereof. As another non-limiting example, the payload region may encode Intracellular cholesterol transporter (NPC1), or a fragment or variant thereof. As another non-limiting example, the payload region may encode gigaxonin (GAN), or a fragment or variant thereof. The AAV viral genomes encoding polypeptides described herein may be useful in the fields of human disease, viruses, infections veterinary applications and a variety of in vivo and in vitro settings.

[0302] Where the payload region encodes an antibody, the “antibody” may be an antibody, a fragment, or any derivative thereof, which may contribute to the formation of a “functional antibody”, exhibiting the desired biological activity. As non-limiting examples, an antibody may be a native antibody (e.g., with two heavy and two light chains), a heavy chain variable region, a light chain variable region, a heavy chain constant region, a light chain constant region, Fab, Fab′, F(ab′)₂, Fv, or scFv fragments, a diabody, a linear antibody, a single-chain antibody, a multi-specific antibody, an intrabody, one or more heavy chain complementarity determining regions (CDR), one or more light chain CDRs, a bi-specific antibody, a monoclonal antibody, a polyclonal antibody, a humanized antibody, an antibody mimetic, an antibody variant, a miniaturized antibody, a unibody, a maxibody, and/or a chimeric antigen receptor.

[0303] As used herein, “antibody-based” or “antibody-derived” compositions are monomeric or multi-meric polypeptides which comprise at least one amino-acid region derived from a known or parental antibody sequence and at least one amino acid region derived from a non-antibody sequence, e.g., mammalian protein.

[0304] Payload regions may encode polypeptides that form or function as any antibody, including antibodies that are known in the art and/or antibodies that are commercially available. The encoded antibodies may be therapeutic, diagnostic, or for research purposes. The encoded antibodies may be useful in the treatment of neurological disease or any disorders associated with the central and/or peripheral nervous systems.

[0305] In some embodiments, the viral genome of the AAV particle may comprise nucleic acids which have been engineered to enable or enhance the expression of antibodies, antibody fragments, or components thereof.

[0306] Antibodies encoded in payload regions of the AAV particles of the present disclosure may be, but are not limited to, antibodies targeting β-amyloid, APOE, tau, SOD1, TDP-43, huntingtin, and/or synuclein.

### Apolipoprotein E (APOE)

[0307] In some embodiments, the payload region of the AAV particle comprises one or more nucleic acid sequences encoding an allele of the apolipoprotein E (APOE) gene (e.g., ApoE2, ApoE3, and/or ApoE4).

[0308] In some embodiments, the payload region of the AAV particle comprises a nucleic acid sequence encoding an amino acid signal peptide with the sequence MKVLWAALLVTFLAGCQA (SEQ ID NO: 1722).

[0309] In some embodiments, the payload region of the AAV particle comprises a nucleic acid sequence encoding an amino acid signal peptide with the sequence

(SEQ ID NO: 1723)
MSSGASRKSWDPGNPWPPDWPITGRKMKVLWAALLVTFLAGCQA.

[0310] In some embodiments, the payload region of the AAV particle comprises a nucleic acid sequence encoding an amino acid sequence, or fragment thereof, or variant thereof, described in Table 2.

[0311] In some embodiments, the payload region of the AAV particle comprises a nucleic acid sequence, or fragment thereof, or variant thereof, described in Table 2.

TABLE 2
Apolipoprotein E Sequences

| Identification | Reference | SEQ ID NO |
|---|---|---|
| APOE SEQ-001 | ENSP00000252486; NP_000032.1; NP_001289618.1; | 1724 |
| | NP_001289619.1; NP_001289620.1 | |
| APOE SEQ-002 | ENSP00000252486; NP_000032.1; NP_001289618.1; | 1725 |
| | NP_001289619.1; NP_001289620.1; Mature peptide | |
| APOE SEQ-003 | ENSP00000413135 | 1726 |
| APOE SEQ-004 | ENSP00000413135; Mature peptide | 1727 |
| APOE SEQ-005 | ENSP00000413653 | 1728 |
| APOE SEQ-006 | ENSP00000413653; Mature peptide | 1729 |
| APOE SEQ-007 | ENSP00000410423 | 1730 |
| APOE SEQ-008 | ENSP00000410423; Mature peptide | 1731 |
| APOE SEQ-009 | NP_001289617.1 | 1732 |
| APOE SEQ-010 | NP_001289617.1; Mature peptide | 1733 |
| APOE SEQ-011 | ENST00000252486.8 | 1734 |
| APOE SEQ-012 | CCDS12647.1 for ENST00000252486.8 | 1735 |
| APOE SEQ-013 | ENST00000446996.5 | 1736 |
| APOE SEQ-014 | ENST00000485628.2 | 1737 |
| APOE SEQ-015 | ENST00000434152.5 | 1738 |
| APOE SEQ-016 | ENST00000425718.1 | 1739 |
| APOE SEQ-017 | NM_000041.3 | 1740 |
| APOE SEQ-018 | NM_001302689.1 | 1741 |
| APOE SEQ-019 | NM_001302690.1 | 1742 |
| APOE SEQ-020 | NM_001302691.1 | 1743 |
| APOE SEQ-021 | NM_001302688.1 | 1744 |

[0312] In some embodiments, the payload region of the AAV particle comprises one or more nucleic acid sequences encoding one or more variants of SEQ ID NO: 1724. The variant may include, but is not limited to, one or more of the variants: E21K (the amino acid E (Glu) at position 21 in SEQ ID NO: 1724 is changed to K (Lys)), E31K (the amino acid E (Glu) at position 31 in SEQ ID NO: 1724 is changed to K (Lys)), R43C (the amino acid R (Arg) at position 43 in SEQ ID NO: 1724 is changed to C (Cys)), L46P (the amino acid L (Leu) at position 46 in SEQ ID NO: 1724 is changed to P (Pro)), T60A (the amino acid T (Thr) at position 60 in SEQ ID NO: 1724 is changed to A (Ala)), Q64H (the amino acid Q (Gln) at position 64 in SEQ ID NO: 1724 is changed to H (His)), Q99K (the amino acid Q (Gln) at position 99 in SEQ ID NO: 1724 is changed to K (Lys)), P102R (the amino acid P (Pro) at position 102 in SEQ ID NO: 1724 is changed to R (Arg)), A117T (the amino acid A (Ala) at position 117 in SEQ ID NO: 1724 is changed to T (Thr)), A124V (the amino acid A (Ala) at position 124 in SEQ ID NO: 1724 is changed to V (Val)), C130R (the amino acid C (Cys) at position 130 in SEQ ID NO: 1724 is changed to R (Arg)), G145D (the amino acid G (Gly) at position 145 in SEQ ID NO: 1724 is changed to D (Asp)), G145GEVQAMLG (the amino acid G (Gly) at position 145 in SEQ ID NO: 1724 is changed to be GEVQAMLG (Gly-Glu-Val-Gln-Ala-Met-Leu-Gly)), R152Q (the amino acid R (Arg) at position 152 in SEQ ID NO: 1724 is changed to Q (Gln)), R154C (the amino acid R (Arg) at position 154 in SEQ ID NO: 1724 is changed to C (Cys)), R154S (the amino acid R (Arg) at position 154 in SEQ ID NO: 1724 is changed to S (Ser)), R160C (the amino acid R (Arg) at position 160 in SEQ ID NO: 1724 is changed to C (Cys)), R163H (the amino acid R (Arg) at position 163 in SEQ ID NO: 1724 is changed to H (His)), R163P (the amino acid R (Arg) at position 163 in SEQ ID NO: 1724 is changed to P (Pro)), K164E (the amino acid K (Lys) at position 164 in SEQ ID NO: 1724 is changed to E (Glu)), K164Q (the amino acid K (Lys) at position 164 in SEQ ID NO: 1724 is changed to Q (Gln)), A170P (the amino acid A (Ala) at position 170 in SEQ ID NO: 1724 is changed to P (Pro)), R176C (the amino acid R (Arg) at position 176 in SEQ ID NO: 1724 is changed to C (Cys)), R242Q (the amino acid R (Arg) at position 242 in SEQ ID NO: 1724 is changed to Q (Gln)), R246C (the amino acid R (Arg) at position 246 in SEQ ID NO: 1724 is changed to C (Cys)), V254E (the amino acid V (Val) at position 254 in SEQ ID NO: 1724 is changed to E (Glu)), EE262-263KK (the amino acids EE (Glu-Glu) at positions 262-263 in SEQ ID NO: 1724 are changed to KK (Lys-Lys)), R269G (the amino acid R (Arg) at position 269 in SEQ ID NO: 1724 is changed to G (Gly)), L270E (the amino acid L (Leu) at position 270 in SEQ ID NO: 1724 is changed to E (Glu)), R292H (the amino acid R (Arg) at position 292 in SEQ ID NO: 1724 is changed to H (His)), S314R (the amino acid S (Ser) at position 314 in SEQ ID NO: 1724 is changed to R (Arg)), the removal of amino acid 167, or a combination thereof. As a non-limiting example, the payload region of the AAV particle comprises one or more nucleic acid sequences encoding an amino acid sequence where the amino acid C (Cys) at position 130 in SEQ ID NO: 1724 is changed to R (Arg). As a non-limiting example, the payload region of the AAV particle comprises one or more nucleic acid sequences encoding an amino acid sequence where the amino acid R (Arg) at position 176 in SEQ ID NO: 1724 is changed to C (Cys). As a non-limiting example, the payload region of the AAV particle comprises one or more nucleic acid sequences encoding an amino acid sequence where the amino acid C (Cys) at position 130 in SEQ ID NO: 1724 is changed to R and the amino acid R (Arg) at position 176 in SEQ ID NO: 1724 is changed to C (Cys).

[0313] In some embodiments, the payload region of the AAV particle comprises one or more nucleic acid sequences encoding an ApoE molecule comprising a signal peptide sequence as given in SEQ ID NO: 1722 or 1723. As a non-limiting example, the signal peptide may be cleaved during cellular processing to yield a mature peptide as given in SEQ ID NOs: 1725, 1727, 1729, 1731, and 1733. Alternatively, the payload region of the AAV particle comprises one or more nucleic acid sequences encoding an ApoE molecule that lacks a signal peptide sequences, as given in SEQ ID NOs: 1725, 1727, 1729, 1731, and 1733.

[0314] In some embodiments, the payload region of the AAV particle comprises one or more nucleic acid sequences encoding one or more variants of SEQ ID NO: 1725. The variant may include, but is not limited to, one or more of the variants: C112R (the amino acid C (Cys) at position 112 in SEQ ID NO: 1725 is changed to R (Arg)), or R158C (the amino acid R (Arg) at position 158 in SEQ ID NO: 1725 is changed to C (Cys).

[0315] In some embodiments, the payload region of the AAV particle comprises one or more nucleic acid sequences that encode ApoE2 (cys112, cys158).

[0316] In some embodiments, the payload region of the AAV particle comprises one or more nucleic acid sequences that encode ApoE3 (cys112, arg158).

[0317] In some embodiments, the payload region of the AAV particle comprises one or more nucleic acid sequences that encode ApoE4 (arg112, arg158).

### Frataxin (FXN)

[0318] In some embodiments, the payload region of the AAV particle comprises one or more nucleic acid sequences encoding frataxin (FXN) such as a human frataxin and a primate frataxin.

[0319] In some embodiments, the payload region of the AAV particle comprises a nucleic acid sequence encoding an amino acid sequence, or fragment thereof, or variant thereof, described in Table 3.

[0320] In some embodiments, the payload region of the AAV particle comprises a nucleic acid sequence, or fragment thereof, or variant thereof, described in Table 3.

TABLE 3
Frataxin Sequences

| Identification | Reference | SEQ ID NO |
|---|---|---|
| FXN SEQ-001 | NP_000135.2 | 1745 |
| FXN SEQ-002 | NP_852090.1 | 1746 |
| FXN SEQ-003 | NP_001155178.1 | 1747 |
| FXN SEQ-004 | NM_000144.4 | 1748 |
| FXN SEQ-005 | NM_181425.2 | 1749 |
| FXN SEQ-006 | NM_001161706.1 | 1750 |

### Aromatic L-Amino Acid Decarboxylase (AADC)

[0321] In some embodiments, the payload region of the AAV particle comprises one or more nucleic acid sequences encoding Aromatic L-Amino Acid Decarboxylase (AADC).

[0322] In some embodiments, the payload region of the AAV particle comprises a nucleic acid sequence encoding an amino acid sequence, or fragment thereof, or variant thereof, described in Table 4.

[0323] In some embodiments, the payload region of the AAV particle comprises a nucleic acid sequence, or fragment thereof, or variant thereof, described in Table 4.

TABLE 4
Aromatic L-Amino Acid Decarboxylase Sequences

| Identification | Reference | SEQ ID NO |
|---|---|---|
| AADC SEQ-001 | NP_000781.1 | 1751 |
| AADC SEQ-002 | NM_000790.3 | 1752 |

### ATPase Sarcoplasmic Endoplasmic Reticulum Ca2+ Transporting 2 (ATP2A2)

[0324] In some embodiments, the payload region of the AAV particle comprises one or more nucleic acid sequences encoding ATPase Sarcoplasmic/Endoplasmic Reticulum Ca2+ Transporting 2 (ATP2A2).

[0325] In some embodiments, the payload region of the AAV particle comprises a nucleic acid sequence encoding an amino acid sequence, or fragment thereof, or variant thereof, described in Table 5.

[0326] In some embodiments, the payload region of the AAV particle comprises a nucleic acid sequence, or fragment thereof, or variant thereof, described in Table 5.

TABLE 5
ATPase Sarcoplasmic/Endoplasmic
Reticulum Ca2+ Transporting 2

| Identification | Reference | SEQ ID NO |
|---|---|---|
| ATP2A2 SEQ-001 | NP_001672.1 | 1803 |
| ATP2A2 SEQ-002 | NP_733765.1 | 1804 |
| ATP2A2 SEQ-003 | NM_001681.3 | 1805 |
| ATP2A2 SEQ-004 | NM_170665.3 | 1806 |

### S100 Calcium Binding Protein A1 (S100A1)

[0327] In some embodiments, the payload region of the AAV particle comprises one or more nucleic acid sequences encoding S100 Calcium Binding Protein A1 (S100A1).

[0328] In some embodiments, the payload region of the AAV particle comprises a nucleic acid sequence encoding an amino acid sequence, or fragment thereof, or variant thereof, described in Table 6.

[0329] In some embodiments, the payload region of the AAV particle comprises a nucleic acid sequence, or fragment thereof, or variant thereof, described in Table 6.

TABLE 6
S100 Calcium Binding Protein A1

| Identification | Reference | SEQ ID NO |
|---|---|---|
| S100A1 SEQ-001 | NP_006262.1 | 1807 |
| S100A1 SEQ-002 | NM_006271.1 | 1808 |

### Anti Tau Paired Helical Filaments (Tau-PHF) Antibodies

[0330] In some embodiments, the payload region of the AAV particle comprises one or more nucleic acid sequences encoding the heavy chain and/or light chain of an antibody specific to Paired Helical Filaments (PHF) formed by abnormally folded Tau proteins (Tau-PHFs). The payload region may also comprise one or more nucleic acid sequences encoding a linker region between the nucleic acid sequences encoding the heavy and light chain. As a non-limiting example, the linker region comprises a furin cleavage recognition sequence (nucleic acid sequence shown as SEQ ID NO: 1811) and/or a 2A cis-acting hydrolase element (nucleic acid sequence shown as SEQ ID NO: 1812). As a non-limiting example, the nucleic acid sequence of the linker region is SEQ ID NO: 1813. As a non-limiting example, the antibody that specifically binds to Tau paired helical filaments is PHF-1. The PHIF-1 antibody may comprise heavy chains and light chains as taught in this disclosure.

[0331] In some embodiments, the payload region of the AAV particle comprises a nucleic acid sequence encoding an amino acid sequence, or fragment thereof, or variant thereof, described in Table 7.

[0332] In some embodiments, the payload region of the AAV particle comprises a nucleic acid sequence, or fragment thereof, or variant thereof, described in Table 7.

TABLE 7
Anti Tau PHF antibodies

| Identification | Reference | SEQ ID NO |
|---|---|---|
| PHF-1 SEQ-001 | Heavy Chain | 1814 |
| PHF-1 SEQ-002 | Light Chain | 1815 |

[0333] In some embodiments, the payload region of the AAV particle comprises a nucleic acid sequence SEQ ID NO: 1816 which comprises (5′ to 3′) the Kozak (SEQ ID NO: 1817), heavy chain (SEQ ID NO: 1814), linker region (which includes the furin cleavage recognition sequence (SEQ ID NO: 1811) and the 2A cis-acting hydrolase element sequence (SEQ ID NO: 1812)), light chain sequence (SEQ ID NO: 1812) of PHF-1, and the stop codon TAG described in FIG. 5A of WO2015035190, the contents of which are herein incorporated by reference in their entirety.

[0334] In some embodiments, the payload region of the AAV particle comprises a nucleic acid sequence SEQ ID NO: 1818, which comprises (5′ to 3′) the Kozak (SEQ ID NO: 1817), light chain (SEQ ID NO: 1815), linker region (which includes the furin cleavage recognition sequence (SEQ ID NO: 1811) and the 2A cis-acting hydrolase element sequence (SEQ ID NO: 1812)), heavy chain (SEQ ID NO: 1814) of PHF-1, and the stop codon TAG.

[0335] In some embodiments, the payload region of the AAV particle comprises a nucleic acid encoding the heavy chain and/or light chain of PHF-1 as taught in FIG. 5A of WO2015035190, the contents of which are herein incorporated by reference, wherein the heavy chain and/or light chain of PHF-1 in WO2015035190 has been altered (e.g., modified and/or mutated). The sequence may be mutated or modified to changed state or structure of a molecule. As a non-limiting example, the sequence may include an addition of an amino acid, an amino acid substitution, and/or a deletion of an amino acid.

[0336] In some embodiments, the payload region of the AAV particle comprises a nucleic acid encoding the light chain of PHF-1 where the light chain sequence has been altered to remove the second methionine at the beginning of the light chain amino acid sequence. As a non-limiting example, the payload region of the AAV particle comprises a nucleic acid encoding an amino acid sequence encoding a light chain of PHF-1 as shown in Table 8.

TABLE 8
Anti Tau PHF antibodies

| Identification | Reference | SEQ ID NO |
|---|---|---|
| PHF-1 SEQ-003 | Light Chain | 1819 |

[0337] In some embodiments, the payload region of the AAV particle comprises a nucleic acid sequence SEQ ID NO: 1820, which comprises (5′ to 3′) the Kozak (SEQ ID NO: 1817), heavy chain (SEQ ID NO: 1814), linker region (which includes the furin cleavage recognition sequence (SEQ ID NO: 1811) and the 2A cis-acting hydrolase element sequence (SEQ ID NO: 1812)), light chain sequence (SEQ ID NO: 1819) with one codon of “ATG” at the 5′ end of the light chain sequence of PHF-1, and the stop codon TAG.

[0338] In some embodiments, the payload region of the AAV particle comprises a nucleic acid sequence SEQ ID NO: 1821, which comprises (5′ to 3′) the Kozak (SEQ ID NO: 1817), light chain sequence with one codon of “ATG” at the 5′ end of the light chain sequence (SEQ ID NO: 1819), linker region (which includes the furin cleavage recognition sequence (SEQ ID NO: 1811) and the 2A cis-acting hydrolase element sequence (SEQ ID NO: 1812)), heavy chain of PHF-1 (SEQ ID NO: 1814), and the stop codon TAG.

### Payloads: Modulatory Polynucleotides as Payloads

[0339] In some embodiments, the payload region of the AAV particle comprises one or more modulatory polynucleotides, e.g., RNA or DNA molecules as therapeutic agents or an “RNAi agent”. Where the payload region of the viral genome of the AAV particles of the present disclosure encodes an RNAi agent, the RNAi agent may be, but is not limited to, dsRNA, siRNA, shRNA, pre-miRNA, pri-miRNA, miRNA, stRNA, lncRNA, piRNA, or snoRNA. Non-limiting examples of a target gene of an RNAi agent include, SOD1, MAPT, APOE, HTT, C9ORF72, TDP-43, APP, BACE, SNCA, ATXN1, ATXN2, ATXN3, ATXN7, SCN1A-SCN5A, or SCN8A-SCN11A.

[0340] Exemplary RNAi agents, or modulatory polynucleotides may be miRNAs, dsRNA and siRNA duplexes. RNA interference mediated gene silencing can specifically inhibit targeted gene expression. The present disclosure then provides small double stranded RNA (dsRNA) molecules (small interfering RNA, siRNA) targeting a gene of interest, pharmaceutical compositions comprising such siRNAs, as well as processes of their design. The present disclosure also provides methods of their use for inhibiting gene expression and protein production of gene of interest, for treating a neurological disease.

[0341] The present disclosure provides small interfering RNA (siRNA) duplexes (and modulatory polynucleotides encoding them) that target the mRNA of a gene of interest to interfere with the gene expression and/or protein production.

[0342] In some embodiments, the siRNA duplexes of the present disclosure may target the gene of interest along any segment of their respective nucleotide sequence.

[0343] In some embodiments, the siRNA duplexes of the present disclosure may target the gene of interest at the location of a single nucleotide polymorphism (SNP) or variant within the nucleotide sequence.

[0344] In some embodiments, a nucleic acid sequence encoding such siRNA molecules, or a single strand of the siRNA molecules, is inserted into the viral genome of the AAV particle and introduced into cells, specifically cells in the central nervous system.

[0345] AAV particles have been investigated for siRNA delivery because of several unique features. Non-limiting examples of the features include (i) the ability to infect both dividing and non-dividing cells; (ii) a broad host range for infectivity, including human cells; (iii) wild-type AAV has not been associated with any disease and has not been shown to replicate in infected cells; (iv) the lack of cell-mediated immune response against the vector and (v) the non-integrative nature in a host chromosome thereby reducing potential for long-term expression. Moreover, infection with AAV particles has minimal influence on changing the pattern of cellular gene expression (Stilwell and Samulski et al., Biotechniques, 2003, 34, 148-150; the contents of which are incorporated herein by reference in their entirety).

[0346] The encoded siRNA duplex of the present disclosure contains an antisense strand and a sense strand hybridized together forming a duplex structure, wherein the antisense strand is complementary to the nucleic acid sequence of the targeted gene, and wherein the sense strand is homologous to the nucleic acid sequence of the targeted gene. In some aspects, the 5′ end of the antisense strand has a 5′ phosphate group and the 3′ end of the sense strand contains a 3′ hydroxyl group. In other aspects, there are none, one or 2 nucleotide overhangs at the 3′ end of each strand.

[0347] According to the present disclosure, each strand of the siRNA duplex targeting a gene of interest is about 19 to 25, 19 to 24 or 19 to 21 nucleotides in length, preferably about 19 nucleotides, 20 nucleotides, 21 nucleotides, 22 nucleotides, 23 nucleotides, 24 nucleotides, or 25 nucleotides in length. In some aspects, the siRNAs may be unmodified RNA molecules.

[0348] In other aspects, the siRNAs may contain at least one modified nucleotide, such as base, sugar or backbone modification.

[0349] In some embodiments, an siRNA or dsRNA includes at least two sequences that are complementary to each other. The dsRNA includes a sense strand having a first sequence and an antisense strand having a second sequence. The antisense strand includes a nucleotide sequence that is substantially complementary to at least part of an mRNA encoding the target gene, and the region of complementarity is 30 nucleotides or less, and at least 15 nucleotides in length. Generally, the dsRNA is 19 to 25, 19 to 24 or 19 to 21 nucleotides in length. In some embodiments, the dsRNA is from about 15 to about 25 nucleotides in length, and in other embodiments the dsRNA is from about 25 to about 30 nucleotides in length. In some embodiments, the dsRNA is about 15 nucleotides in length, 16 nucleotides in length, 17 nucleotides in length, 18 nucleotides in length, 19 nucleotides, 20 nucleotides, 21 nucleotides, 22 nucleotides, 23 nucleotides, 24 nucleotides, 25 nucleotides in length, 26 nucleotides in length, 27 nucleotides in length, 28 nucleotides in length, 29 nucleotides in length, or 30 nucleotides in length.

[0350] The dsRNA, whether directly administered or encoded in an expression vector, i.e. the AAV particle, upon contacting with a cell expressing the target protein, inhibits the expression of the protein by at least 10%, at least 15%, at least 20%, at least 25%, at least 30%, at least 35% or at least 40% or more, such as when assayed by a method as described herein.

[0351] According to the present disclosure, the siRNA duplexes or dsRNA molecules are designed and tested for their ability in reducing expression of the target gene (e.g., mRNA levels of the target gene) in cultured cells. siRNA design tools are available in the art. Any commercial software may be used to design the siRNA duplexes against a gene of interest.

[0352] According to the present disclosure, AAV particles comprising a payload region having the nucleic acids of the siRNA duplexes, one strand of the siRNA duplex or the dsRNA targeting a gene of interest are produced, the AAV particle serotypes may be or may include a capsid and/or a peptide insert such as, but not limited to VOY101, VOY201, VOY701, VOY801, VOY1101, AAVPHP.B (PHP.B), AAVPHP.A (PUPA), AAVG2B-26, AAVG2B-13, AAVTH1.1-32, AAVTH1.1-35, AAVPHP.B2 (PHP.B2), AAVPHP.B3 (PHP.B3), AAVPHP.N/PHP.B-DGT, AAVPHP.B-EST, AAVPHP.B-GGT, AAVPHP.B-ATP, AAVPHP.B-ATT-T, AAVPHP.B-DGT-T, AAVPHP.B-GGT-T, AAVPHP.B-SGS, AAVPHP.B-AQP, AAVPHP.B-QQP, AAVPHP.B-SNP(3), AAVPHP.B-SNP, AAVPHP.B-QGT, AAVPHP.B-NQT, AAVPHP.B-EGS, AAVPHP.B-SGN, AAVPHP.B-EGT, AAVPHP.B-DST, AAVPHP.B-DST, AAVPHP.B-STP, AAVPHP.B-PQP, AAVPHP.B-SQP, AAVPHP.B-QLP, AAVPHP.B-TMP, AAVPHP.B-TTP, AAVPHP.S/G2A12, AAVG2A15/G2A3 (G2A3), AAVG2B4 (G2B4), AAVG2B5 (G2B5), PHP.S, AAV1, AAV2, AAV2G9, AAV3, AAV3a, AAV3b, AAV3-3, AAV4, AAV4-4, AAV5, AAV6, AAV6.1, AAV6.2, AAV6.1.2, AAV7, AAV7.2, AAV8, AAV9, AAV9.11, AAV9.13, AAV9.16, AAV9.24, AAV9.45, AAV9.47, AAV9.61, AAV9.68, AAV9.84, AAV9.9, AAV10, AAV11, AAV12, AAV16.3, AAV24.1, AAV27.3, AAV42.12, AAV42-1b, AAV42-2, AAV42-3a, AAV42-3b, AAV42-4, AAV42-5a, AAV42-5b, AAV42-6b, AAV42-8, AAV42-10, AAV42-11, AAV42-12, AAV42-13, AAV42-15, AAV42-aa, AAV43-1, AAV43-12, AAV43-20, AAV43-21, AAV43-23, AAV43-25, AAV43-5, AAV44.1, AAV44.2, AAV44.5, AAV223.1, AAV223.2, AAV223.4, AAV223.5, AAV223.6, AAV223.7, AAV1-7/rh.48, AAV1-8/rh.49, AAV2-15/rh.62, AAV2-3/rh.61, AAV2-4/rh.50, AAV2-5/rh.51, AAV3.1/hu.6, AAV3.1/hu.9, AAV3-9/rh.52, AAV3-11/rh.53, AAV4-8/r11.64, AAV4-9/rh.54, AAV4-19/rh.55, AAV5-3/rh.57, AAV5-22/rh.58, AAV7.3/hu.7, AAV16.8/hu.10, AAV16.12/hu.11, AAV29.3/bb.1, AAV29.5/bb.2, AAV106.1/hu.37, AAV114.3/hu.40, AAV127.2/hu.41, AAV127.5/hu.42, AAV128.3/hu.44, AAV130.4/hu.48, AAV145.1/hu.53, AAV145.5/hu.54, AAV145.6/hu.55, AAV161.10/hu.60, AAV161.6/hu.61, AAV33.12/hu.17, AAV33.4/hu.15, AAV33.8/hu.16, AAV52/hu.19, AAV52.1/hu.20, AAV58.2/hu.25, AAVA3.3, AAVA3.4, AAVA3.5, AAVA3.7, AAVC1, AAVC2, AAVC5, AAV-DJ, AAV-DJ8, AAVF3, AAVF5, AAVH2, AAVrh.72, AAVhu.8, AAVrh.68, AAVrh.70, AAVpi.1, AAVpi.3, AAVpi.2, AAVrh.60, AAVrh.44, AAVrh.65, AAVrh.55, AAVrh.47, AAVrh.69, AAVrh.45, AAVrh.59, AAVhu.12, AAVH6, AAVLK03, AAVH-1/hu.1, AAVH-5/hu.3, AAVLG-10/rh.40, AAVLG-4/rh.38, AAVLG-9/hu.39, AAVN721-8/rh.43, AAVCh.5, AAVCh.5R1, AAVcy.2, AAVcy.3, AAVcy.4, AAVcy.5, AAVCy.5R1, AAVCy.5R2, AAVCy.5R3, AAVCy.5R4, AAVcy.6, AAVhu.1, AAVhu.2, AAVhu.3, AAVhu.4, AAVhu.5, AAVhu.6, AAVhu.7, AAVhu.9, AAVhu.10, AAVhu.11, AAVhu.13, AAVhu.15, AAVhu.16, AAVhu.17, AAVhu.18, AAVhu.20, AAVhu.21, AAVhu.22, AAVhu.23.2, AAVhu.24, AAVhu.25, AAVhu.27, AAVhu.28, AAVhu.29, AAVhu.29R, AAVhu.31, AAVhu.32, AAVhu.34, AAVhu.35, AAVhu.37, AAVhu.39, AAVhu.40, AAVhu.41, AAVhu.42, AAVhu.43, AAVhu.44, AAVhu.44R1, AAVhu.44R2, AAVhu.44R3, AAVhu.45, AAVhu.46, AAVhu.47, AAVhu.48, AAVhu.48R1, AAVhu.48R2, AAVhu.48R3, AAVhu.49, AAVhu.51, AAVhu.52, AAVhu.54, AAVhu.55, AAVhu.56, AAVhu.57, AAVhu.58, AAVhu.60, AAVhu.61, AAVhu.63, AAVhu.64, AAVhu.66, AAVhu.67, AAVhu.14/9, AAVhu.t 19, AAVrh.2, AAVrh.2R, AAVrh.8, AAVrh.8R, AAVrh.10, AAVrh.12, AAVrh.13, AAVrh.13R, AAVrh.14, AAVrh.17, AAVrh.18, AAVrh.19, AAVrh.20, AAVrh.21, AAVrh.22, AAVrh.23, AAVrh.24, AAVrh.25, AAVrh.31, AAVrh.32, AAVrh.33, AAVrh.34, AAVrh.35, AAVrh.36, AAVrh.37, AAVrh.37R2, AAVrh.38, AAVrh.39, AAVrh.40, AAVrh.46, AAVrh.48, AAVrh.48.1, AAVrh.48.1.2, AAVrh.48.2, AAVrh.49, AAVrh.51, AAVrh.52, AAVrh.53, AAVrh.54, AAVrh.56, AAVrh.57, AAVrh.58, AAVrh.61, AAVrh.64, AAVrh.64R1, AAVrh.64R2, AAVrh.67, AAVrh.73, AAVrh.74, AAVrh8R, AAVrh8R A586R mutant, AAVrh8R R533A mutant, AAAV, BAAV, caprine AAV, bovine AAV, AAVhE1.1, AAVhEr1.5, AAVhER1.14, AAVhEr1.8, AAVhEr1.16, AAVhEr1.18, AAVhEr1.35, AAVhEr1.7, AAVhEr1.36, AAVhEr2.29, AAVhEr2.4, AAVhEr2.16, AAVhEr2.30, AAVhEr2.31, AAVhEr2.36, AAVhER1.23, AAVhEr3.1, AAV2.5T, AAV-PAEC, AAV-LK01, AAV-LK02, AAV-LK03, AAV-LK04, AAV-LK05, AAV-LK06, AAV-LK07, AAV-LK08, AAV-LK09, AAV-LK10, AAV-LK11, AAV-LK12, AAV-LK13, AAV-LK14, AAV-LK15, AAV-LK16, AAV-LK17, AAV-LK18, AAV-LK19, AAV-PAEC2, AAV-PAEC4, AAV-PAEC6, AAV-PAEC7, AAV-PAEC8, AAV-PAEC11, AAV-PAEC12, AAV-2-pre-miRNA-101, AAV-8h, AAV-8b, AAV-h, AAV-b, AAV SM 10-2, AAV Shuffle 100-1, AAV Shuffle 100-3, AAV Shuffle 100-7, AAV Shuffle 10-2, AAV Shuffle 10-6, AAV Shuffle 10-8, AAV Shuffle 100-2, AAV SM 10-1, AAV SM 10-8, AAV SM 100-3, AAV SM 100-10, BNP61 AAV, BNP62 AAV, BNP63 AAV, AAVrh.50, AAVrh.43, AAVrh.62, AAVrh.48, AAVhu.19, AAVhu.11, AAVhu.53, AAV4-8/rh.64, AAVLG-9/hu.39, AAV54.5/hu.23, AAV54.2/hu.22, AAV54.7/hu.24, AAV54.1/hu.21, AAV54.4R/hu.27, AAV46.2/hu.28, AAV46.6/hu.29, AAV128.1/hu.43, true type AAV (ttAAV), UPENN AAV 10, Japanese AAV 10 serotypes, AAV CBr-7.1, AAV CBr-7.10, AAV CBr-7.2, AAV CBr-7.3, AAV CBr-7.4, AAV CBr-7.5, AAV CBr-7.7, AAV CBr-7.8, AAV CBr-B7.3, AAV CBr-B7.4, AAV CBr-E1, AAV CBr-E2, AAV CBr-E3, AAV CBr-E4, AAV CBr-E5, AAV CBr-e5, AAV CBr-E6, AAV CBr-E7, AAV CBr-E8, AAV CHt-1, AAV CHt-2, AAV CHt-3, AAV CHt-6.1, AAV CHt-6.10, AAV CHt-6.5, AAV CHt-6.6, AAV CHt-6.7, AAV CHt-6.8, AAV CHt-P1, AAV CHt-P2, AAV CHt-P5, AAV CHt-P6, AAV CHt-P8, AAV CHt-P9, AAV CKd-1, AAV CKd-10, AAV CKd-2, AAV CKd-3, AAV CKd-4, AAV CKd-6, AAV CKd-7, AAV CKd-8, AAV CKd-B1, AAV CKd-B2, AAV CKd-B3, AAV CKd-B4, AAV CKd-B5, AAV CKd-B6, AAV CKd-B7, AAV CKd-B8, AAV CKd-H1, AAV CKd-H2, AAV CKd-H3, AAV CKd-H4, AAV CKd-H5, AAV CKd-H6, AAV CKd-N3, AAV CKd-N4, AAV CKd-N9, AAV CLg-F1, AAV CLg-F2, AAV CLg-F3, AAV CLg-F4, AAV CLg-F5, AAV CLg-F6, AAV CLg-F7, AAV CLg-F8, AAV CLv-1, AAV CLv1-1, AAV Clv1-10, AAV CLv1-2, AAV CLv-12, AAV CLv1-3, AAV CLv-13, AAV CLv1-4, AAV Clv1-7, AAV Clv1-8, AAV Clv1-9, AAV CLv-2, AAV CLv-3, AAV CLv-4, AAV CLv-6, AAV CLv-8, AAV CLv-D1, AAV CLv-D2, AAV CLv-D3, AAV CLv-D4, AAV CLv-D5, AAV CLv-D6, AAV CLv-D7, AAV CLv-D8, AAV CLv-E1, AAV CLv-K1, AAV CLv-K3, AAV CLv-K6, AAV CLv-L4, AAV CLv-L5, AAV CLv-L6, AAV CLv-M1, AAV CLv-M11, AAV CLv-M2, AAV CLv-M5, AAV CLv-M6, AAV CLv-M7, AAV CLv-M8, AAV CLv-M9, AAV CLv-R1, AAV CLv-R2, AAV CLv-R3, AAV CLv-R4, AAV CLv-R5, AAV CLv-R6, AAV CLv-R7, AAV CLv-R8, AAV CLv-R9, AAV CSp-1, AAV CSp-10, AAV CSp-11, AAV CSp-2, AAV CSp-3, AAV CSp-4, AAV CSp-6, AAV CSp-7, AAV CSp-8, AAV CSp-8.10, AAV CSp-8.2, AAV CSp-8.4, AAV CSp-8.5, AAV CSp-8.6, AAV CSp-8.7, AAV CSp-8.8, AAV CSp-8.9, AAV CSp-9, AAV.hu.48R3, AAV.VR-355, AAV3B, AAV4, AAV5, AAVF1/HSC1, AAVF11/HSC11, AAVF12/HSC12, AAVF13/HSC13, AAVF14/HSC14, AAVF15/HSC15, AAVF16/HSC16, AAVF17/HSC17, AAVF2/HSC2, AAVF3/HSC3, AAVF4/HSC4, AAVF5/HSC5, AAVF6/HSC6, AAVF7/HSC7, AAVF8/HSC8, and/or AAVF9/HSC9 and variants thereof. In some embodiments, the AAV particle contains a payload comprising a nucleic acid sequence encoding an siRNA duplex, one strand of the siRNA duplex, or dsRNA and may comprise the serotype of VOY101. In some embodiments, the AAV particle contains a payload comprising a nucleic acid sequence encoding a siRNA duplex, one strand of the siRNA duplex, or dsRNA and may comprise the serotype of VOY201. In some embodiments, the AAV contains a payload comprising a nucleic acid sequence encoding a siRNA duplex, one strand of the siRNA duplex, or dsRNA and may comprise the serotype of VOY701. In some embodiments, the AAV contains a payload comprising a nucleic acid sequence encoding a siRNA duplex, one strand of the siRNA duplex, or dsRNA and may comprise the serotype of VOY801. In some embodiments, the AAV particle contains a payload comprising a nucleic acid sequence encoding a siRNA duplex, one strand of the siRNA duplex, or dsRNA and may comprise the serotype of VOY1101.

[0353] In some embodiments, the siRNA duplexes or encoded dsRNA molecules may be used to reduce the expression of target protein by at least about 30%, 40%, 50%, 60%, 70%, 80%, 85%, 90%, 95% and 100%, or at least 20-30%, 20-40%, 20-50%, 20-60%, 20-70%, 20-80%, 20-90%, 20-95%, 20-100%, 30-40%, 30-50%, 30-60%, 30-70%, 30-80%, 30-90%, 30-95%, 30-100%, 40-50%, 40-60%, 40-70%, 40-80%, 40-90%, 40-95%, 40-100%, 50-60%, 50-70%, 50-80%, 50-90%, 50-95%, 50-100%, 60-70%, 60-80%, 60-90%, 60-95%, 60-100%, 70-80%, 70-90%, 70-95%, 70-100%, 80-90%, 80-95%, 80-100%, 90-95%, 90-100% or 95-100%. As a non-limiting example, the expression of target protein expression may be reduced 50-90%.

[0354] In some embodiments, the siRNA duplexes or encoded dsRNA molecules may be used to reduce the expression of target protein and/or mRNA in at least one region of the CNS. The expression of target protein and/or mRNA is reduced by at least about 30%, 40%, 50%, 60%, 70%, 80%, 85%, 90%, 95% and 100%, or at least 20-30%, 20-40%, 20-50%, 20-60%, 20-70%, 20-80%, 20-90%, 20-95%, 20-100%, 30-40%, 30-50%, 30-60%, 30-70%, 30-80%, 30-90%, 30-95%, 30-100%, 40-50%, 40-60%, 40-70%, 40-80%, 40-90%, 40-95%, 40-100%, 50-60%, 50-70%, 50-80%, 50-90%, 50-95%, 50-100%, 60-70%, 60-80%, 60-90%, 60-95%, 60-100%, 70-80%, 70-90%, 70-95%, 70-100%, 80-90%, 80-95%, 80-100%, 90-95%, 90-100% or 95-100% in at least one region of the CNS.

[0355] As a non-limiting example, the expression of target protein and/or mRNA is reduced in the cerebellum of the brain by 50%-90%. As a non-limiting example, the expression of target protein and/or mRNA is reduced in the cerebrum of the brain by 50%-90%. As a non-limiting example, the expression of target protein and/or mRNA is reduced in the brainstem of the brain by 50%-90%. As a non-limiting example, the expression of target protein and mRNA in the neurons (e.g., cortical neurons) is reduced by 50-90%. As a non-limiting example, the expression of target protein and mRNA in the neurons (e.g., cortical neurons) is reduced by 40-50%.

[0356] In some embodiments, the payload comprising the nucleic acid sequence of at least one siRNA duplex targeting a gene of interest may be packaged into an AAV particle that can transduce the blood-brain barrier upon delivery of the AAV particle. The AAV particle serotype may be or include capsid and/or a peptide insert such as but not limited to VOY101, VOY201, VOY701, VOY801, VOY1101, AAVPHP.B (PHP.B), AAVPHP.A (PHP.A), AAVG2B-26, AAVG2B-13, AAVTH1.1-32, AAVTH1.1-35, AAVPHP.B2 (PHP.B2), AAVPHP.B3 (PHP.B3), AAVPHP.N/PHP.B-DGT, AAVPHP.B-EST, AAVPHP.B-GGT, AAVPHP.B-ATP, AAVPHP.B-ATT-T, AAVPHP.B-DGT-T, AAVPHP.B-GGT-T, AAVPHP.B-SGS, AAVPHP.B-AQP, AAVPHP.B-QQP, AAVPHP.B-SNP(3), AAVPHP.B-SNP, AAVPHP.B-QGT, AAVPHP.B-NQT, AAVPHP.B-EGS, AAVPHP.B-SGN, AAVPHP.B-EGT, AAVPHP.B-DST, AAVPHP.B-DST, AAVPHP.B-STP, AAVPHP.B-PQP, AAVPHP.B-SQP, AAVPHP.B-QLP, AAVPHP.B-TMP, AAVPHP.B-TTP, AAVPHP.S/G2A12, AAVG2A15/G2A3 (G2A3), AAVG2B4 (G2B4), AAVG2B5, PHP.S, AAV1, AAV2, AAV2G9, AAV3, AAV3a, AAV3b, AAV3-3, AAV4, AAV4-4, AAV5, AAV6, AAV6.1, AAV6.2, AAV6.1.2, AAV7, AAV7.2, AAV8, AAV9, AAV9.11, AAV9.13, AAV9.16, AAV9.24, AAV9.45, AAV9.47, AAV9.61, AAV9.68, AAV9.84, AAV9.9, AAV10, AAV11, AAV12, AAV16.3, AAV24.1, AAV27.3, AAV42.12, AAV42-1b, AAV42-2, AAV42-3a, AAV42-3b, AAV42-4, AAV42-5a, AAV42-5b, AAV42-6b, AAV42-8, AAV42-10, AAV42-11, AAV42-12, AAV42-13, AAV42-15, AAV42-aa, AAV43-1, AAV43-12, AAV43-20, AAV43-21, AAV43-23, AAV43-25, AAV43-5, AAV44.1, AAV44.2, AAV44.5, AAV223.1, AAV223.2, AAV223.4, AAV223.5, AAV223.6, AAV223.7, AAV1-7/rh.48, AAV1-8/rh.49, AAV2-15/rh.62, AAV2-3/rh.61, AAV2-4/rh.50, AAV2-5/rh.51, AAV3.1/hu.6, AAV3.1/hu.9, AAV3-9/rh.52, AAV3-11/rh.53, AAV4-8/r11.64, AAV4-9/rh.54, AAV4-19/rh.55, AAV5-3/rh.57, AAV5-22/rh.58, AAV7.3/hu.7, AAV16.8/hu.10, AAV16.12/hu.11, AAV29.3/bb.1, AAV29.5/bb.2, AAV106.1/hu.37, AAV114.3/hu.40, AAV127.2/hu.41, AAV127.5/hu.42, AAV128.3/hu.44, AAV130.4/hu.48, AAV145.1/hu.53, AAV145.5/hu.54, AAV145.6/hu.55, AAV161.10/hu.60, AAV161.6/hu.61, AAV33.12/hu.17, AAV33.4/hu.15, AAV33.8/hu.16, AAV52/hu.19, AAV52.1/hu.20, AAV58.2/hu.25, AAVA3.3, AAVA3.4, AAVA3.5, AAVA3.7, AAVC1, AAVC2, AAVC5, AAV-DJ, AAV-DJ8, AAVF3, AAVF5, AAVH2, AAVrh.72, AAVhu.8, AAVrh.68, AAVrh.70, AAVpi.1, AAVpi.3, AAVpi.2, AAVrh.60, AAVrh.44, AAVrh.65, AAVrh.55, AAVrh.47, AAVrh.69, AAVrh.45, AAVrh.59, AAVhu.12, AAVH6, AAVLK03, AAVH-1/hu.1, AAVH-5/hu.3, AAVLG-10/rh.40, AAVLG-4/rh.38, AAVLG-9/hu.39, AAVN721-8/rh.43, AAVCh.5, AAVCh.5R1, AAVcy.2, AAVcy.3, AAVcy.4, AAVcy.5, AAVCy.5R1, AAVCy.5R2, AAVCy.5R3, AAVCy.5R4, AAVcy.6, AAVhu.1, AAVhu.2, AAVhu.3, AAVhu.4, AAVhu.5, AAVhu.6, AAVhu.7, AAVhu.9, AAVhu.10, AAVhu.11, AAVhu.13, AAVhu.15, AAVhu.16, AAVhu.17, AAVhu.18, AAVhu.20, AAVhu.21, AAVhu.22, AAVhu.23.2, AAVhu.24, AAVhu.25, AAVhu.27, AAVhu.28, AAVhu.29, AAVhu.29R, AAVhu.31, AAVhu.32, AAVhu.34, AAVhu.35, AAVhu.37, AAVhu.39, AAVhu.40, AAVhu.41, AAVhu.42, AAVhu.43, AAVhu.44, AAVhu.44R1, AAVhu.44R2, AAVhu.44R3, AAVhu.45, AAVhu.46, AAVhu.47, AAVhu.48, AAVhu.48R1, AAVhu.48R2, AAVhu.48R3, AAVhu.49, AAVhu.51, AAVhu.52, AAVhu.54, AAVhu.55, AAVhu.56, AAVhu.57, AAVhu.58, AAVhu.60, AAVhu.61, AAVhu.63, AAVhu.64, AAVhu.66, AAVhu.67, AAVhu.14/9, AAVhu.t 19, AAVrh.2, AAVrh.2R, AAVrh.8, AAVrh.8R, AAVrh.10, AAVrh.12, AAVrh.13, AAVrh.13R, AAVrh.14, AAVrh.17, AAVrh.18, AAVrh.19, AAVrh.20, AAVrh.21, AAVrh.22, AAVrh.23, AAVrh.24, AAVrh.25, AAVrh.31, AAVrh.32, AAVrh.33, AAVrh.34, AAVrh.35, AAVrh.36, AAVrh.37, AAVrh.37R2, AAVrh.38, AAVrh.39, AAVrh.40, AAVrh.46, AAVrh.48, AAVrh.48.1, AAVrh.48.1.2, AAVrh.48.2, AAVrh.49, AAVrh.51, AAVrh.52, AAVrh.53, AAVrh.54, AAVrh.56, AAVrh.57, AAVrh.58, AAVrh.61, AAVrh.64, AAVrh.64R1, AAVrh.64R2, AAVrh.67, AAVrh.73, AAVrh.74, AAVrh8R, AAVrh8R A586R mutant, AAVrh8R R533A mutant, AAAV, BAAV, caprine AAV, bovine AAV, AAVhE1.1, AAVhEr1.5, AAVhER1.14, AAVhEr1.8, AAVhEr1.16, AAVhEr1.18, AAVhEr1.35, AAVhEr1.7, AAVhEr1.36, AAVhEr2.29, AAVhEr2.4, AAVhEr2.16, AAVhEr2.30, AAVhEr2.31, AAVhEr2.36, AAVhER1.23, AAVhEr3.1, AAV2.5T, AAV-PAEC, AAV-LK01, AAV-LK02, AAV-LK03, AAV-LK04, AAV-LK05, AAV-LK06, AAV-LK07, AAV-LK08, AAV-LK09, AAV-LK10, AAV-LK11, AAV-LK12, AAV-LK13, AAV-LK14, AAV-LK15, AAV-LK16, AAV-LK17, AAV-LK18, AAV-LK19, AAV-PAEC2, AAV-PAEC4, AAV-PAEC6, AAV-PAEC7, AAV-PAEC8, AAV-PAEC11, AAV-PAEC12, AAV-2-pre-miRNA-101, AAV-8h, AAV-8b, AAV-h, AAV-b, AAV SM 10-2, AAV Shuffle 100-1, AAV Shuffle 100-3, AAV Shuffle 100-7, AAV Shuffle 10-2, AAV Shuffle 10-6, AAV Shuffle 10-8, AAV Shuffle 100-2, AAV SM 10-1, AAV SM 10-8, AAV SM 100-3, AAV SM 100-10, BNP61 AAV, BNP62 AAV, BNP63 AAV, AAVrh.50, AAVrh.43, AAVrh.62, AAVrh.48, AAVhu.19, AAVhu.11, AAVhu.53, AAV4-8/rh.64, AAVLG-9/hu.39, AAV54.5/hu.23, AAV54.2/hu.22, AAV54.7/hu.24, AAV54.1/hu.21, AAV54.4R/hu.27, AAV46.2/hu.28, AAV46.6/hu.29, AAV128.1/hu.43, true type AAV (ttAAV), UPENN AAV 10, Japanese AAV 10 serotypes, AAV CBr-7.1, AAV CBr-7.10, AAV CBr-7.2, AAV CBr-7.3, AAV CBr-7.4, AAV CBr-7.5, AAV CBr-7.7, AAV CBr-7.8, AAV CBr-B7.3, AAV CBr-B7.4, AAV CBr-E1, AAV CBr-E2, AAV CBr-E3, AAV CBr-E4, AAV CBr-E5, AAV CBr-e5, AAV CBr-E6, AAV CBr-E7, AAV CBr-E8, AAV CHt-1, AAV CHt-2, AAV CHt-3, AAV CHt-6.1, AAV CHt-6.10, AAV CHt-6.5, AAV CHt-6.6, AAV CHt-6.7, AAV CHt-6.8, AAV CHt-P1, AAV CHt-P2, AAV CHt-P5, AAV CHt-P6, AAV CHt-P8, AAV CHt-P9, AAV CKd-1, AAV CKd-10, AAV CKd-2, AAV CKd-3, AAV CKd-4, AAV CKd-6, AAV CKd-7, AAV CKd-8, AAV CKd-B1, AAV CKd-B2, AAV CKd-B3, AAV CKd-B4, AAV CKd-B5, AAV CKd-B6, AAV CKd-B7, AAV CKd-B8, AAV CKd-H1, AAV CKd-H2, AAV CKd-H3, AAV CKd-H4, AAV CKd-H5, AAV CKd-H6, AAV CKd-N3, AAV CKd-N4, AAV CKd-N9, AAV CLg-F1, AAV CLg-F2, AAV CLg-F3, AAV CLg-F4, AAV CLg-F5, AAV CLg-F6, AAV CLg-F7, AAV CLg-F8, AAV CLv-1, AAV CLv1-1, AAV Clv1-10, AAV CLv1-2, AAV CLv-12, AAV CLv1-3, AAV CLv-13, AAV CLv1-4, AAV Clv1-7, AAV Clv1-8, AAV Clv1-9, AAV CLv-2, AAV CLv-3, AAV CLv-4, AAV CLv-6, AAV CLv-8, AAV CLv-D1, AAV CLv-D2, AAV CLv-D3, AAV CLv-D4, AAV CLv-D5, AAV CLv-D6, AAV CLv-D7, AAV CLv-D8, AAV CLv-E1, AAV CLv-K1, AAV CLv-K3, AAV CLv-K6, AAV CLv-L4, AAV CLv-L5, AAV CLv-L6, AAV CLv-M1, AAV CLv-M11, AAV CLv-M2, AAV CLv-M5, AAV CLv-M6, AAV CLv-M7, AAV CLv-M8, AAV CLv-M9, AAV CLv-R1, AAV CLv-R2, AAV CLv-R3, AAV CLv-R4, AAV CLv-R5, AAV CLv-R6, AAV CLv-R7, AAV CLv-R8, AAV CLv-R9, AAV CSp-1, AAV CSp-10, AAV CSp-11, AAV CSp-2, AAV CSp-3, AAV CSp-4, AAV CSp-6, AAV CSp-7, AAV CSp-8, AAV CSp-8.10, AAV CSp-8.2, AAV CSp-8.4, AAV CSp-8.5, AAV CSp-8.6, AAV CSp-8.7, AAV CSp-8.8, AAV CSp-8.9, AAV CSp-9, AAV.hu.48R3, AAV.VR-355, AAV3B, AAV4, AAV5, AAVF1/HSC1, AAVF11/HSC11, AAVF12/HSC12, AAVF13/HSC13, AAVF14/HSC14, AAVF15/HSC15, AAVF16/HSC16, AAVF17/HSC17, AAVF2/HSC2, AAVF3/HSC3, AAVF4/HSC4, AAVF5/HSC5, AAVF6/HSC6, AAVF7/HSC7, AAVF8/HSC8, and/or AAVF9/HSC9 and variants thereof. In some embodiments the AAV serotype is VOY101, or a variant thereof. In some embodiments the AAV serotype is VOY201, or a variant thereof. In some embodiments the AAV serotype is VOY701, or a variant thereof. In some embodiments the AAV serotype is VOY801, or a variant thereof. In some embodiments the AAV serotype is VOY1101, or a variant thereof.

[0357] In some embodiments, a payload comprising the nucleic acid sequence of at least one siRNA duplex targeting a gene of interest may be delivered using an AAVPHP.B particle (an AAV particle comprising a PHP.B peptide insert) to the subject in need for treating and/or ameliorating a neurological disease.

[0358] In some embodiments, a payload comprising the nucleic acid sequence of at least one siRNA duplex targeting a gene of interest may be administered using an AAVPHP.A particle (an AAV particle comprising a PHP.A peptide insert) to the subject in need for treating and/or ameliorating a neurological disease.

[0359] In some embodiments, a payload comprising the nucleic acid sequence of at least one siRNA duplex targeting a gene of interest may be administered using an AAVPHP.N particle (an AAV particle comprising a PHP.N peptide insert) to the subject in need for treating and/or ameliorating a neurological disease.

[0360] In some embodiments, a payload comprising the nucleic acid sequence of at least one siRNA duplex targeting a gene of interest may be administered using an AAV particle comprising a PHP.S peptide insert to the subject in need for treating and/or ameliorating a neurological disease.

[0361] In some embodiments, a payload comprising the nucleic acid sequence of at least one siRNA duplex targeting a gene of interest may be administered using a VOY101 AAV particle to the subject in need for treating and/or ameliorating a neurological disease. In some embodiments, the VOY101 capsid comprises the amino acid sequence of SEQ ID NO. 1. In some embodiments, the VOY101 capsid comprises the nucleic acid sequence of SEQ ID NO. 1809.

[0362] In some embodiments, a payload comprising the nucleic acid sequence of at least one siRNA duplex targeting a gene of interest may be administered using a VOY201 AAV particle to the subject in need for treating and/or ameliorating a neurological disease. In some embodiments, the VOY201 capsid comprises the amino acid sequence of SEQ ID NO. 1823. In some embodiments, the VOY201 capsid comprises the nucleic acid sequence of SEQ ID NO. 1810.

[0363] In some embodiments, a payload comprising the nucleic acid sequence encoding at least one siRNA duplex targeting a gene of interest may be administered using a VOY701 AAV particle to the subject in need for treating and/or ameliorating a neurological disease. In some embodiments, the VOY701 capsid comprises the nucleic acid sequence of SEQ ID NO. 1828. In some embodiments, the VOY701 capsid comprises the amino acid sequence of SEQ ID NO: 1829.

[0364] In some embodiments, a payload comprising the nucleic acid sequence encoding at least one siRNA duplex targeting a gene of interest may be administered using a VOY801 AAV particle to the subject in need for treating and/or ameliorating a neurological disease. In some embodiments, the VOY801 capsid comprises the nucleic acid sequence of SEQ ID NO. 1824.

[0365] In some embodiments, a payload comprising the nucleic acid sequence encoding at least one siRNA duplex targeting a gene of interest may be administered using a VOY1101 AAV particle to the subject in need for treating and/or ameliorating a neurological disease. In some embodiments, the VOY1101 capsid comprises the nucleic acid sequence of SEQ ID NO. 1825.

[0366] In some embodiments, a payload comprising the nucleic acid sequence of at least one siRNA duplex targeting a gene of interest may be administered using a variant of the AAV9 particle to the subject in need for treating and/or ameliorating a neurological disease.

[0367] In some embodiments, a first AAV particle comprising the nucleic acid sequence of at least one siRNA duplex (e.g., payload) targeting a gene of interest may be selected for administration to a subject, where the first AAV particle provides a higher level of viral genome to cells (e.g., astrocytes) as compared to a second AAV particle comprising the same payload. In some embodiments, the level of the first particle may provide 0.1, 0.2, 0.3, 0.4, 0.5, 0.6, 0.7, 0.8, 0.9, 1, 2, 3, 4, 5, 6, 7, 8, 9 or more than 9 times higher in cells (e.g., astrocytes) as compared to the level in cells of a subject of the second particle. In some embodiments, the level of the first particle may be 1%, 2%, 3%, 4%, 5%, 6%, 7%, 8%, 9%, 10%, 15%, 20%, 25%, 30%, 35%, 40%, 45%, 50%, 55%, 60%, 65%, 70%, 75%, 80%, 85%, 90%, 95%, 99% or more than 99% higher than the level of the second particle in cells (e.g., astrocytes). In some embodiments, the level of the first particle may be 1-10%, 5-10%, 10-15%, 10-20%, 15-20%, 20-30%, 25-30%, 25-35%, 30-35%, 30-40%, 35-40%, 35-45%, 40-45%, 40-50%, 45-50%, 45-55%, 50-55%, 50-60%, 55-60%, 55-65%, 60-65%, 60-70%, 65-70%, 65-75%, 70-75%, 70-80%, 75-80%, 75-85%, 80-85%, 80-90%, 85-90%, 85-95%, 90-95%, 90-99%, or 95-99% higher than the level of the second particle in cells (e.g., astrocytes). In some embodiments, the first and second AAV particles have different serotypes.

[0368] In some embodiments, a first AAV particle comprising the nucleic acid sequence of at least one siRNA duplex targeting the gene of interest may be selected for administration to a subject, where the particle provides a higher viral genome to the astrocytes as compared to the amount seen in the liver of the subject. The first AAV particle may provide 1, 2, 3, 4, 5, 6, 7, 8, 9 or more than 9 times more viral genome to the astrocytes as compared to the amount in the liver.

[0369] In some embodiments, the siRNA duplexes targeting a gene of interest may be used as a solo therapy or in combination therapy for treatment of a disease, e.g., a neurological disease. In some embodiments, the siRNA duplexes targeting a gene of interest may be introduced directly into the CNS of a subject in need, for example, by infusion into the putamen, thalamus, and/or white matter.

siRNA Molecules

[0370] The present disclosure relates to RNA interference (RNAi) induced inhibition of gene expression for treating neurological disorders. Provided herein are siRNA duplexes or encoded dsRNA that target a gene of interest (referred to herein collectively as “siRNA molecules”). Such siRNA duplexes or encoded dsRNA can reduce or silence target gene expression in cells, for example, astrocytes or microglia, cortical, hippocampal, entorhinal, thalamic, sensory or motor neurons, thereby, ameliorating symptoms of neurological disease.

[0371] RNAi (also known as post-transcriptional gene silencing (PTGS), quelling, or co-suppression) is a post-transcriptional gene silencing process in which RNA molecules, in a sequence specific manner, inhibit gene expression, typically by causing the destruction of specific mRNA molecules. The active components of RNAi are short/small double stranded RNAs (dsRNAs), called small interfering RNAs (siRNAs), that typically contain 15-30 nucleotides (e.g., 19 to 25, 19 to 24 or 19-21 nucleotides) and 2 nucleotide 3′ overhangs and that match the nucleic acid sequence of the target gene. These short RNA species may be naturally produced in vivo by Dicer-mediated cleavage of larger dsRNAs and they are functional in mammalian cells.

[0372] Naturally expressed small RNA molecules, named microRNAs (miRNAs), elicit gene silencing by regulating the expression of mRNAs. The miRNAs containing RNA Induced Silencing Complex (RISC) targets mRNAs presenting a perfect sequence complementarity with nucleotides 2-7 in the 5′ region of the miRNA which is called the seed region, and other base pairs with its 3′ region. miRNA mediated down regulation of gene expression may be caused by cleavage of the target mRNAs, translational inhibition of the target mRNAs, or mRNA decay. miRNA targeting sequences are usually located in the 3′-UTR of the target mRNAs. A single miRNA may target more than 100 transcripts from various genes, and one mRNA may be targeted by different miRNAs.

[0373] siRNA duplexes or dsRNA targeting a specific mRNA may be designed and synthesized in vitro and introduced into cells for activating RNAi processes. Elbashir et al. demonstrated that 21-nucleotide siRNA duplexes (termed small interfering RNAs) were capable of effecting potent and specific gene knockdown without inducing immune response in mammalian cells (Elbashir S M et al., Nature, 2001, 411, 494-498). Since this initial report, post-transcriptional gene silencing by siRNAs quickly emerged as a powerful tool for genetic analysis in mammalian cells and has the potential to produce novel therapeutics.

[0374] In vitro synthesized siRNA molecules may be introduced into cells in order to activate RNAi. An exogenous siRNA duplex, when it is introduced into cells, similar to the endogenous dsRNAs, can be assembled to form the RNA Induced Silencing Complex (RISC), a multiunit complex that facilitates searching through the genome for RNA sequences that are complementary to one of the two strands of the siRNA duplex (i.e., the antisense strand). During the process, the sense strand (or passenger strand) of the siRNA is lost from the complex, while the antisense strand (or guide strand) of the siRNA is matched with its complementary RNA. In particular, the targets of siRNA containing RISC complex are mRNAs presenting a perfect sequence complementarity. Then, siRNA mediated gene silencing occurs, cleaving, releasing and degrading the target.

[0375] The siRNA duplex comprised of a sense strand homologous to the target mRNA and an antisense strand that is complementary to the target mRNA offers much more advantage in terms of efficiency for target RNA destruction compared to the use of the single strand (ss)-siRNAs (e.g. antisense strand RNA or antisense oligonucleotides). In many cases it requires higher concentration of the ss-siRNA to achieve the effective gene silencing potency of the corresponding duplex.

[0376] Any of the foregoing molecules may be encoded by an AAV particle or viral genome.

### Target Genes

[0377] Non-limiting examples of the neurological diseases which may be treated with the modulatory polynucleotides described herein include tauopathies, Alzheimer Disease, Huntington's Disease, and/or Amyotrophic Lateral Sclerosis. Target genes may be any of the genes associated with any neurological disease such as, but not limited to, those listed herein.

[0378] In some embodiments, the target gene is an allele of the apolipoprotein E (APOE) gene (e.g., ApoE2, ApoE3, and/or ApoE4). As a non-limiting example, the target gene is APOE and the target gene has one of the sequences taught in Table 2, a fragment or variant thereof.

[0379] In another embodiment, the target gene is superoxide dismutase (SOD1), e.g., human SOD1. As a non-limiting example, the target gene is SOD1 and the target gene has a sequence of SEQ ID NO: 1753 (NCBI reference number NM_000454.4), a fragment or variant thereof.

[0380] In another embodiment, the target gene is huntingtin (HTT), e.g., human HTT. As a non-limiting example, the target gene is HTT and the target gene has a sequence of SEQ ID NO: 1754 (NCBI reference number NM_002111.7), a fragment or variant thereof. As a non-limiting example, the target gene is HTT and the target gene encodes an amino acid sequence of SEQ ID NO: 1755 (NCBI reference number NP_002102.4), a fragment or variant thereof.

[0381] In yet another embodiment, the target gene is microtubule-associated protein tau (MAPT). As a non-limiting example, the target gene is MAPT and the target gene has a sequence of any of the nucleic acid sequences shown in Table 9, a fragment or variant thereof. As a non-limiting example, the target gene is MAPT and the target gene encodes an amino acid sequence of any of the amino acid sequences shown in Table 9, a fragment or variant thereof.

TABLE 9
Microtubule-Associated Protein Tau Sequences

| Identification | Reference | SEQ ID NO |
|---|---|---|
| MAPT SEQ-001 | NP_058519.3 | 1756 |
| MAPT SEQ-002 | NP_005901.2 | 1757 |
| MAPT SEQ-003 | NP_058518.1 | 1758 |
| MAPT SEQ-004 | NP_058525.1 | 1759 |
| MAPT SEQ-005 | NP_001116539.1 | 1760 |
| MAPT SEQ-006 | NP_001116538.2 | 1761 |
| MAPT SEQ-007 | NP_001190180.1 | 1762 |
| MAPT SEQ-008 | NP_001190181.1 | 1763 |
| MAPT SEQ-009 | NM_016835.4 | 1764 |
| MAPT SEQ-010 | NM_005910.5 | 1765 |
| MAPT SEQ-011 | NM_016834.4 | 1766 |
| MAPT SEQ-012 | NM_016841.4 | 1767 |
| MAPT SEQ-013 | NM_001123067.3 | 1768 |
| MAPT SEQ-014 | NM_001123066.3 | 1769 |
| MAPT SEQ-015 | NM_001203251.1 | 1770 |
| MAPT SEQ-016 | NM_001203252.1 | 1771 |

[0382] In some embodiments, the target gene may be a gene when overexpressed or mutated, causing a neurological disorder, for example, MECP2 (methyl CpG binding protein 2 gene), and RCAN1 (Regulator of Calcineurin 1).

Design and Sequences of siRNA Duplexes

[0383] Some guidelines for designing siRNAs have been proposed in the art. These guidelines generally recommend generating a 19-nucleotide duplexed region, symmetric 2-3 nucleotide 3′ overhangs, 5-phosphate and 3-hydroxyl groups targeting a region in the gene to be silenced. Other rules that may govern siRNA sequence preference include, but are not limited to, (i) A/U at the 5′ end of the antisense strand; (ii) G/C at the 5′ end of the sense strand; (iii) at least five A/U residues in the 5′ terminal one-third of the antisense strand; and (iv) the absence of any GC stretch of more than 9 nucleotides in length. In accordance with such consideration, together with the specific sequence of a target gene, highly effective siRNA molecules essential for suppressing mammalian target gene expression may be readily designed.

[0384] According to the present disclosure, siRNA molecules (e.g., siRNA duplexes or encoded dsRNA) that target a gene of interest are designed. Such siRNA molecules can specifically, suppress target gene expression and protein production. In some aspects, the siRNA molecules are designed and used to selectively “knock out” target gene variants in cells, i.e., transcripts that are identified in neurological disease. In some aspects, the siRNA molecules are designed and used to selectively “knock down” target gene variants in cells.

[0385] In some embodiments, an siRNA molecule of the present disclosure comprises a sense strand and a complementary antisense strand in which both strands are hybridized together to form a duplex structure. The antisense strand has sufficient complementarity to the target mRNA sequence to direct target-specific RNAi, i.e., the siRNA molecule has a sequence sufficient to trigger the destruction of the target mRNA by the RNAi machinery or process.

[0386] In some embodiments, the antisense strand and target mRNA sequences have 100% complementarity. The antisense strand may be complementary to any part of the target mRNA sequence.

[0387] In other embodiments, the antisense strand and target mRNA sequences comprise at least one mismatch. As a non-limiting example, the antisense strand and the target mRNA sequence have at least 30%, 40%, 50%, 60%, 70%, 80%, 81%, 82%, 83%, 84%, 85%, 86%, 87%, 88%, 89%, 90%, 91%, 92%, 93%, 94%, 95%, 96%, 97%, 98% or 99% or at least 20-30%, 20-40%, 20-50%, 20-60%, 20-70%, 20-80%, 20-90%, 20-95%, 20-99%, 30-40%, 30-50%, 30-60%, 30-70%, 30-80%, 30-90%, 30-95%, 30-99%, 40-50%, 40-60%, 40-70%, 40-80%, 40-90%, 40-95%, 40-99%, 50-60%, 50-70%, 50-80%, 50-90%, 50-95%, 50-99%, 60-70%, 60-80%, 60-90%, 60-95%, 60-99%, 70-80%, 70-90%, 70-95%, 70-99%, 80-90%, 80-95%, 80-99%, 90-95%, 90-99% or 95-99% complementary.

[0388] According to the present disclosure, the siRNA molecule has a length from about 10-50 or more nucleotides, i.e., each strand comprising 10-50 nucleotides (or nucleotide analogs). Preferably, the siRNA molecule has a length from about 15-30, e.g., 15, 16, 17, 18, 19, 20, 21, 22, 23, 24, 25, 26, 27, 28, 29, or 30 nucleotides in each strand, wherein one of the strands is sufficiently complementary to a target region. In some embodiments, the siRNA molecule has a length from about 19 to 25, 19 to 24 or 19 to 21 nucleotides.

[0389] In some embodiments, the siRNA molecules of the present disclosure can be synthetic RNA duplexes comprising about 19 nucleotides to about 25 nucleotides, and two overhanging nucleotides at the 3′-end. In some aspects, the siRNA molecules may be unmodified RNA molecules. In other aspects, the siRNA molecules may contain at least one modified nucleotide, such as base, sugar or backbone modifications.

[0390] In some embodiments, the siRNA molecules of the present disclosure may comprise an antisense sequence and a sense sequence, or a fragment or variant thereof. As a non-limiting example, the antisense sequence and the sense sequence have at least 30%, 40%, 50%, 60%, 70%, 80%, 81%, 82%, 83%, 84%, 85%, 86%, 87%, 88%, 89%, 90%, 91%, 92%, 93%, 94%, 95%, 96%, 97%, 98% or 99% or at least 20-30%, 20-40%, 20-50%, 20-60%, 20-70%, 20-80%, 20-90%, 20-95%, 20-99%, 30-40%, 30-50%, 30-60%, 30-70%, 30-80%, 30-90%, 30-95%, 30-99%, 40-50%, 40-60%, 40-70%, 40-80%, 40-90%, 40-95%, 40-99%, 50-60%, 50-70%, 50-80%, 50-90%, 50-95%, 50-99%, 60-70%, 60-80%, 60-90%, 60-95%, 60-99%, 70-80%, 70-90%, 70-95%, 70-99%, 80-90%, 80-95%, 80-99%, 90-95%, 90-99% or 95-99% complementary.

[0391] DNA expression plasmids can be used to stably express the siRNA duplexes or dsRNA of the present disclosure in cells and achieve long-term inhibition of the target gene. In one aspect, the sense and antisense strands of a siRNA duplex are typically linked by a short spacer sequence leading to the expression of a stem-loop structure termed short hairpin RNA (shRNA). The hairpin is recognized and cleaved by Dicer, thus generating mature siRNA molecules.

[0392] In other embodiments, the siRNA molecules of the present disclosure can be encoded in AAV particles for delivery to a cell. In some embodiments, the siRNA may be inserted to an AAV viral genome, flanked by the ITRs.

[0393] According to the present disclosure, the AAV particles comprising the nucleic acids encoding the siRNA molecules targeting mRNA of a gene of interest may be and/or include a AAV particle serotype, and/or a peptide insert such as, but are not limited to, VOY101, VOY201, VOY701, VOY801, VOY1101, AAVPHP.B (PHP.B), AAVPHP.A (PUPA), AAVG2B-26, AAVG2B-13, AAVTH1.1-32, AAVTH1.1-35, AAVPHP.B2 (PHP.B2), AAVPHP.B3 (PHP.B3), AAVPHP.N/PHP.B-DGT, AAVPHP.B-EST, AAVPHP.B-GGT, AAVPHP.B-ATP, AAVPHP.B-ATT-T, AAVPHP.B-DGT-T, AAVPHP.B-GGT-T, AAVPHP.B-SGS, AAVPHP.B-AQP, AAVPHP.B-QQP, AAVPHP.B-SNP(3), AAVPHP.B-SNP, AAVPHP.B-QGT, AAVPHP.B-NQT, AAVPHP.B-EGS, AAVPHP.B-SGN, AAVPHP.B-EGT, AAVPHP.B-DST, AAVPHP.B-DST, AAVPHP.B-STP, AAVPHP.B-PQP, AAVPHP.B-SQP, AAVPHP.B-QLP, AAVPHP.B-TMP, AAVPHP.B-TTP, AAVPHP.S/G2A12, AAVG2A15/G2A3 (G2A3), AAVG2B4 (G2B4), AAVG2B5, PHP.S, AAV1, AAV2, AAV2G9, AAV3, AAV3a, AAV3b, AAV3-3, AAV4, AAV4-4, AAV5, AAV6, AAV6.1, AAV6.2, AAV6.1.2, AAV7, AAV7.2, AAV8, AAV9, AAV9.11, AAV9.13, AAV9.16, AAV9.24, AAV9.45, AAV9.47, AAV9.61, AAV9.68, AAV9.84, AAV9.9, AAV10, AAV11, AAV12, AAV16.3, AAV24.1, AAV27.3, AAV42.12, AAV42-1b, AAV42-2, AAV42-3a, AAV42-3b, AAV42-4, AAV42-5a, AAV42-5b, AAV42-6b, AAV42-8, AAV42-10, AAV42-11, AAV42-12, AAV42-13, AAV42-15, AAV42-aa, AAV43-1, AAV43-12, AAV43-20, AAV43-21, AAV43-23, AAV43-25, AAV43-5, AAV44.1, AAV44.2, AAV44.5, AAV223.1, AAV223.2, AAV223.4, AAV223.5, AAV223.6, AAV223.7, AAV1-7/rh.48, AAV1-8/rh.49, AAV2-15/rh.62, AAV2-3/rh.61, AAV2-4/rh.50, AAV2-5/rh.51, AAV3.1/hu.6, AAV3.1/hu.9, AAV3-9/rh.52, AAV3-11/rh.53, AAV4-8/r11.64, AAV4-9/rh.54, AAV4-19/rh.55, AAV5-3/rh.57, AAV5-22/rh.58, AAV7.3/hu.7, AAV16.8/hu.10, AAV16.12/hu.11, AAV29.3/bb.1, AAV29.5/bb.2, AAV106.1/hu.37, AAV114.3/hu.40, AAV127.2/hu.41, AAV127.5/hu.42, AAV128.3/hu.44, AAV130.4/hu.48, AAV145.1/hu.53, AAV145.5/hu.54, AAV145.6/hu.55, AAV161.10/hu.60, AAV161.6/hu.61, AAV33.12/hu.17, AAV33.4/hu.15, AAV33.8/hu.16, AAV52/hu.19, AAV52.1/hu.20, AAV58.2/hu.25, AAVA3.3, AAVA3.4, AAVA3.5, AAVA3.7, AAVC1, AAVC2, AAVC5, AAV-DJ, AAV-DJ8, AAVF3, AAVF5, AAVH2, AAVrh.72, AAVhu.8, AAVrh.68, AAVrh.70, AAVpi.1, AAVpi.3, AAVpi.2, AAVrh.60, AAVrh.44, AAVrh.65, AAVrh.55, AAVrh.47, AAVrh.69, AAVrh.45, AAVrh.59, AAVhu.12, AAVH6, AAVLK03, AAVH-1/hu.1, AAVH-5/hu.3, AAVLG-10/rh.40, AAVLG-4/rh.38, AAVLG-9/hu.39, AAVN721-8/rh.43, AAVCh.5, AAVCh.5R1, AAVcy.2, AAVcy.3, AAVcy.4, AAVcy.5, AAVCy.5R1, AAVCy.5R2, AAVCy.5R3, AAVCy.5R4, AAVcy.6, AAVhu.1, AAVhu.2, AAVhu.3, AAVhu.4, AAVhu.5, AAVhu.6, AAVhu.7, AAVhu.9, AAVhu.10, AAVhu.11, AAVhu.13, AAVhu.15, AAVhu.16, AAVhu.17, AAVhu.18, AAVhu.20, AAVhu.21, AAVhu.22, AAVhu.23.2, AAVhu.24, AAVhu.25, AAVhu.27, AAVhu.28, AAVhu.29, AAVhu.29R, AAVhu.31, AAVhu.32, AAVhu.34, AAVhu.35, AAVhu.37, AAVhu.39, AAVhu.40, AAVhu.41, AAVhu.42, AAVhu.43, AAVhu.44, AAVhu.44R1, AAVhu.44R2, AAVhu.44R3, AAVhu.45, AAVhu.46, AAVhu.47, AAVhu.48, AAVhu.48R1, AAVhu.48R2, AAVhu.48R3, AAVhu.49, AAVhu.51, AAVhu.52, AAVhu.54, AAVhu.55, AAVhu.56, AAVhu.57, AAVhu.58, AAVhu.60, AAVhu.61, AAVhu.63, AAVhu.64, AAVhu.66, AAVhu.67, AAVhu.14/9, AAVhu.t 19, AAVrh.2, AAVrh.2R, AAVrh.8, AAVrh.8R, AAVrh.10, AAVrh.12, AAVrh.13, AAVrh.13R, AAVrh.14, AAVrh.17, AAVrh.18, AAVrh.19, AAVrh.20, AAVrh.21, AAVrh.22, AAVrh.23, AAVrh.24, AAVrh.25, AAVrh.31, AAVrh.32, AAVrh.33, AAVrh.34, AAVrh.35, AAVrh.36, AAVrh.37, AAVrh.37R2, AAVrh.38, AAVrh.39, AAVrh.40, AAVrh.46, AAVrh.48, AAVrh.48.1, AAVrh.48.1.2, AAVrh.48.2, AAVrh.49, AAVrh.51, AAVrh.52, AAVrh.53, AAVrh.54, AAVrh.56, AAVrh.57, AAVrh.58, AAVrh.61, AAVrh.64, AAVrh.64R1, AAVrh.64R2, AAVrh.67, AAVrh.73, AAVrh.74, AAVrh8R, AAVrh8R A586R mutant, AAVrh8R R533A mutant, AAAV, BAAV, caprine AAV, bovine AAV, AAVhE1.1, AAVhEr1.5, AAVhER1.14, AAVhEr1.8, AAVhEr1.16, AAVhEr1.18, AAVhEr1.35, AAVhEr1.7, AAVhEr1.36, AAVhEr2.29, AAVhEr2.4, AAVhEr2.16, AAVhEr2.30, AAVhEr2.31, AAVhEr2.36, AAVhER1.23, AAVhEr3.1, AAV2.5T, AAV-PAEC, AAV-LK01, AAV-LK02, AAV-LK03, AAV-LK04, AAV-LK05, AAV-LK06, AAV-LK07, AAV-LK08, AAV-LK09, AAV-LK10, AAV-LK11, AAV-LK12, AAV-LK13, AAV-LK14, AAV-LK15, AAV-LK16, AAV-LK17, AAV-LK18, AAV-LK19, AAV-PAEC2, AAV-PAEC4, AAV-PAEC6, AAV-PAEC7, AAV-PAEC8, AAV-PAEC11, AAV-PAEC12, AAV-2-pre-miRNA-101, AAV-8h, AAV-8b, AAV-h, AAV-b, AAV SM 10-2, AAV Shuffle 100-1, AAV Shuffle 100-3, AAV Shuffle 100-7, AAV Shuffle 10-2, AAV Shuffle 10-6, AAV Shuffle 10-8, AAV Shuffle 100-2, AAV SM 10-1, AAV SM 10-8, AAV SM 100-3, AAV SM 100-10, BNP61 AAV, BNP62 AAV, BNP63 AAV, AAVrh.50, AAVrh.43, AAVrh.62, AAVrh.48, AAVhu.19, AAVhu.11, AAVhu.53, AAV4-8/rh.64, AAVLG-9/hu.39, AAV54.5/hu.23, AAV54.2/hu.22, AAV54.7/hu.24, AAV54.1/hu.21, AAV54.4R/hu.27, AAV46.2/hu.28, AAV46.6/hu.29, AAV128.1/hu.43, true type AAV (ttAAV), UPENN AAV 10, Japanese AAV 10 serotypes, AAV CBr-7.1, AAV CBr-7.10, AAV CBr-7.2, AAV CBr-7.3, AAV CBr-7.4, AAV CBr-7.5, AAV CBr-7.7, AAV CBr-7.8, AAV CBr-B7.3, AAV CBr-B7.4, AAV CBr-E1, AAV CBr-E2, AAV CBr-E3, AAV CBr-E4, AAV CBr-E5, AAV CBr-e5, AAV CBr-E6, AAV CBr-E7, AAV CBr-E8, AAV CHt-1, AAV CHt-2, AAV CHt-3, AAV CHt-6.1, AAV CHt-6.10, AAV CHt-6.5, AAV CHt-6.6, AAV CHt-6.7, AAV CHt-6.8, AAV CHt-P1, AAV CHt-P2, AAV CHt-P5, AAV CHt-P6, AAV CHt-P8, AAV CHt-P9, AAV CKd-1, AAV CKd-10, AAV CKd-2, AAV CKd-3, AAV CKd-4, AAV CKd-6, AAV CKd-7, AAV CKd-8, AAV CKd-B1, AAV CKd-B2, AAV CKd-B3, AAV CKd-B4, AAV CKd-B5, AAV CKd-B6, AAV CKd-B7, AAV CKd-B8, AAV CKd-H1, AAV CKd-H2, AAV CKd-H3, AAV CKd-H4, AAV CKd-H5, AAV CKd-H6, AAV CKd-N3, AAV CKd-N4, AAV CKd-N9, AAV CLg-F1, AAV CLg-F2, AAV CLg-F3, AAV CLg-F4, AAV CLg-F5, AAV CLg-F6, AAV CLg-F7, AAV CLg-F8, AAV CLv-1, AAV CLv1-1, AAV Clv1-10, AAV CLv1-2, AAV CLv-12, AAV CLv1-3, AAV CLv-13, AAV CLv1-4, AAV Clv1-7, AAV Clv1-8, AAV Clv1-9, AAV CLv-2, AAV CLv-3, AAV CLv-4, AAV CLv-6, AAV CLv-8, AAV CLv-D1, AAV CLv-D2, AAV CLv-D3, AAV CLv-D4, AAV CLv-D5, AAV CLv-D6, AAV CLv-D7, AAV CLv-D8, AAV CLv-E1, AAV CLv-K1, AAV CLv-K3, AAV CLv-K6, AAV CLv-L4, AAV CLv-L5, AAV CLv-L6, AAV CLv-M1, AAV CLv-M11, AAV CLv-M2, AAV CLv-M5, AAV CLv-M6, AAV CLv-M7, AAV CLv-M8, AAV CLv-M9, AAV CLv-R1, AAV CLv-R2, AAV CLv-R3, AAV CLv-R4, AAV CLv-R5, AAV CLv-R6, AAV CLv-R7, AAV CLv-R8, AAV CLv-R9, AAV CSp-1, AAV CSp-10, AAV CSp-11, AAV CSp-2, AAV CSp-3, AAV CSp-4, AAV CSp-6, AAV CSp-7, AAV CSp-8, AAV CSp-8.10, AAV CSp-8.2, AAV CSp-8.4, AAV CSp-8.5, AAV CSp-8.6, AAV CSp-8.7, AAV CSp-8.8, AAV CSp-8.9, AAV CSp-9, AAV.hu.48R3, AAV.VR-355, AAV3B, AAV4, AAV5, AAVF1/HSC1, AAVF11/HSC11, AAVF12/HSC12, AAVF13/HSC13, AAVF14/HSC14, AAVF15/HSC15, AAVF16/HSC16, AAVF17/HSC17, AAVF2/HSC2, AAVF3/HSC3, AAVF4/HSC4, AAVF5/HSC5, AAVF6/HSC6, AAVF7/HSC7, AAVF8/HSC8, and/or AAVF9/HSC9 and variants thereof. In some embodiments, the AAV serotype is VOY101, or a variant thereof. In some embodiments, the AAV serotype is VOY201, or a variant thereof. In some embodiments, the AAV serotype is VOY701, or a variant thereof. In some embodiments, the AAV serotype is VOY801, or a variant thereof. In some embodiments, the AAV serotype is VOY1101, or a variant thereof.

[0394] In some embodiments, the siRNA duplexes or encoded dsRNA of the present disclosure suppress (or degrade) target mRNA. Accordingly, the siRNA duplexes or encoded dsRNA can be used to substantially inhibit target gene expression in a cell, for example a neuron or astrocyte. In some aspects, the inhibition of target gene expression refers to an inhibition by at least about 20%, preferably by at least about 30%, 40%, 50%, 60%, 70%, 80%, 85%, 90%, 95% and 100%, or at least 20-30%, 20-40%, 20-50%, 20-60%, 20-70%, 20-80%, 20-90%, 20-95%, 20-100%, 30-40%, 30-50%, 30-60%, 30-70%, 30-80%, 30-90%, 30-95%, 30-100%, 40-50%, 40-60%, 40-70%, 40-80%, 40-90%, 40-95%, 40-100%, 50-60%, 50-70%, 50-80%, 50-90%, 50-95%, 50-100%, 60-70%, 60-80%, 60-90%, 60-95%, 60-100%, 70-80%, 70-90%, 70-95%, 70-100%, 80-90%, 80-95%, 80-100%, 90-95%, 90-100% or 95-100%. Accordingly, the protein product of the targeted gene may be inhibited by at least about 20%, preferably by at least about 30%, 40%, 50%, 60%, 70%, 80%, 85%, 90%, 95% and 100%, or at least 20-30%, 20-40%, 20-50%, 20-60%, 20-70%, 20-80%, 20-90%, 20-95%, 20-100%, 30-40%, 30-50%, 30-60%, 30-70%, 30-80%, 30-90%, 30-95%, 30-100%, 40-50%, 40-60%, 40-70%, 40-80%, 40-90%, 40-95%, 40-100%, 50-60%, 50-70%, 50-80%, 50-90%, 50-95%, 50-100%, 60-70%, 60-80%, 60-90%, 60-95%, 60-100%, 70-80%, 70-90%, 70-95%, 70-100%, 80-90%, 80-95%, 80-100%, 90-95%, 90-100% or 95-100%.

[0395] In some embodiments, siRNA molecules targeting a gene of interest may be designed using any available design tools. According to the present disclosure, the siRNA molecules are designed and tested for their ability in reducing target gene mRNA levels in cultured cells.

[0396] In some embodiments, the siRNA molecules are designed and tested for their ability in reducing ApoE2 levels in cultured cells.

[0397] In some embodiments, the siRNA molecules are designed and tested for their ability in reducing ApoE3 levels in cultured cells.

[0398] In some embodiments, the siRNA molecules are designed and tested for their ability in reducing ApoE4 levels in cultured cells.

[0399] In some embodiments, the siRNA molecules are designed and tested for their ability in reducing SOD1 levels in cultured cells.

[0400] In some embodiments, the siRNA molecules are designed and tested for their ability in reducing HTT levels in cultured cells.

[0401] In some embodiments, the siRNA molecules are designed and tested for their ability in reducing Tau levels in cultured cells.

[0402] In some embodiments, the siRNA molecules comprise a miRNA seed match for the guide strand. In another embodiment, the siRNA molecules comprise a miRNA seed match for the passenger strand. In yet another embodiment, the siRNA duplexes or encoded dsRNA targeting a gene of interest do not comprise a seed match for the guide or passenger strand.

[0403] In some embodiments, the siRNA duplexes or encoded dsRNA targeting a gene of interest may have almost no significant full-length off targets for the guide strand. In another embodiment, the siRNA duplexes or encoded dsRNA targeting a gene of interest may have almost no significant full-length off targets for the passenger strand. The siRNA duplexes or encoded dsRNA targeting a gene of interest may have less than 1%, 2%, 3%, 4%, 5%, 6%, 7%, 8%, 9%0, 10%, 11%, 12%, 13%, 14%, 15%, 20%, 25%, 30%, 35%, 40%, 45%, 50%, 1-5%, 2-6%, 3-7%, 4-8%, 5-9%, 5-10%, 6-10%, 5-15%, 5-20%, 5-25% 5-30%, 10-20%, 10-30%, 10-40%, 10-50%, 15-30%, 15-40%, 15-45%, 20-40%, 20-50%, 25-50%, 30-40%, 30-50%, 35-50%, 40-50%, 45-50% full-length off targets for the passenger strand. In yet another embodiment, the siRNA duplexes or encoded dsRNA targeting a gene of interest may have almost no significant full-length off targets for the guide strand or the passenger strand. The siRNA duplexes or encoded dsRNA targeting a gene of interest may have less than 1%, 2%, 3%, 4%, 5%, 6%, 7%, 8%, 9%, 10%, 11%, 12%, 13%, 14%, 15%, 20%, 25%, 30%, 35%, 40%, 45%, 50%, 1-5%, 2-6%, 3-7%, 4-8%, 5-9%, 5-10%, 6-10%, 5-15%, 5-20%, 5-25% 5-30%, 10-20%, 10-30%, 10-40%, 10-50%, 15-30%, 15-40%, 15-45%, 20-40%, 20-50%, 25-50%, 30-40%, 30-50%, 35-50%, 40-50%, 45-50% full-length off targets for the guide or passenger strand.

[0404] In some embodiments, the siRNA duplexes or encoded dsRNA targeting a gene of interest may have high activity in vitro. In another embodiment, the siRNA molecules may have low activity in vitro. In yet another embodiment, the siRNA duplexes or dsRNA targeting the gene of interest may have high guide strand activity and low passenger strand activity in vitro.

[0405] In some embodiments, the siRNA molecules have a high guide strand activity and low passenger strand activity in vitro. The target knock-down (KD) by the guide strand may be at least 60%, 65%, 70%, 75%, 80%, 85%, 90%, 95%, 99%, 99.5% or 100%. The target knock-down by the guide strand may be 60-65%, 60-70%, 60-75%, 60-80%, 60-85%, 60-90%, 60-95%, 60-99%, 60-99.5%, 60-100%, 65-70%, 65-75%, 65-80%, 65-85%, 65-90%, 65-95%, 65-99%, 65-99.5%, 65-100%, 70-75%, 70-80%, 70-85%, 70-90%, 70-95%, 70-99%, 70-99.5%, 70-100%, 75-80%, 75-85%, 75-90%, 75-95%, 75-99%, 75-99.5%, 75-100%, 80-85%, 80-90%, 80-95%, 80-99%, 80-99.5%, 80-100%, 85-90%, 85-95%, 85-99%, 85-99.5%, 85-100%, 90-95%, 90-99%, 90-99.5%, 90-100%, 95-99%, 95-99.5%, 95-100%, 99-99.5%, 99-100% or 99.5-100%. As a non-limiting example, the target knock-down (KD) by the guide strand is greater than 70%.

[0406] In some embodiments, the IC₅₀ of the passenger strand for the nearest off target is greater than 100 multiplied by the IC₅₀ of the guide strand for the target. As a non-limiting example, if the IC₅₀ of the passenger strand for the nearest off target is greater than 100 multiplied by the IC₅₀ of the guide strand for the target then the siRNA molecules is said to have high guide strand activity and a low passenger strand activity in vitro.

[0407] In some embodiments, the 5′ processing of the guide strand has a correct start (n) at the 5′ end at least 75%, 80%, 85%, 90%, 95%, 99% or 100% of the time in vitro or in vivo. As a non-limiting example, the 5′ processing of the guide strand is precise and has a correct start (n) at the 5′ end at least 99% of the time in vitro. As a non-limiting example, the 5′ processing of the guide strand is precise and has a correct start (n) at the 5′ end at least 99% of the time in vivo.

[0408] In some embodiments, the guide to passenger (G:P) (also referred to as the antisense to sense) strand ratio expressed is 1:10, 1:9, 1:8, 1:7, 1:6, 1:5, 1:4, 1:3, 1:2, 1:1, 2:10, 2:9, 2:8, 2:7, 2:6, 2:5, 2:4, 2:3, 2:2, 2:1, 3:10, 3:9, 3:8, 3:7, 3:6, 3:5, 3:4, 3:3, 3:2, 3:1, 4:10, 4:9, 4:8, 4:7, 4:6, 4:5, 4:4, 4:3, 4:2, 4:1, 5:10, 5:9, 5:8, 5:7, 5:6, 5:5, 5:4, 5:3, 5:2, 5:1, 6:10, 6:9, 6:8, 6:7, 6:6, 6:5, 6:4, 6:3, 6:2, 6:1, 7:10, 7:9, 7:8, 7:7, 7:6, 7:5, 7:4, 7:3, 7:2, 7:1, 8:10, 8:9, 8:8, 8:7, 8:6, 8:5, 8:4, 8:3, 8:2, 8:1, 9:10, 9:9, 9:8, 9:7, 9:6, 9:5, 9:4, 9:3, 9:2, 9:1, 10:10, 10:9, 10:8, 10:7, 10:6, 10:5, 10:4, 10:3, 10:2, 10:1, 1:99, 5:95, 10:90, 15:85, 20:80, 25:75, 30:70, 35:65, 40:60, 45:55, 50:50, 55:45, 60:40, 65:35, 70:30, 75:25, 80:20, 85:15, 90:10, 95:5, or 99:1 in vitro or in vivo. The guide to passenger ratio refers to the ratio of the guide strands to the passenger strands after the excision of the guide strand. For example, an 80:20 guide to passenger ratio would have 8 guide strands to every 2 passenger strands clipped out of the precursor. As a non-limiting example, the guide-to-passenger strand ratio is 80:20 in vitro. As a non-limiting example, the guide-to-passenger strand ratio is 80:20 in vivo. As a non-limiting example, the guide-to-passenger strand ratio is 8:2 in vitro. As a non-limiting example, the guide-to-passenger strand ratio is 8:2 in vivo. As a non-limiting example, the guide-to-passenger strand ratio is 9:1 in vitro. As a non-limiting example, the guide-to-passenger strand ratio is 9:1 in vivo.

[0409] In some embodiments, the passenger to guide (P:G) (also referred to as the sense to antisense) strand ratio expressed is 1:10, 1:9, 1:8, 1:7, 1:6, 1:5, 1:4, 1:3, 1:2, 1:1, 2:10, 2:9, 2:8, 2:7, 2:6, 2:5, 2:4, 2:3, 2:2, 2:1, 3:10, 3:9, 3:8, 3:7, 3:6, 3:5, 3:4, 3:3, 3:2, 3:1, 4:10, 4:9, 4:8, 4:7, 4:6, 4:5, 4:4, 4:3, 4:2, 4:1, 5:10, 5:9, 5:8, 5:7, 5:6, 5:5, 5:4, 5:3, 5:2, 5:1, 6:10, 6:9, 6:8, 6:7, 6:6, 6:5, 6:4, 6:3, 6:2, 6:1, 7:10, 7:9, 7:8, 7:7, 7:6, 7:5, 7:4, 7:3, 7:2, 7:1, 8:10, 8:9, 8:8, 8:7, 8:6, 8:5, 8:4, 8:3, 8:2, 8:1, 9:10, 9:9, 9:8, 9:7, 9:6, 9:5, 9:4, 9:3, 9:2, 9:1, 10:10, 10:9, 10:8, 10:7, 10:6, 10:5, 10:4, 10:3, 10:2, 10:1, 1:99, 5:95, 10:90, 15:85, 20:80, 25:75, 30:70, 35:65, 40:60, 45:55, 50:50, 55:45, 60:40, 65:35, 70:30, 75:25, 80:20, 85:15, 90:10, 95:5, or 99:1 in vitro or in vivo. The passenger to guide ratio refers to the ratio of the passenger strands to the guide strands after the excision of the guide strand. For example, an 80:20 passenger to guide ratio would have 8 passenger strands to every 2 guide strands clipped out of the precursor. As a non-limiting example, the passenger-to-guide strand ratio is 80:20 in vitro. As a non-limiting example, the passenger-to-guide strand ratio is 80:20 in vivo. As a non-limiting example, the passenger-to-guide strand ratio is 8:2 in vitro. As a non-limiting example, the passenger-to-guide strand ratio is 8:2 in vivo. As a non-limiting example, the passenger-to-guide strand ratio is 9:1 in vitro. As a non-limiting example, the passenger-to-guide strand ratio is 9:1 in vivo.

[0410] In some embodiments, the integrity of the viral genome encoding the dsRNA is at least 60%, 65%, 70%, 75%, 80%, 85%, 90%, 95%, 99% or more than 99% of the full length of the construct. As a non-limiting example, the integrity of the viral genome is 80% of the full length of the construct.

[0411] In some embodiments, the passenger and/or guide strand is designed based on the method and rules outlined in European Patent Publication No. EP1752536, the contents of which are herein incorporated by reference in their entirety. As a non-limiting example, the 3′-terminal base of the sequence is adenine, thymine or uracil. As a non-limiting example, the 5′-terminal base of the sequence is guanine or cytosine. As a non-limiting example, the 3′-terminal sequence comprises seven bases rich in one or more bases of adenine, thymine and uracil. As a non-limiting example, the base number is at such a level as causing RNA interference without expressing cytotoxicity.

### Molecular Scaffold

[0412] In some embodiments, the siRNA molecules may be encoded in a modulatory polynucleotide which also comprises a molecular scaffold. As used herein a “molecular scaffold” is a framework or starting molecule that forms the sequence or structural basis against which to design or make a subsequent molecule.

[0413] In some embodiments, the modulatory polynucleotide which comprises the payload (e.g., siRNA, miRNA or other RNAi agent described herein) includes a molecular scaffold which comprises a leading 5′ flanking sequence which may be of any length and may be derived in whole or in part from wild type microRNA sequence or be completely artificial. A 3′ flanking sequence may mirror the 5′ flanking sequence in size and origin. Either flanking sequence may be absent. In some embodiments, both the 5′ and 3′ flanking sequences are absent. The 3′ flanking sequence may optionally contain one or more CNNC motifs, where “N” represents any nucleotide.

[0414] In some embodiments the 5′ and 3′ flanking sequences are the same length.

[0415] In some embodiments the 5′ flanking sequence is from 1-10 nucleotides in length, from 5-15 nucleotides in length, from 10-30 nucleotides in length, from 20-50 nucleotides in length, greater than 40 nucleotides in length, greater than 50 nucleotides in length, greater than 100 nucleotides in length or greater than 200 nucleotides in length.

[0416] In some embodiments, the 5′ flanking sequence may be 1, 2, 3, 4, 5, 6, 7, 8, 9, 10, 11, 12, 13, 14, 15, 16, 17, 18, 19, 20, 21, 22, 23, 24, 25, 26, 27, 28, 29, 30, 31, 32, 33, 34, 35, 36, 37, 38, 39, 40, 41, 42, 43, 44, 45, 46, 47, 48, 49, 50, 51, 52, 53, 54, 55, 56, 57, 58, 59, 60, 61, 62, 63, 64, 65, 66, 67, 68, 69, 70, 71, 72, 73, 74, 75, 76, 77, 78, 79, 80, 81, 82, 83, 84, 85, 86, 87, 88, 89, 90, 91, 92, 93, 94, 95, 96, 97, 98, 99, 100, 101, 102, 103, 104, 105, 106, 107, 108, 109, 110, 111, 112, 113, 114, 115, 116, 117, 118, 119, 120, 121, 122, 123, 124, 125, 126, 127, 128, 129, 130, 131, 132, 133, 134, 135, 136, 137, 138, 139, 140, 141, 142, 143, 144, 145, 146, 147, 148, 149, 150, 151, 152, 153, 154, 155, 156, 157, 158, 159, 160, 161, 162, 163, 164, 165, 166, 167, 168, 169, 170, 171, 172, 173, 174, 175, 176, 177, 178, 179, 180, 181, 182, 183, 184, 185, 186, 187, 188, 189, 190, 191, 192, 193, 194, 195, 196, 197, 198, 199, 200, 201, 202, 203, 204, 205, 206, 207, 208, 209, 210, 211, 212, 213, 214, 215, 216, 217, 218, 219, 220, 221, 222, 223, 224, 225, 226, 227, 228, 229, 230, 231, 232, 233, 234, 235, 236, 237, 238, 239, 240, 241, 242, 243, 244, 245, 246, 247, 248, 249, 250, 251, 252, 253, 254, 255, 256, 257, 258, 259, 260, 261, 262, 263, 264, 265, 266, 267, 268, 269, 270, 271, 272, 273, 274, 275, 276, 277, 278, 279, 280, 281, 282, 283, 284, 285, 286, 287, 288, 289, 290, 291, 292, 293, 294, 295, 296, 297, 298, 299, 300, 301, 302, 303, 304, 305, 306, 307, 308, 309, 310, 311, 312, 313, 314, 315, 316, 317, 318, 319, 320, 321, 322, 323, 324, 325, 326, 327, 328, 329, 330, 331, 332, 333, 334, 335, 336, 337, 338, 339, 340, 341, 342, 343, 344, 345, 346, 347, 348, 349, 350, 351, 352, 353, 354, 355, 356, 357, 358, 359, 360, 361, 362, 363, 364, 365, 366, 367, 368, 369, 370, 371, 372, 373, 374, 375, 376, 377, 378, 379, 380, 381, 382, 383, 384, 385, 386, 387, 388, 389, 390, 391, 392, 393, 394, 395, 396, 397, 398, 399, 400, 401, 402, 403, 404, 405, 406, 407, 408, 409, 410, 411, 412, 413, 414, 415, 416, 417, 418, 419, 420, 421, 422, 423, 424, 425, 426, 427, 428, 429, 430, 431, 432, 433, 434, 435, 436, 437, 438, 439, 440, 441, 442, 443, 444, 445, 446, 447, 448, 449, 450, 451, 452, 453, 454, 455, 456, 457, 458, 459, 460, 461, 462, 463, 464, 465, 466, 467, 468, 469, 470, 471, 472, 473, 474, 475, 476, 477, 478, 479, 480, 481, 482, 483, 484, 485, 486, 487, 488, 489, 490, 491, 492, 493, 494, 495, 496, 497, 498, 499, or 500 nucleotides in length.

[0417] In some embodiments the 3′ flanking sequence is from 1-10 nucleotides in length, from 5-15 nucleotides in length, from 10-30 nucleotides in length, from 20-50 nucleotides in length, greater than 40 nucleotides in length, greater than 50 nucleotides in length, greater than 100 nucleotides in length or greater than 200 nucleotides in length.

[0418] In some embodiments, the 3′ flanking sequence may be 1, 2, 3, 4, 5, 6, 7, 8, 9, 10, 11, 12, 13, 14, 15, 16, 17, 18, 19, 20, 21, 22, 23, 24, 25, 26, 27, 28, 29, 30, 31, 32, 33, 34, 35, 36, 37, 38, 39, 40, 41, 42, 43, 44, 45, 46, 47, 48, 49, 50, 51, 52, 53, 54, 55, 56, 57, 58, 59, 60, 61, 62, 63, 64, 65, 66, 67, 68, 69, 70, 71, 72, 73, 74, 75, 76, 77, 78, 79, 80, 81, 82, 83, 84, 85, 86, 87, 88, 89, 90, 91, 92, 93, 94, 95, 96, 97, 98, 99, 100, 101, 102, 103, 104, 105, 106, 107, 108, 109, 110, 111, 112, 113, 114, 115, 116, 117, 118, 119, 120, 121, 122, 123, 124, 125, 126, 127, 128, 129, 130, 131, 132, 133, 134, 135, 136, 137, 138, 139, 140, 141, 142, 143, 144, 145, 146, 147, 148, 149, 150, 151, 152, 153, 154, 155, 156, 157, 158, 159, 160, 161, 162, 163, 164, 165, 166, 167, 168, 169, 170, 171, 172, 173, 174, 175, 176, 177, 178, 179, 180, 181, 182, 183, 184, 185, 186, 187, 188, 189, 190, 191, 192, 193, 194, 195, 196, 197, 198, 199, 200, 201, 202, 203, 204, 205, 206, 207, 208, 209, 210, 211, 212, 213, 214, 215, 216, 217, 218, 219, 220, 221, 222, 223, 224, 225, 226, 227, 228, 229, 230, 231, 232, 233, 234, 235, 236, 237, 238, 239, 240, 241, 242, 243, 244, 245, 246, 247, 248, 249, 250, 251, 252, 253, 254, 255, 256, 257, 258, 259, 260, 261, 262, 263, 264, 265, 266, 267, 268, 269, 270, 271, 272, 273, 274, 275, 276, 277, 278, 279, 280, 281, 282, 283, 284, 285, 286, 287, 288, 289, 290, 291, 292, 293, 294, 295, 296, 297, 298, 299, 300, 301, 302, 303, 304, 305, 306, 307, 308, 309, 310, 311, 312, 313, 314, 315, 316, 317, 318, 319, 320, 321, 322, 323, 324, 325, 326, 327, 328, 329, 330, 331, 332, 333, 334, 335, 336, 337, 338, 339, 340, 341, 342, 343, 344, 345, 346, 347, 348, 349, 350, 351, 352, 353, 354, 355, 356, 357, 358, 359, 360, 361, 362, 363, 364, 365, 366, 367, 368, 369, 370, 371, 372, 373, 374, 375, 376, 377, 378, 379, 380, 381, 382, 383, 384, 385, 386, 387, 388, 389, 390, 391, 392, 393, 394, 395, 396, 397, 398, 399, 400, 401, 402, 403, 404, 405, 406, 407, 408, 409, 410, 411, 412, 413, 414, 415, 416, 417, 418, 419, 420, 421, 422, 423, 424, 425, 426, 427, 428, 429, 430, 431, 432, 433, 434, 435, 436, 437, 438, 439, 440, 441, 442, 443, 444, 445, 446, 447, 448, 449, 450, 451, 452, 453, 454, 455, 456, 457, 458, 459, 460, 461, 462, 463, 464, 465, 466, 467, 468, 469, 470, 471, 472, 473, 474, 475, 476, 477, 478, 479, 480, 481, 482, 483, 484, 485, 486, 487, 488, 489, 490, 491, 492, 493, 494, 495, 496, 497, 498, 499, or 500 nucleotides in length.

[0419] In some embodiments, the 5′ and 3′ flanking sequences are the same sequence. In some embodiments they differ by 2%, 3%, 4%, 5%, 10%, 20% or more than 30% when aligned to each other.

[0420] In some embodiments, the molecular scaffold comprises at least one 3′ flanking region. As a non-limiting example, the 3′ flanking region may comprise a 3′ flanking sequence which may be of any length and may be derived in whole or in part from wild type microRNA sequence or be a completely artificial sequence.

[0421] Forming the stem of a stem loop structure is a minimum of at least one payload sequence. In some embodiments, the payload sequence comprises at least one nucleic acid sequence which is in part complementary or will hybridize to the target sequence. In some embodiments, the payload is an siRNA molecule or fragment of an siRNA molecule.

[0422] In some embodiments, the 5′ arm of the stem loop comprises a sense sequence.

[0423] In some embodiments, the 3′ arm of the stem loop comprises an antisense sequence. The antisense sequence, in some instances, comprises a “G” nucleotide at the 5′ most end.

[0424] In other embodiments, the sense sequence may reside on the 3′ arm while the antisense sequence resides on the 5′ arm of the stem of the stem loop structure.

[0425] The sense and antisense sequences may be completely complementary across a substantial portion of their length. In other embodiments, the sense sequence and antisense sequence may be at least 70, 80, 90, 95 or 99% complementary across independently at least 50, 60, 70, 80, 85, 90, 95, or 99% of the length of the strands.

[0426] Neither the identity of the sense sequence nor the homology of the antisense sequence need be 100% complementary to the target.

[0427] Separating the sense and antisense sequence of the stem loop structure is a loop (also known as a loop motif). The loop may be of any length, between 4-30 nucleotides, between 4-20 nucleotides, between 4-15 nucleotides, between 5-15 nucleotides, between 6-12 nucleotides, 6 nucleotides, 7, nucleotides, 8 nucleotides, 9 nucleotides, 10 nucleotides, 11 nucleotides, and/or 12 nucleotides.

[0428] In some embodiments, the loop comprises at least one UGUG motif. In some embodiments, the UGUG motif is located at the 5′ terminus of the loop.

[0429] Spacer regions may be present in the modulatory polynucleotide to separate one or more modules from one another. There may be one or more such spacer regions present.

[0430] In some embodiments, a spacer region of between 8-20, i.e., 8, 9, 10, 11, 12, 13, 14, 15, 16, 17, 18, 19, or 20 nucleotides may be present between the sense sequence and a flanking sequence.

[0431] In some embodiments, the spacer is 13 nucleotides and is located between the 5′ terminus of the sense sequence and a flanking sequence. In some embodiments, a spacer is of sufficient length to form approximately one helical turn of the sequence.

[0432] In some embodiments, a spacer region of between 8-20, i.e., 8, 9, 10, 11, 12, 13, 14, 15, 16, 17, 18, 19, or 20 nucleotides may be present between the antisense sequence and a flanking sequence.

[0433] In some embodiments, the spacer sequence is between 10-13, i.e., 10, 11, 12 or 13 nucleotides and is located between the 3′ terminus of the antisense sequence and a flanking sequence. In some embodiments, a spacer is of sufficient length to form approximately one helical turn of the sequence.

[0434] In some embodiments, the modulatory polynucleotide comprises in the 5′ to 3′ direction, a 5′ flanking sequence, a 5′ arm, a loop motif, a 3′ arm and a 3′ flanking sequence. As a non-limiting example, the 5′ arm may comprise a sense sequence and the 3′ arm comprises the antisense sequence. In another non-limiting example, the 5′ arm comprises the antisense sequence and the 3′ arm comprises the sense sequence.

[0435] In some embodiments, the 5′ arm, payload (e.g., sense and/or antisense sequence), loop motif and/or 3′ arm sequence may be altered (e.g., substituting 1 or more nucleotides, adding nucleotides and/or deleting nucleotides). The alteration may cause a beneficial change in the function of the construct (e.g., increase knock-down of the target sequence, reduce degradation of the construct, reduce off target effect, increase efficiency of the payload, and reduce degradation of the payload).

[0436] In some embodiments, the molecular scaffold of the modulatory polynucleotides is aligned in order to have the rate of excision of the guide strand be greater than the rate of excision of the passenger strand. The rate of excision of the guide or passenger strand may be, independently, 1%, 2%, 3%, 4%, 5%, 10%, 15%, 20%, 25%, 30%, 35%, 40%, 45%, 50%, 55%, 60%, 65%, 70%, 75%, 80%, 85%, 90%, 95%, 99% or more than 99%. As a non-limiting example, the rate of excision of the guide strand is at least 80%. As another non-limiting example, the rate of excision of the guide strand is at least 90%.

[0437] In some embodiments, the rate of excision of the guide strand is greater than the rate of excision of the passenger strand. In one aspect, the rate of excision of the guide strand may be at least 1%, 2%, 3%, 4%, 5%, 10%, 15%, 20%, 25%, 30%, 35%, 40%4, 45%, 50%, 55%, 60%, 65%, 70%, 75%, 80%, 85%, 90%, 95%, 99% or more than 99% greater than the passenger strand.

[0438] In some embodiments, the efficiency of excision of the guide strand is at least 60%, 65%, 70%, 75%, 80%, 85%, 90%, 95%, 99% or more than 99%. As a non-limiting example, the efficiency of the excision of the guide strand is greater than 80%.

[0439] In some embodiments, the efficiency of the excision of the guide strand is greater than the excision of the passenger strand from the molecular scaffold. The excision of the guide strand may be 2, 3, 4, 5, 6, 7, 8, 9, 10 or more than 10 times more efficient than the excision of the passenger strand from the molecular scaffold.

[0440] In some embodiments, the molecular scaffold comprises a dual-function targeting modulatory polynucleotide. As used herein, a “dual-function targeting” modulatory polynucleotide is a polynucleotide where both the guide and passenger strands knock down the same target or the guide and passenger strands knock down different targets.

[0441] In some embodiments, the molecular scaffold of the modulatory polynucleotides described herein comprise a 5′ flanking region, a loop region and a 3′ flanking region. Non-limiting examples of the sequences for the 5′ flanking region, loop region and the 3′ flanking region which may be used in the molecular scaffolds described herein are shown in Tables 10-12.

TABLE 10
5′ Flanking Regions for Molecular Scaffold

| | | 5′ Flanking |
|---|---|---|
| 5′ Flanking | | Region SEQ |
| Region Name | 5′ Flanking Region Sequence | ID NO |
| 5F1 | UUUAUGCCUCAUCCUCUGAGUGCUGAAGGCUUGCUGUAGGCU | 1772 |
| | GUAUGCUG | |
| 5F2 | GUGCUGGGCGGGGGGCGGCGGGCCCUCCCGCAGAACACCAUG | 1773 |
| | CGCUCUUCGGAA | |
| 5F3 | GAAGCAAAGAAGGGGCAGAGGGAGCCCGUGAGCUGAGUGGGC | 1774 |
| | CAGGGACUGGGAGAAGGAGUGAGGAGGCAGGGCCGGCAUGCC | |
| | UCUGCUGCUGGCCAGA | |
| 5F4 | GUGCUGGGCGGGGGGCGGCGGGCCCUCCCGCAGAACACCAUG | 1775 |
| | CGCUCUUCGGGA | |
| 5F5 | GUGCUGGGCGGGGGGCGGCGGGCCCUCCCGCAGAACACCAUG | 1776 |
| | CGCUCCACGGAA | |
| 5F6 | GGGCCCUCCCGCAGAACACCAUGCGCUCCACGGAA | 1777 |
| 5F7 | CUCCCGCAGAACACCAUGCGCUCCACGGAA | 1778 |
| 5F8 | GUGCUGGGCGGGGGGCGGCGGGCCCUCCCGCAGAACACCAUG | 1779 |
| | CGCUCCACGGAAG | |
| 5F9 | GUGCUGGGCGGGGGGCGGCGGGCCCUCCCGCAGAACACCAUG | 1780 |
| | CGCUCCUCGGAA | |

TABLE 11
Loop Motif

| Loop Motif | | Loop Motif |
|---|---|---|
| Region | Loop Motif | Region SEQ |
| Name | Region Sequence | ID NO |
| L1 | UGUGACCUGG | 1781 |
| L2 | UGUGAUUUGG | 1782 |
| L3 | UAUAAUUUGG | 1783 |
| L4 | CCUGACCCAGU | 1784 |
| L5 | GUCUGCACCUGUCACUAG | 1785 |
| L6 | GUGACCCAAG | 1786 |
| L7 | GUGGCCACUGAGAAG | 1787 |
| L8 | GUGACCCAAU | 1788 |
| L9 | GUGACCCAAC | 1789 |
| L10 | GUGGCCACUGAGAAA | 1790 |

TABLE 12
3′ Flanking Regions for Molecular Scaffold

| 3′ Flanking | | 3′ Flanking |
|---|---|---|
| Region | | Region SEQ |
| Name | 3′ Flanking Region Sequence | ID NO |
| 3F1 | AGUGUAUGAUGCCUGUUACUAGCAUUCACAUGGAACAA | 1791 |
| | AUUGCUGCCGUG | |
| 3F2 | CUGAGGAGCGCCUUGACAGCAGCCAUGGGAGGGCCGCC | 1792 |
| | CCCUACCUCAGUGA | |
| 3F3 | CUGUGGAGCGCCUUGACAGCAGCCAUGGGAGGGCCGCC | 1793 |
| | CCCUACCUCAGUGA | |
| 3F4 | UGGCCGUGUAGUGCUACCCAGCGCUGGCUGCCUCCUCA | 1794 |
| | GCAUUGCAAUUCCUCUCCCAUCUGGGCACCAGUCAGCU | |
| | ACCCUGGUGGGAAUCUGGGUAGCC | |
| 3F5 | GGCCGUGUAGUGCUACCCAGCGCUGGCUGCCUCCUCAG | 1795 |
| | CAUUGCAAUUCCUCUCCCAUCUGGGCACCAGUCAGCUA | |
| | CCCUGGUGGGAAUCUGGGUAGCC | |
| 3F6 | UCCUGAGGAGCGCCUUGACAGCAGCCAUGGGAGGGCCG | 1796 |
| | CCCCCUACCUCAGUGA | |
| 3F7 | CUGAGGAGCGCCUUGACAGCAGCCAUGGGAGGGCC | 1797 |
| 3F8 | CUGCGGAGCGCCUUGACAGCAGCCAUGGGAGGGCCGCC | 1798 |
| | CCCUACCUCAGUGA | |

[0442] Any of the regions described in Tables 8-10 may be used in the molecular scaffolds described herein.

[0443] In some embodiments, the molecular scaffold may comprise one 5′ flanking region listed in Table 10. As a non-limiting example, the molecular scaffold may comprise the 5′ flanking region 5F1, 5F2, 5F3, 5F4, 5F5, 5F6, 5F7, 5F8 or 5F9.

[0444] In some embodiments, the molecular scaffold may comprise one loop motif region listed in Table 11. As a non-limiting example, the molecular scaffold may comprise the loop motif region L1, L2, L3, L4, L5, L6, L7, L8, L9, or L10.

[0445] In some embodiments, the molecular scaffold may comprise one 3′ flanking region listed in Table 12. As a non-limiting example, the molecular scaffold may comprise the 3′ flanking region 3F1, 3F2, 3F3, 3F4, 3F5, 3F6, 3F7 or 3F8.

[0446] In some embodiments, the molecular scaffold may comprise at least one 5′ flanking region and at least one loop motif region as described in Tables 10 and 11. As a non-limiting example, the molecular scaffold may comprise 5F1 and L1, 5F1 and L2, 5F1 and L3, 5F1 and L4, 5F1 and L5, 5F1 and L6, 5F1 and L7, 5F1 and L8, 5F1 and L9, 5F1 and L10, 5F2 and L1, 5F2 and L2, 5F2 and L3, 5F2 and L4, 5F2 and L5, 5F2 and L6, 5F2 and L7, 5F2 and L8, 5F2 and L9, 5F2 and L10, 5F3 and L1, 5F3 and L2, 5F3 and L3, 5F3 and L4, 5F3 and L5, 5F3 and L6, 5F3 and L7, 5F3 and L8, 5F3 and L9, 5F3 and L10, 5F4 and L1, 5F4 and L2, 5F4 and L3, 5F4 and L4, 5F4 and L5, 5F4 and L6, 5F4 and L7, 5F4 and L8, 5F4 and L9, 5F4 and L10, 5F5 and L1, 5F5 and L2, 5F5 and L3, 5F5 and L4, 5F5 and L5, 5F5 and L6, 5F5 and L7, 5F5 and L8, 5F5 and L9, 5F5 and L10, 5F6 and L1, 5F6 and L2, 5F6 and L3, 5F6 and L4, 5F6 and L5, 5F6 and L6, 5F6 and L7, 5F6 and L8, 5F6 and L9, 5F6 and L10, 5F7 and L1, 5F7 and L2, 5F7 and L3, 5F7 and L4, 5F7 and L5, 5F7 and L6, 5F7 and L7, 5F7 and L8, 5F7 and L9, 5F7 and L10, 5F8 and L1, 5F8 and L2, 5F8 and L3, 5F8 and L4, 5F8 and L5, 5F8 and L6, 5F8 and L7, 5F8 and L8, 5F8 and L9, 5F8 and L10, 5F9 and L1, 5F9 and L2, 5F9 and L3, 5F9 and L4, 5F9 and L5, 5F9 and L6, 5F9 and L7, 5F9 and L8, 5F9 and L9, or 5F9 and L10.

[0447] In some embodiments, the molecular scaffold may comprise at least one 3′ flanking region and at least one loop motif region as described in Tables 11 and 12. As a non-limiting example, the molecular scaffold may comprise 3F1 and Li, 3F1 and L2, 3F1 and L3, 3F1 and L4, 3F1 and L5, 3F1 and L6, 3F1 and L7, 3F1 and L8, 3F1 and L9, 3F1 and L10, 3F2 and L1, 3F2 and L2, 3F2 and L3, 3F2 and L4, 3F2 and L5, 3F2 and L6, 3F2 and L7, 3F2 and L8, 3F2 and L9, 3F2 and L10, 3F3 and L1, 3F3 and L2, 3F3 and L3, 3F3 and L4, 3F3 and L5, 3F3 and L6, 3F3 and L7, 3F3 and L8, 3F3 and L9, 3F3 and L10, 3F4 and L1, 3F4 and L2, 3F4 and L3, 3F4 and L4, 3F4 and L5, 3F4 and L6, 3F4 and L7, 3F4 and L8, 3F4 and L9, 3F4 and L10, 3F5 and L1, 3F5 and L2, 3F5 and L3, 3F5 and L4, 3F5 and L5, 3F5 and L6, 3F5 and L7, 3F5 and L8, 3F5 and L9, 3F5 and L10, 3F6 and L1, 3F6 and L2, 3F6 and L3, 3F6 and L4, 3F6 and L5, 3F6 and L6, 3F6 and L7, 3F6 and L8, 3F6 and L9, 3F6 and L10, 3F7 and L1, 3F7 and L2, 3F7 and L3, 3F7 and L4, 3F7 and L5, 3F7 and L6, 3F7 and L7, 3F7 and L8, 3F7 and L9, 3F7 and L10, 3F8 and L1, 3F8 and L2, 3F8 and L3, 3F8 and L4, 3F8 and L5, 3F8 and L6, 3F8 and L7, 3F8 and L8, 3F8 and L9, or 3F8 and L10.

[0448] In some embodiments, the molecular scaffold may comprise at least one 5′ flanking region and at least 3′ flanking region as described in Tables 10 and 12. As a non-limiting example, the molecular scaffold may comprise 5F1 and 3F1, 5F1 and 3F2, 5F1 and 3F3, 5F1 and 3F4, 5F1 and 3F5, 5F1 and 3F6, 5F1 and 3F7, 5F1 and 3F8, 5F2 and 3F1, 5F2 and 3F2, 5F2 and 3F3, 5F2 and 3F4, 5F2 and 3F5, 5F2 and 3F6, 5F2 and 3F7, 5F2 and 3F8, 5F3 and 3F1, 5F3 and 3F2, 5F3 and 3F3, 5F3 and 3F4, 5F3 and 3F5, 5F3 and 3F6, 5F3 and 3F7, 5F3 and 3F8, 5F4 and 3F1, 5F4 and 3F2, 5F4 and 3F3, 5F4 and 3F4, 5F4 and 3F5, 5F4 and 3F6, 5F4 and 3F7, 5F4 and 3F8, 5F5 and 3F1, 5F5 and 3F2, 5F5 and 3F3, 5F5 and 3F4, 5F5 and 3F5, 5F5 and 3F6, 5F5 and 3F7, 5F5 and 3F8, 5F6 and 3F1, 5F6 and 3F2, 5F6 and 3F3, 5F6 and 3F4, 5F6 and 3F5, 5F6 and 3F6, 5F6 and 3F7, 5F6 and 3F8, 5F7 and 3F1, 5F7 and 3F2, 5F7 and 3F3, 5F7 and 3F4, 5F7 and 3F5, 5F7 and 3F6, 5F7 and 3F7, 5F7 and 3F8, 5F8 and 3F1, 5F8 and 3F2, 5F8 and 3F3, 5F8 and 3F4, 5F8 and 3F5, 5F8 and 3F6, 5F8 and 3F7, 5F8 and 3F8, 5F9 and 3F1, 5F9 and 3F2, 5F9 and 3F3, 5F9 and 3F4, 5F9 and 3F5, 5F9 and 3F6, 5F9 and 3F7, or 5F9 and 3F8.

[0449] In some embodiments, the molecular scaffold may comprise at least one 5′ flanking region, at least one loop motif region and at least one 3′ flanking region as described in Tables 10-12. As a non-limiting example, the molecular scaffold may comprise 5F1, L1 and 3F1; 5F1, L1 and 3F2; 5F1, L1 and 3F3; 5F1, L1 and 3F4; 5F1, L1 and 3F5; 5F1, L1 and 3F6; 5F1, L1 and 3F7; 5F1, L1 and 3F8; 5F2, L1 and 3F1; 5F2, L1 and 3F2; 5F2, L1 and 3F3; 5F2, L1 and 3F4; 5F2, L1 and 3F5; 5F2, L1 and 3F6; 5F2, L1 and 3F7; 5F2, L1 and 3F8; 5F3, L1 and 3F1; 5F3, L1 and 3F2; 5F3, L1 and 3F3; 5F3, L1 and 3F4; 5F3, L1 and 3F5; 5F3, L1 and 3F6; 5F3, L1 and 3F7; 5F3, L1 and 3F8; 5F4, L1 and 3F1; 5F4, L1 and 3F2; 5F4, L1 and 3F3; 5F4, L1 and 3F4; 5F4, L1 and 3F5; 5F4, L1 and 3F6; 5F4, L1 and 3F7; 5F4, L1 and 3F8; 5F5, L1 and 3F1; 5F5, L1 and 3F2; 5F5, L1 and 3F3; 5F5, L1 and 3F4; 5F5, L1 and 3F5; 5F5, L1 and 3F6; 5F5, L1 and 3F7; 5F5, L1 and 3F8; 5F6, L1 and 3F1; 5F6, L1 and 3F2; 5F6, L1 and 3F3; 5F6, L1 and 3F4; 5F6, L1 and 3F5; 5F6, L1 and 3F6; 5F6, L1 and 3F7; 5F6, L1 and 3F8; 5F7, L1 and 3F1; 5F7, L1 and 3F2; 5F7, L1 and 3F3; 5F7, L1 and 3F4; 5F7, L1 and 3F5; 5F7, L1 and 3F6; 5F7, L1 and 3F7; 5F7, L1 and 3F8; 5F8, L1 and 3F1; 5F8, L1 and 3F2; 5F8, L1 and 3F3; 5F8, L1 and 3F4; 5F8, L1 and 3F5; 5F8, L1 and 3F6; 5F8, L1 and 3F7; 5F8, L1 and 3F8; 5F9, L1 and 3F1; 5F9, L1 and 3F2; 5F9, L1 and 3F3; 5F9, L1 and 3F4; 5F9, L1 and 3F5; 5F9, L1 and 3F6; 5F9, L1 and 3F7; 5F9, L1 and 3F8; 5F1, L2 and 3F1; 5F1, L2 and 3F2; 5F1, L2 and 3F3; 5F1, L2 and 3F4; 5F1, L2 and 3F5; 5F1, L2 and 3F6; 5F1, L2 and 3F7; 5F1, L2 and 3F8; 5F2, L2 and 3F1; 5F2, L2 and 3F2; 5F2, L2 and 3F3; 5F2, L2 and 3F4; 5F2, L2 and 3F5; 5F2, L2 and 3F6; 5F2, L2 and 3F7; 5F2, L2 and 3F8; 5F3, L2 and 3F1; 5F3, L2 and 3F2; 5F3, L2 and 3F3; 5F3, L2 and 3F4; 5F3, L2 and 3F5; 5F3, L2 and 3F6; 5F3, L2 and 3F7; 5F3, L2 and 3F8; 5F4, L2 and 3F1; 5F4, L2 and 3F2; 5F4, L2 and 3F3; 5F4, L2 and 3F4; 5F4, L2 and 3F5; 5F4, L2 and 3F6; 5F4, L2 and 3F7; 5F4, L2 and 3F8; 5F5, L2 and 3F1; 5F5, L2 and 3F2; 5F5, L2 and 3F3; 5F5, L2 and 3F4; 5F5, L2 and 3F5; 5F5, L2 and 3F6; 5F5, L2 and 3F7; 5F5, L2 and 3F8; 5F6, L2 and 3F1; 5F6, L2 and 3F2; 5F6, L2 and 3F3; 5F6, L2 and 3F4; 5F6, L2 and 3F5; 5F6, L2 and 3F6; 5F6, L2 and 3F7; 5F6, L2 and 3F8; 5F7, L2 and 3F1; 5F7, L2 and 3F2; 5F7, L2 and 3F3; 5F7, L2 and 3F4; 5F7, L2 and 3F5; 5F7, L2 and 3F6; 5F7, L2 and 3F7; 5F7, L2 and 3F8; 5F8, L2 and 3F1; 5F8, L2 and 3F2; 5F8, L2 and 3F3; 5F8, L2 and 3F4; 5F8, L2 and 3F5; 5F8, L2 and 3F6; 5F8, L2 and 3F7; 5F8, L2 and 3F8; 5F9, L2 and 3F1; 5F9, L2 and 3F2; 5F9, L2 and 3F3; 5F9, L2 and 3F4; 5F9, L2 and 3F5; 5F9, L2 and 3F6; 5F9, L2 and 3F7; 5F9, L2 and 3F8; 5F1, L3 and 3F1; 5F1, L3 and 3F2; 5F1, L3 and 3F3; 5F1, L3 and 3F4; 5F1, L3 and 3F5; 5F1, L3 and 3F6; 5F1, L3 and 3F7; 5F1, L3 and 3F8; 5F2, L3 and 3F1; 5F2, L3 and 3F2; 5F2, L3 and 3F3; 5F2, L3 and 3F4; 5F2, L3 and 3F5; 5F2, L3 and 3F6; 5F2, L3 and 3F7; 5F2, L3 and 3F8; 5F3, L3 and 3F1; 5F3, L3 and 3F2; 5F3, L3 and 3F3; 5F3, L3 and 3F4; 5F3, L3 and 3F5; 5F3, L3 and 3F6; 5F3, L3 and 3F7; 5F3, L3 and 3F8; 5F4, L3 and 3F1; 5F4, L3 and 3F2; 5F4, L3 and 3F3; 5F4, L3 and 3F4; 5F4, L3 and 3F5; 5F4, L3 and 3F6; 5F4, L3 and 3F7; 5F4, L3 and 3F8; 5F5, L3 and 3F1; 5F5, L3 and 3F2; 5F5, L3 and 3F3; 5F5, L3 and 3F4; 5F5, L3 and 3F5; 5F5, L3 and 3F6; 5F5, L3 and 3F7; 5F5, L3 and 3F8; 5F6, L3 and 3F1; 5F6, L3 and 3F2; 5F6, L3 and 3F3; 5F6, L3 and 3F4; 5F6, L3 and 3F5; 5F6, L3 and 3F6; 5F6, L3 and 3F7; 5F6, L3 and 3F8; 5F7, L3 and 3F1; 5F7, L3 and 3F2; 5F7, L3 and 3F3; 5F7, L3 and 3F4; 5F7, L3 and 3F5; 5F7, L3 and 3F6; 5F7, L3 and 3F7; 5F7, L3 and 3F8; 5F8, L3 and 3F1; 5F8, L3 and 3F2; 5F8, L3 and 3F3; 5F8, L3 and 3F4; 5F8, L3 and 3F5; 5F8, L3 and 3F6; 5F8, L3 and 3F7; 5F8, L3 and 3F8; 5F9, L3 and 3F1; 5F9, L3 and 3F2; 5F9, L3 and 3F3; 5F9, L3 and 3F4; 5F9, L3 and 3F5; 5F9, L3 and 3F6; 5F9, L3 and 3F7; 5F9, L3 and 3F8; 5F1, L4 and 3F1; 5F1, L4 and 3F2; 5F1, L4 and 3F3; 5F1, L4 and 3F4; 5F1, L4 and 3F5; 5F1, L4 and 3F6; 5F1, L4 and 3F7; 5F1, L4 and 3F8; 5F2, L4 and 3F1; 5F2, L4 and 3F2; 5F2, L4 and 3F3; 5F2, L4 and 3F4; 5F2, L4 and 3F5; 5F2, L4 and 3F6; 5F2, L4 and 3F7; 5F2, L4 and 3F8; 5F3, L4 and 3F1; 5F3, L4 and 3F2; 5F3, L4 and 3F3; 5F3, L4 and 3F4; 5F3, L4 and 3F5; 5F3, L4 and 3F6; 5F3, L4 and 3F7; 5F3, L4 and 3F8; 5F4, L4 and 3F1; 5F4, L4 and 3F2; 5F4, L4 and 3F3; 5F4, L4 and 3F4; 5F4, L4 and 3F5; 5F4, L4 and 3F6; 5F4, L4 and 3F7; 5F4, L4 and 3F8; 5F5, L4 and 3F1; 5F5, L4 and 3F2; 5F5, L4 and 3F3; 5F5, L4 and 3F4; 5F5, L4 and 3F5; 5F5, L4 and 3F6; 5F5, L4 and 3F7; 5F5, L4 and 3F8; 5F6, L4 and 3F1; 5F6, L4 and 3F2; 5F6, L4 and 3F3; 5F6, L4 and 3F4; 5F6, L4 and 3F5; 5F6, L4 and 3F6; 5F6, L4 and 3F7; 5F6, L4 and 3F8; 5F7, L4 and 3F1; 5F7, L4 and 3F2; 5F7, L4 and 3F3; 5F7, L4 and 3F4; 5F7, L4 and 3F5; 5F7, L4 and 3F6; 5F7, L4 and 3F7; 5F7, L4 and 3F8; 5F8, L4 and 3F1; 5F8, L4 and 3F2; 5F8, L4 and 3F3; 5F8, L4 and 3F4; 5F8, L4 and 3F5; 5F8, L4 and 3F6; 5F8, L4 and 3F7; 5F8, L4 and 3F8; 5F9, L4 and 3F1; 5F9, L4 and 3F2; 5F9, L4 and 3F3; 5F9, L4 and 3F4; 5F9, L4 and 3F5; 5F9, L4 and 3F6; 5F9, L4 and 3F7; 5F9, L4 and 3F8; 5F1, L5 and 3F1; 5F1, L5 and 3F2; 5F1, L5 and 3F3; 5F1, L5 and 3F4; 5F1, L5 and 3F5; 5F1, L5 and 3F6; 5F1, L5 and 3F7; 5F1, L5 and 3F8; 5F2, L5 and 3F1; 5F2, L5 and 3F2; 5F2, L5 and 3F3; 5F2, L5 and 3F4; 5F2, L5 and 3F5; 5F2, L5 and 3F6; 5F2, L5 and 3F7; 5F2, L5 and 3F8; 5F3, L5 and 3F1; 5F3, L5 and 3F2; 5F3, L5 and 3F3; 5F3, L5 and 3F4; 5F3, L5 and 3F5; 5F3, L5 and 3F6; 5F3, L5 and 3F7; 5F3, L5 and 3F8; 5F4, L5 and 3F1; 5F4, L5 and 3F2; 5F4, L5 and 3F3; 5F4, L5 and 3F4; 5F4, L5 and 3F5; 5F4, L5 and 3F6; 5F4, L5 and 3F7; 5F4, L5 and 3F8; 5F5, L5 and 3F1; 5F5, L5 and 3F2; 5F5, L5 and 3F3; 5F5, L5 and 3F4; 5F5, L5 and 3F5; 5F5, L5 and 3F6; 5F5, L5 and 3F7; 5F5, L5 and 3F8; 5F6, L5 and 3F1; 5F6, L5 and 3F2; 5F6, L5 and 3F3; 5F6, L5 and 3F4; 5F6, L5 and 3F5; 5F6, L5 and 3F6; 5F6, L5 and 3F7; 5F6, L5 and 3F8; 5F7, L5 and 3F1; 5F7, L5 and 3F2; 5F7, L5 and 3F3; 5F7, L5 and 3F4; 5F7, L5 and 3F5; 5F7, L5 and 3F6; 5F7, L5 and 3F7; 5F7, L5 and 3F8; 5F8, L5 and 3F1; 5F8, L5 and 3F2; 5F8, L5 and 3F3; 5F8, L5 and 3F4; 5F8, L5 and 3F5; 5F8, L5 and 3F6; 5F8, L5 and 3F7; 5F8, L5 and 3F8; 5F9, L5 and 3F1; 5F9, L5 and 3F2; 5F9, L5 and 3F3; 5F9, L5 and 3F4; 5F9, L5 and 3F5; 5F9, L5 and 3F6; 5F9, L5 and 3F7; or 5F9, L5 and 3F8.

[0450] In some embodiments, the molecular scaffold may comprise one or more linkers known in the art. The linkers may separate regions or one molecular scaffold from another. As a non-limiting example, the molecular scaffold may be polycistronic.

[0451] In some embodiments, the modulatory polynucleotide is designed using at least one of the following properties: loop variant, seed mismatch/bulge/wobble variant, stem mismatch, loop variant and basal stem mismatch variant, seed mismatch and basal stem mismatch variant, stem mismatch and basal stem mismatch variant, seed wobble and basal stem wobble variant, or a stem sequence variant.

Introduction into Cells

[0452] siRNA molecules may be delivered to target cells for targeting the gene of interest inside the target cells. In some embodiments, the cells may include, but are not limited to, cells of mammalian origin, cells of human origins, embryonic stem cells, induced pluripotent stem cells, neural stem cells, neural progenitor cells and differentiated neural cells.

[0453] In some embodiments, the siRNA molecules (e.g., siRNA duplexes) may be introduced into target cells using viral vehicles such as AAV particles. These AAV particles are engineered and optimized to facilitate the entry of siRNA molecule into cells that are not readily amendable to transfection. Also, some synthetic viral vectors possess an ability to integrate the shRNA into the cell genome, thereby leading to stable siRNA expression and long-term knockdown of a target gene, e.g., an astrocyte or neuron. In this manner, viral vectors are engineered as vehicles for specific delivery while lacking the deleterious replication and/or integration features found in wild-type virus.

[0454] In some embodiments, the siRNA molecules targeting a gene of interest are introduced into a cell by contacting the cell with a composition comprising a lipophilic carrier and an AAV particle comprising a nucleic acid sequence encoding the siRNA molecules. In other embodiments, the siRNA molecule is introduced into a cell by transfecting or infecting the cell with an AAV particle comprising nucleic acid sequences capable of producing the siRNA molecule when transcribed in the cell. In some embodiments, the siRNA molecule is introduced into a cell by injecting into the cell an AAV particle comprising a nucleic acid sequence capable of producing the siRNA molecule when transcribed in the cell.

[0455] In some embodiments, an AAV particle comprising a nucleic acid sequence encoding the siRNA molecules may be transduced into cells.

[0456] In other embodiments, the AAV particles comprising the nucleic acid sequence encoding the siRNA molecules may be delivered into cells by electroporation (e.g. U.S. Patent Application Publication No. 20050014264; the contents of which are herein incorporated by reference in their entirety).

[0457] Other methods for introducing AAV particles comprising the nucleic acid sequence for the siRNA molecules described herein may include photochemical internalization as described in U. S. Patent Application Publication No. 20120264807; the contents of which are herein incorporated by reference in their entirety.

[0458] In some embodiments, the AAV particles from any relevant species, such as, but not limited to, human, dog, mouse, rat or monkey may be introduced into cells.

[0459] In some embodiments, the AAV particles may be introduced into cells which are relevant to the disease to be treated. As a non-limiting example, the disease is a tauopathy and/or Alzheimer's Disease and the target cells are entorhinal cortex, hippocampal or cortical neurons.

[0460] In some embodiments, the AAV particles may be introduced into cells which have a high level of endogenous expression of the target sequence.

[0461] In another embodiment, the AAV particles may be introduced into cells which have a low level of endogenous expression of the target sequence.

[0462] In some embodiments, the cells may be those which have a high efficiency of AAV transduction.

[0463] In other embodiments, the AAV particles comprising a nucleic acid sequence encoding the siRNA molecules may be used to deliver siRNA molecules to the central nervous system (e.g., U.S. Pat. No. 6,180,613; the contents of which are herein incorporated by reference in their entirety).

[0464] In some aspects, the AAV particles comprising a nucleic acid sequence encoding the siRNA molecules may further comprise a modified capsid including peptides from non-viral origin. In other aspects, the AAV particle may contain a CNS specific (e.g., tropism for CNS or CNS tissues) chimeric capsid to facilitate the delivery of encoded siRNA duplexes into the brain and the spinal cord. For example, an alignment of cap nucleotide sequences from AAV variants exhibiting CNS tropism may be constructed to identify variable region (VR) sequence and structure.

[0465] In some embodiments, the AAV particles comprising a nucleic acid sequence encoding the siRNA molecules may encode siRNA molecules which are polycistronic molecules. The siRNA molecules may additionally comprise one or more linkers between regions of the siRNA molecules.

[0466] In some embodiments, an AAV particle may comprise at least one of the modulatory polynucleotides encoding at least one of the siRNA sequences or duplexes described herein.

[0467] In some embodiments, an expression vector or viral genome may comprise, from ITR to ITR recited 5′ to 3′, an ITR, a promoter, an intron, a modulatory polynucleotide, a polyA sequence and an ITR.

[0468] In some embodiments, the encoded siRNA molecule may be located downstream of a promoter in an expression vector such as, but not limited to, CMV, U6, H1, CBA or a CBA promoter with a SV40 intron. Further, the encoded siRNA molecule may also be located upstream of the polyadenylation sequence in an expression vector. As a non-limiting example, the encoded siRNA molecule may be located within 1, 2, 3, 4, 5, 6, 7, 8, 9, 10, 11, 12, 13, 14, 15, 16, 17, 18, 19, 20, 21, 22, 23, 24, 25, 26, 27, 28, 29, 30 or more than 30 nucleotides downstream from the promoter and/or upstream of the polyadenylation sequence in an expression vector. As another non-limiting example, the encoded siRNA molecule may be located within 1-5, 1-10, 1-15, 1-20, 1-25, 1-30, 5-10, 5-15, 5-20, 5-25, 5-30, 10-15, 10-20, 10-25, 10-30, 15-20, 15-25, 15-30, 20-25, 20-30 or 25-30 nucleotides downstream from the promoter and/or upstream of the polyadenylation sequence in an expression vector. As a non-limiting example, the encoded siRNA molecule may be located within the first 1%, 2%, 3%, 4%, 5%, 6%, 7%, 8%, 9%, 10%, 15%, 20%, 25% or more than 25% of the nucleotides downstream from the promoter and/or upstream of the polyadenylation sequence in an expression vector. As another non-limiting example, the encoded siRNA molecule may be located with the first 1-5%, 1-10%, 1-15%, 1-20%, 1-25%, 5-10%, 5-15%, 5-20%, 5-25%, 10-15%, 10-20%, 10-25%, 15-20%, 15-25%, or 20-25% downstream from the promoter and/or upstream of the polyadenylation sequence in an expression vector.

[0469] In some embodiments, the encoded siRNA molecule may be located upstream of the polyadenylation sequence in an expression vector. Further, the encoded siRNA molecule may be located downstream of a promoter such as, but not limited to, CMV, U6, CBA or a CBA promoter with a SV40 intron in an expression vector. As a non-limiting example, the encoded siRNA molecule may be located within 1, 2, 3, 4, 5, 6, 7, 8, 9, 10, 11, 12, 13, 14, 15, 16, 17, 18, 19, 20, 21, 22, 23, 24, 25, 26, 27, 28, 29, 30 or more than 30 nucleotides downstream from the promoter and/or upstream of the polyadenylation sequence in an expression vector. As another non-limiting example, the encoded siRNA molecule may be located within 1-5, 1-10, 1-15, 1-20, 1-25, 1-30, 5-10, 5-15, 5-20, 5-25, 5-30, 10-15, 10-20, 10-25, 10-30, 15-20, 15-25, 15-30, 20-25, 20-30 or 25-30 nucleotides downstream from the promoter and/or upstream of the polyadenylation sequence in an expression vector. As a non-limiting example, the encoded siRNA molecule may be located within the first 1%, 2%, 3%, 4%, 5%, 6%, 7%, 8%, 9%, 10%, 15%, 20%, 25% or more than 25% of the nucleotides downstream from the promoter and/or upstream of the polyadenylation sequence in an expression vector. As another non-limiting example, the encoded siRNA molecule may be located with the first 1-5%, 1-10%, 1-15%, 1-20%, 1-25%, 5-10%, 5-15%, 5-20%, 5-25%, 10-15%, 10-20%, 10-25%, 15-20%, 15-25%, or 20-25% downstream from the promoter and/or upstream of the polyadenylation sequence in an expression vector.

[0470] In some embodiments, the encoded siRNA molecule may be located in a scAAV.

[0471] In some embodiments, the encoded siRNA molecule may be located in an ssAAV.

[0472] In some embodiments, the encoded siRNA molecule may be located near the 5′ end of the flip ITR in an expression vector. In another embodiment, the encoded siRNA molecule may be located near the 3′ end of the flip ITR in an expression vector. In yet another embodiment, the encoded siRNA molecule may be located near the 5′ end of the flop ITR in an expression vector. In yet another embodiment, the encoded siRNA molecule may be located near the 3′ end of the flop ITR in an expression vector. In some embodiments, the encoded siRNA molecule may be located between the 5′ end of the flip ITR and the 3′ end of the flop ITR in an expression vector. In some embodiments, the encoded siRNA molecule may be located between (e.g., half-way between the 5′ end of the flip ITR and 3′ end of the flop ITR or the 3′ end of the flop ITR and the 5′ end of the flip ITR), the 3′ end of the flip ITR and the 5′ end of the flip ITR in an expression vector. As a non-limiting example, the encoded siRNA molecule may be located within 1, 2, 3, 4, 5, 6, 7, 8, 9, 10, 11, 12, 13, 14, 15, 16, 17, 18, 19, 20, 21, 22, 23, 24, 25, 26, 27, 28, 29, 30 or more than 30 nucleotides downstream from the 5′ or 3′ end of an ITR (e.g., Flip or Flop ITR) in an expression vector. As a non-limiting example, the encoded siRNA molecule may be located within 1, 2, 3, 4, 5, 6, 7, 8, 9, 10, 11, 12, 13, 14, 15, 16, 17, 18, 19, 20, 21, 22, 23, 24, 25, 26, 27, 28, 29, 30 or more than 30 nucleotides upstream from the 5′ or 3′ end of an ITR (e.g., Flip or Flop ITR) in an expression vector. As another non-limiting example, the encoded siRNA molecule may be located within 1-5, 1-10, 1-15, 1-20, 1-25, 1-30, 5-10, 5-15, 5-20, 5-25, 5-30, 10-15, 10-20, 10-25, 10-30, 15-20, 15-25, 15-30, 20-25, 20-30 or 25-30 nucleotides downstream from the 5′ or 3′ end of an ITR (e.g., Flip or Flop ITR) in an expression vector. As another non-limiting example, the encoded siRNA molecule may be located within 1-5, 1-10, 1-15, 1-20, 1-25, 1-30, 5-10, 5-15, 5-20, 5-25, 5-30, 10-15, 10-20, 10-25, 10-30, 15-20, 15-25, 15-30, 20-25, 20-30 or 25-30 upstream from the 5′ or 3′ end of an ITR (e.g., Flip or Flop ITR) in an expression vector. As a non-limiting example, the encoded siRNA molecule may be located within the first 1%, 2%, 3%, 4%, 5%, 6%, 7%, 8%, 9%, 10%, 15%, 20%, 25% or more than 25% of the nucleotides upstream from the 5′ or 3′ end of an ITR (e.g., Flip or Flop ITR) in an expression vector. As another non-limiting example, the encoded siRNA molecule may be located with the first 1-5%, 1-10%, 1-15%, 1-20%, 1-25%, 5-10%, 5-15%, 5-20%, 5-25%, 10-15%, 10-20%, 10-25%, 15-20%, 15-25%, or 20-25% downstream from the 5′ or 3′ end of an ITR (e.g., Flip or Flop ITR) in an expression vector.

[0473] In some embodiments, AAV particle comprising the nucleic acid sequence for the siRNA molecules described herein may be formulated for CNS delivery. Agents that cross the brain blood barrier may be used. Capsids engineered for efficient crossing of the blood brain barrier may be used. Non-limiting examples of such capsids or peptide inserts include VOY101, VOY201, VOY701, VOY801, VOY1101, AAVPHP.N, AAVPHP.A, AAVPHP.B, PHP.B2, PHP.B3, G2A3, G2B4, G2B5, PHP.S, and variants thereof. For example, some cell penetrating peptides that can target siRNA molecules to the brain blood barrier endothelium may be used to formulate the siRNA duplexes targeting the gene of interest.

[0474] In some embodiments, AAV particle comprising the nucleic acid sequence for the payloads of interest (e.g., Frataxin, APOE, Tau) described herein may be formulated for CNS delivery. Agents that cross the brain blood barrier may be used. Capsids engineered for efficient crossing of the blood brain barrier may be used. Non-limiting examples of such capsids or peptide inserts include VOY101, VOY201, VOY701, VOY801, VOY1101, AAVPHP.N, AAVPHP.A, AAVPHP.B, PHP.B2, PHP.B3, G2A3, G2B4, G2B5, PHP.S, and variants thereof. For example, some cell penetrating peptides that deliver the payload to the brain blood barrier endothelium may be used to formulate the payload of the gene of interest.

[0475] In some embodiments, the AAV particle comprising a nucleic acid sequence encoding the siRNA molecules may be administered directly to the CNS. As a non-limiting example, the vector comprises a nucleic acid sequence encoding the siRNA molecules targeting ApoE2. As a non-limiting example, the vector comprises a nucleic acid sequence encoding the siRNA molecules targeting ApoE3. As a non-limiting example, the vector comprises a nucleic acid sequence encoding the siRNA molecules targeting ApoE4. As a non-limiting example, the vector comprises a nucleic acid sequence encoding the siRNA molecules targeting SOD1. As a non-limiting example, the vector comprises a nucleic acid sequence encoding the siRNA molecules targeting HTT. As a non-limiting example, the vector comprises a nucleic acid sequence encoding the siRNA molecules targeting Tau.

[0476] In specific embodiments, compositions of AAV particles comprising a nucleic acid sequence encoding the siRNA molecules of the present disclosure may be administered in a way which facilitates the vectors or siRNA molecule to enter the central nervous system and penetrate into CNS tissues and/or cells.

[0477] In some embodiments, the AAV particle may be administered to a subject (e.g., to the CNS of a subject via intrathecal administration) in a therapeutically effective amount for the siRNA duplexes or dsRNA to target the motor neurons and astrocytes in the spinal cord and/or brain stem. As a non-limiting example, the siRNA duplexes or dsRNA may reduce the expression of a target protein or mRNA. As another non-limiting example, the siRNA duplexes or dsRNA can suppress a target gene or protein and reduce target gene or protein mediated toxicity. The reduction of target protein and/or mRNA as well as target gene and/or protein mediated toxicity may be accomplished with almost no enhanced inflammation.

### AAV Production

[0478] Viral production disclosed herein describes processes and methods for producing AAV particles (with enhanced, improved and/or increased tropism for a target tissue) that may be used to contact a target cell to deliver a payload.

[0479] The present disclosure provides methods for the generation of AAV particles comprising targeting peptides. In some embodiments, the AAV particles are prepared by viral genome replication in a viral replication cell. Any method known in the art may be used for the preparation of AAV particles. In some embodiments, AAV particles are produced in mammalian cells (e.g., HEK293). In another embodiment, AAV particles are produced in insect cells (e.g., Sf9)

[0480] Methods of making AAV particles are well known in the art and are described in e.g., U.S. Pat. Nos. 6,204,059, 5,756,283, 6,258,595, 6,261,551, 6,270,996, 6,281,010, 6,365,394, 6,475,769, 6,482,634, 6,485,966, 6,943,019, 6,953,690, 7,022,519, 7,238,526, 7,291,498 and 7,491,508, 5,064,764, 6,194,191, 6,566,118, 8,137,948; or International Publication Nos. WO1996039530, WO1998010088, WO1999014354, WO1999015685, WO1999047691, WO2000055342, WO2000075353 and WO2001023597; Methods In Molecular Biology, ed. Richard, Humana Press, N J (1995); O'Reilly et al., Baculovirus Expression Vectors, A Laboratory Manual, Oxford Univ. Press (1994); Samulski et al., J. Vir. 63:3822-8 (1989); Kajigaya et al., Proc. Nat'l. Acad. Sci. USA 88: 4646-50 (1991); Ruffing et al., J. Vir. 66:6922-30 (1992); Kimbauer et al., Vir., 219:37-44 (1996); Zhao et al., Vir. 272:382-93 (2000); the contents of each of which are herein incorporated by reference in their entirety. In some embodiments, the AAV particles are made using the methods described in International Patent Publication WO2015191508, the contents of which are herein incorporated by reference in their entirety.

[0481] The viral replication cell may be selected from any biological organism, including prokaryotic (e.g., bacterial) cells, and eukaryotic cells, including, insect cells, yeast cells and mammalian cells. Viral replication cells commonly used for production of recombinant AAV viral particles include, but are not limited to, HEK293 cells, COS cells, HeLa cells, KB cells, and other mammalian cell lines as described in U.S. Pat. Nos. 6,156,303, 5,387,484, 5,741,683, 5,691,176, and 5,688,676; U.S. Patent Application Publication No. 2002/0081721, and International Patent Publication Nos. WO 2000047757, WO 2000024916, and WO 1996017947, the contents of each of which are herein incorporated by reference in their entirety. Viral replication cells may comprise other mammalian cells such as A549, WEH1, 3T3, 10T1/2, BHK, MDCK, COS 1, COS 7, BSC 1, BSC 40, BMT 10, VERO, W138, Saos, C2C12, L cells, HT1080, HepG2 and primary fibroblast, hepatocyte and myoblast cells derived from mammals. Viral replication cells may comprise cells derived from mammalian species including, but not limited to, human, monkey, mouse, rat, rabbit, and hamster. Viral replication cells may comprise cells derived from a cell type, including but not limited to fibroblast, hepatocyte, tumor cell, cell line transformed cell, etc.

[0482] In some embodiments, the present disclosure provides a method for producing an AAV particle in mammalian cells, comprising the steps of 1) simultaneously co-transfecting mammalian cells, such as, but not limited to HEK293 cells, with a viral genome comprising a payload region (payload construct), a viral genome comprising polynucleotide sequences for rep and cap genes (rep/cap construct) and a viral genome comprising polynucleotide sequences encoding helper components (helper construct), 2) harvesting and purifying the AAV particles comprising a viral genome. This triple transfection method of AAV particle production may be utilized to produce small lots of virus.

[0483] In some embodiments, the AAV particles may be produced in a viral replication cell that comprises an insect cell.

[0484] Growing conditions for insect cells in culture, and production of heterologous products in insect cells in culture are well-known in the art, see U.S. Pat. No. 6,204,059, the contents of which are herein incorporated by reference in their entirety.

[0485] Any insect cell which allows for replication of parvovirus and which can be maintained in culture can be used in accordance with the present disclosure. Cell lines may be used from Spodoptera frugiperda, including, but not limited to the Sf9 or Sf21 cell lines, Drosophila cell lines, or mosquito cell lines, such as Aedes albopictus derived cell lines. Use of insect cells for expression of heterologous proteins is well documented, as are methods of introducing nucleic acids, such as vectors, e.g., insect-cell compatible vectors, into such cells and methods of maintaining such cells in culture. See, for example, Methods in Molecular Biology, ed. Richard, Humana Press, N J (1995); O'Reilly et al., Baculovirus Expression Vectors, A Laboratory Manual, Oxford Univ. Press (1994); Samulski et al., J. Vir. 63:3822-8 (1989); Kajigaya et al., Proc. Nat'l. Acad. Sci. USA 88: 4646-50 (1991); Ruffing et al., J. Vir. 66:6922-30 (1992); Kimbauer et al., Vir. 219:37-44 (1996); Zhao et al., Vir. 272:382-93 (2000); and Samulski et al., U.S. Pat. No. 6,204,059, the contents of each of which is herein incorporated by reference in its entirety.

[0486] In some embodiments, the present disclosure provides a method for producing an AAV particle in a baculovirus/Sf9 system, comprising the steps of: 1) co-transfecting competent bacterial cells with a bacmid vector and either a viral construct vector and/or AAV payload construct vector, 2) isolating the resultant viral construct expression vector and AAV payload construct expression vector and separately transfecting viral replication cells, 3) isolating and purifying resultant payload and viral construct particles comprising viral construct expression vector or AAV payload construct expression vector, 4) co-infecting a viral replication cell with both the AAV payload and viral construct particles comprising viral construct expression vector or AAV payload construct expression vector, and 5) harvesting and purifying AAV particles comprising a viral genome.

[0487] Briefly, the viral construct vector and the AAV payload construct vector are each incorporated by a transposon donor/acceptor system into a bacmid, also known as a baculovirus plasmid, by standard molecular biology techniques known and performed by a person skilled in the art. Transfection of separate viral replication cell populations produces two baculoviruses, one that comprises the viral construct expression vector, and another that comprises the AAV payload construct expression vector. The two baculoviruses may be used to infect a single viral replication cell population for production of AAV particles.

[0488] Baculovirus expression vectors for producing viral particles in insect cells, including but not limited to Spodoptera frugiperda (Sf9) cells, provide high titers of viral particle product. Recombinant baculovirus encoding the viral construct expression vector and AAV payload construct expression vector initiates a productive infection of viral replicating cells. Infectious baculovirus particles released from the primary infection secondarily infect additional cells in the culture, exponentially infecting the entire cell culture population in a number of infection cycles that is a function of the initial multiplicity of infection, see Urabe, M. et al., J Virol. 2006 February; 80 (4):1874-85, the contents of which are herein incorporated by reference in their entirety.

[0489] Production of AAV particles with baculovirus in an insect cell system may address known baculovirus genetic and physical instability. In some embodiments, the production system addresses baculovirus instability over multiple passages by utilizing a titerless infected-cells preservation and scale-up system. Small scale seed cultures of viral producing cells are transfected with viral expression constructs encoding the structural, non-structural, components of the viral particle. Baculovirus-infected viral producing cells are harvested into aliquots that may be cryopreserved in liquid nitrogen; the aliquots retain viability and infectivity for infection of large scale viral producing cell culture Wasilko D J et al., Protein Expr Purif. 2009 June; 65(2):122-32, the contents of which are herein incorporated by reference in their entirety.

[0490] A genetically stable baculovirus may be used as the source of one or more of the components for producing AAV particles in invertebrate cells. In some embodiments, defective baculovirus expression vectors may be maintained episomally in insect cells. In such an embodiment the bacmid vector is engineered with replication control elements, including but not limited to promoters, enhancers, and/or cell-cycle regulated replication elements.

[0491] In some embodiments, stable viral replication cells permissive for baculovirus infection are engineered with at least one stable integrated copy of any of the elements necessary for AAV replication and viral particle production including, but not limited to, the entire AAV genome, Rep and Cap genes, Rep genes, Cap genes, each Rep protein as a separate transcription cassette, each VP protein as a separate transcription cassette, the AAP (assembly activation protein), or at least one of the baculovirus helper genes with native or non-native promoters.

[0492] AAV particles described herein may be produced by triple transfection or baculovirus mediated virus production, or any other method known in the art. Any suitable permissive or packaging cell known in the art may be employed to produce the particles. Mammalian cells are often preferred. Also preferred are trans-complementing packaging cell lines that provide functions deleted from a replication-defective helper virus, e.g., 293 cells or other Ela trans-complementing cells. A packaging cell line may be used that is stably transformed to express cap and/or rep genes. Alternatively, a packaging cell line may be used that is stably transformed to express helper constructs necessary for AAV particle assembly.

[0493] Recombinant AAV virus particles are, in some cases, produced and purified from culture supernatants according to the procedure as described in US20160032254, the contents of which are incorporated by reference.

[0494] In some embodiments, AAV particles are produced wherein all three VP proteins are expressed at a stoichiometry around 1:1:10 (VP1:VP2:VP3). While not wishing to be bound by theory, the regulatory mechanisms that allow this controlled level of expression include the production of two mRNAs, one for VP1, and the other for VP2 and VP3, produced by differential splicing.

### Small-Scale Production

[0495] In some cases, 293T cells (adhesion/suspension) are transfected with polyethyleneimine (PEI) with plasmids required for production of AAV, i.e., AAV2 rep, an adenoviral helper construct and a ITR flanked payload cassette. The AAV2 rep plasmid also contains the cap sequence of the particular virus being studied. Twenty-four hours after transfection (no medium changes for suspension), which occurs in DMEM/F17 with/without serum, the medium is replaced with fresh medium with or without serum. Three (3) days after transfection, a sample is taken from the culture medium of the 293 adherent cells. Subsequently cells are scraped, or suspension cells are pelleted, and transferred into a receptacle. For adhesion cells, after centrifugation to remove cellular pellet, a second sample is taken from the supernatant after scraping. Next, cell lysis is achieved by three consecutive freeze-thaw cycles (−80C to 37C) or adding detergent triton. Cellular debris is removed by centrifugation or depth filtration and sample 3 is taken from the medium. The samples are quantified for AAV particles by DNase resistant genome titration by DNA qPCR. The total production yield from such a transfection is equal to the particle concentration from sample 3.

[0496] AAV particle titers are measured according to genome copy number (genome particles per milliliter). Genome particle concentrations are based on DNA qPCR of the vector DNA as previously reported (Clark et al. (1999) Hum. Gene Ther., 10:1031-1039; Veldwijk et al. (2002) Mol. Ther., 6:272-278).

### Large-Scale Production

[0497] In some embodiments, AAV particle production may be modified to increase the scale of production. Large scale viral production methods according to the present disclosure may include any of those taught in U.S. Pat. Nos. 5,756,283, 6,258,595, 6,261,551, 6,270,996, 6,281,010, 6,365,394, 6,475,769, 6,482,634, 6,485,966, 6,943,019, 6,953,690, 7,022,519, 7,238,526, 7,291,498 and 7,491,508 or International Publication Nos. WO1996039530, WO1998010088, WO1999014354, WO1999015685, WO1999047691, WO2000055342, WO2000075353 and WO2001023597, the contents of each of which are herein incorporated by reference in their entirety. Methods of increasing viral particle production scale typically comprise increasing the number of viral replication cells. In some embodiments, viral replication cells comprise adherent cells. To increase the scale of viral particle production by adherent viral replication cells, larger cell culture surfaces are required. In some cases, large-scale production methods comprise the use of roller bottles to increase cell culture surfaces. Other cell culture substrates with increased surface areas are known in the art. Examples of additional adherent cell culture products with increased surface areas include, but are not limited to CELLSTACK®, CELLCUBE® (Corning Corp., Corning, N.Y.) and NUNC™ CELL FACTORY™ (Thermo Scientific, Waltham, Mass.). In some cases, large-scale adherent cell surfaces may comprise from about 1,000 cm² to about 100,000 cm². In some cases, large-scale adherent cell cultures may comprise from about 10⁷ to about 10⁹ cells, from about 10⁸ to about 10¹⁰ cells, from about 10⁹ to about 10¹² cells or at least 10¹² cells. In some cases, large-scale adherent cultures may produce from about 10⁹ to about 10¹², from about 10¹⁰ to about 10¹³, from about 10¹¹ to about 10¹⁴, from about 10¹² to about 10¹⁵ or at least 10¹⁵ viral particles.

[0498] In some embodiments, large-scale viral production methods of the present disclosure may comprise the use of suspension cell cultures. Suspension cell culture allows for significantly increased numbers of cells. Typically, the number of adherent cells that can be grown on about 10-50 cm² of surface area can be grown in about 1 cm³ volume in suspension.

[0499] Transfection of replication cells in large-scale culture formats may be carried out according to any methods known in the art. For large-scale adherent cell cultures, transfection methods may include, but are not limited to the use of inorganic compounds (e.g. calcium phosphate), organic compounds [e.g. polyethyleneimine (PEI)] or the use of non-chemical methods (e.g. electroporation.) With cells grown in suspension, transfection methods may include, but are not limited to the use of calcium phosphate and the use of PEI. In some cases, transfection of large scale suspension cultures may be carried out according to the section entitled “Transfection Procedure” described in Feng, L. et al., 2008. Biotechnol Appl. Biochem. 50:121-32, the contents of which are herein incorporated by reference in their entirety. According to such embodiments, PEI-DNA complexes may be formed for introduction of plasmids to be transfected. In some cases, cells being transfected with PEI-DNA complexes may be ‘shocked’ prior to transfection. This comprises lowering cell culture temperatures to 4° C. for a period of about 1 hour. In some cases, cell cultures may be shocked for a period of from about 10 minutes to about 5 hours. In some cases, cell cultures may be shocked at a temperature of from about 0° C. to about 20° C.

[0500] In some cases, transfections may include one or more vectors for expression of an RNA effector molecule to reduce expression of nucleic acids from one or more AAV payload constructs. Such methods may enhance the production of viral particles by reducing cellular resources wasted on expressing payload constructs. In some cases, such methods may be carried out according to those methods taught in US Publication No. US2014/0099666, the contents of which are herein incorporated by reference in their entirety.

### II. Formulation and Delivery

### Pharmaceutical Compositions

[0501] According to the present disclosure the AAV particles may be prepared as pharmaceutical compositions. It will be understood that such compositions necessarily comprise one or more active ingredients and, most often, a pharmaceutically acceptable excipient.

[0502] Relative amounts of the active ingredient (e.g. AAV particle), a pharmaceutically acceptable excipient, and/or any additional ingredients in a pharmaceutical composition in accordance with the present disclosure may vary, depending upon the identity, size, and/or condition of the subject being treated and further depending upon the route by which the composition is to be administered. For example, the composition may comprise between 0.1% and 99% (w/w) of the active ingredient. By way of example, the composition may comprise between 0.1% and 100%, e.g., between 0.5 and 50%, between 1-30%, between 5-80%, at least 80% (w/w) active ingredient.

[0503] In some embodiments, the AAV particle pharmaceutical compositions described herein may comprise at least one payload. As a non-limiting example, the pharmaceutical compositions may contain an AAV particle with 1, 2, 3, 4 or 5 payloads.

[0504] Although the descriptions of pharmaceutical compositions provided herein are principally directed to pharmaceutical compositions which are suitable for administration to humans, it will be understood by the skilled artisan that such compositions are generally suitable for administration to any other animal, e.g., to non-human animals, e.g. non-human mammals. Modification of pharmaceutical compositions suitable for administration to humans in order to render the compositions suitable for administration to various animals is well understood, and the ordinarily skilled veterinary pharmacologist can design and/or perform such modification with merely ordinary, if any, experimentation. Subjects to which administration of the pharmaceutical compositions is contemplated include, but are not limited to, humans and/or other primates; mammals, including commercially relevant mammals such as cattle, pigs, horses, sheep, cats, dogs, mice, rats, birds, including commercially relevant birds such as poultry, chickens, ducks, geese, and/or turkeys.

[0505] In some embodiments, compositions are administered to humans, human patients or subjects.

### Formulations

[0506] Formulations of the present disclosure can include, without limitation, saline, liposomes, lipid nanoparticles, polymers, peptides, proteins, cells transfected with viral vectors (e.g., for transfer or transplantation into a subject) and combinations thereof.

[0507] Formulations of the pharmaceutical compositions described herein may be prepared by any method known or hereafter developed in the art of pharmacology. As used herein the term “pharmaceutical composition” refers to compositions comprising at least one active ingredient and optionally one or more pharmaceutically acceptable excipients.

[0508] In general, such preparatory methods include the step of associating the active ingredient with an excipient and/or one or more other accessory ingredients. As used herein, the phrase “active ingredient” generally refers either to an AAV particle carrying a payload region encoding the polypeptides described herein or to the end product encoded by a viral genome of an AAV particle as described herein.

[0509] Formulations of the AAV particles and pharmaceutical compositions described herein may be prepared by any method known or hereafter developed in the art of pharmacology. In general, such preparatory methods include the step of bringing the active ingredient into association with an excipient and/or one or more other accessory ingredients, and then, if necessary and/or desirable, dividing, shaping and/or packaging the product into a desired single- or multi-dose unit.

[0510] A pharmaceutical composition in accordance with the present disclosure may be prepared, packaged, and/or sold in bulk, as a single unit dose, and/or as a plurality of single unit doses. As used herein, a “unit dose” refers to a discrete amount of the pharmaceutical composition comprising a predetermined amount of the active ingredient. The amount of the active ingredient is generally equal to the dosage of the active ingredient which would be administered to a subject and/or a convenient fraction of such a dosage such as, for example, one-half or one-third of such a dosage.

[0511] In some embodiments, the AAV particles described herein may be formulated in PBS with 0.001% of Pluronic acid (F-68) at a pH of about 7.0.

[0512] In some embodiments, the AAV formulations described herein may contain sufficient AAV particles for expression of at least one expressed functional payload. As a non-limiting example, the AAV particles may contain viral genomes encoding 1, 2, 3, 4 or 5 functional payloads.

[0513] In some embodiments, the formulations described herein may contain at least one AAV particle comprising the nucleic acid sequence encoding a protein of interest. The protein of interest may include but are not limited to an antibody, Aromatic L-Amino Acid Decarboxylase (AADC), ApoE2, Frataxin, survival motor neuron (SMN) protein, glucocerebrosidase, N-sulfoglucosamine sulfohydrolase, N-acetyl-alpha-glucosaminidase, iduronate 2-sulfatase, alpha-L-iduronidase, palmitoyl-protein thioesterase 1, tripeptidyl peptidase 1, battenin, CLN5, CLN6 (linclin), MFSD8, CLN8, aspartoacylase (ASPA), progranulin (GRN), MeCP2, beta-galactosidase (GLB1), and gigaxonin (GAN).

[0514] In some embodiments, the formulations described herein may contain at least one AAV particle comprising the nucleic acid sequence encoding the siRNA molecules described herein. In some embodiments, the siRNA molecules may target gene of interest at one target site. In another embodiment, the formulation comprises a plurality of AAV particles, each AAV particle comprising a nucleic acid sequence encoding a siRNA molecule targeting the gene of interest at different target site. The target gene may be targeted at 2, 3, 4, 5 or more than 5 sites. In some embodiments, the target gene may include but is not limited to are superoxide dismutase 1 (SOD1), chromosome 9 open reading frame 72 (C9ORF72), TAR DNA binding protein (TARDBP), ataxin-3 (ATXN3), huntingtin (HTT), amyloid precursor protein (APP), apolipoprotein E (ApoE), microtubule-associated protein tau (MAPT), alpha-synuclein (SNCA), voltage-gated sodium channel alpha subunit 9 (SCN9A), voltage-gated sodium channel alpha subunit 10 (SCN10A) and/or MeCP2.

[0515] According to the present disclosure AAV particles may be formulated for CNS delivery. Agents that cross the brain blood barrier may be used. For example, some cell penetrating peptides that can target molecules to the brain blood barrier endothelium may be used for formulation (e.g., Mathupala, Expert Opin Ther Pat., 2009, 19, 137-140; the contents of which are incorporated herein by reference in their entirety).

### Excipients and Diluents

[0516] The AAV particles described herein can be formulated using one or more excipients or diluents to (1) increase stability; (2) increase cell transfection or transduction; (3) permit the sustained or delayed release of the payload; (4) alter the biodistribution (e.g., target the viral particle to specific tissues or cell types); (5) increase the translation of encoded protein; (6) alter the release profile of encoded protein and/or (7) allow for regulatable expression of the payload.

[0517] In some embodiments, a pharmaceutically acceptable excipient may be at least 95%, at least 96%, at least 97%, at least 98%, at least 99%, or 100% pure. In some embodiments, an excipient is approved for use for humans and for veterinary use. In some embodiments, an excipient may be approved by United States Food and Drug Administration. In some embodiments, an excipient may be of pharmaceutical grade. In some embodiments, an excipient may meet the standards of the United States Pharmacopoeia (USP), the European Pharmacopoeia (EP), the British Pharmacopoeia, and/or the International Pharmacopoeia.

[0518] Excipients, as used herein, include, but are not limited to, any and all solvents, dispersion media, diluents, or other liquid vehicles, dispersion or suspension aids, surface active agents, isotonic agents, thickening or emulsifying agents, preservatives, and the like, as suited to the particular dosage form desired. Various excipients for formulating pharmaceutical compositions and techniques for preparing the composition are known in the art (see Remington: The Science and Practice of Pharmacy, 21st Edition, A. R. Gennaro, Lippincott, Williams & Wilkins, Baltimore, Md., 2006; incorporated herein by reference in its entirety). The use of a conventional excipient medium may be contemplated within the scope of the present disclosure, except insofar as any conventional excipient medium may be incompatible with a substance or its derivatives, such as by producing any undesirable biological effect or otherwise interacting in a deleterious manner with any other component(s) of the pharmaceutical composition.

[0519] Exemplary diluents include, but are not limited to, calcium carbonate, sodium carbonate, calcium phosphate, dicalcium phosphate, calcium sulfate, calcium hydrogen phosphate, sodium phosphate lactose, sucrose, cellulose, microcrystalline cellulose, kaolin, mannitol, sorbitol, inositol, sodium chloride, dry starch, cornstarch, powdered sugar, etc., and/or combinations thereof.

### Inactive Ingredients

[0520] In some embodiments, AAV particle formulations may comprise at least one inactive ingredient. As used herein, the term “inactive ingredient” refers to one or more agents that do not contribute to the activity of the active ingredient of the pharmaceutical composition included in formulations. In some embodiments, all, none or some of the inactive ingredients which may be used in the formulations of the present disclosure may be approved by the US Food and Drug Administration (FDA).

[0521] In some embodiments, the AAV particle pharmaceutical compositions comprise at least one inactive ingredient such as, but not limited to, 1,2,6-Hexanetriol; 1,2-Dimyristoyl-Sn-Glycero-3-(Phospho-S-(1-Glycerol)); 1,2-Dimyristoyl-Sn-Glycero-3-Phosphocholine; 1,2-Dioleoyl-Sn-Glycero-3-Phosphocholine; 1,2-Dipalmitoyl-Sn-Glycero-3-(Phospho-Rac-(1-Glycerol)); 1,2-Distearoyl-Sn-Glycero-3-(Phospho-Rac-(1-Glycerol)); 1,2-Distearoyl-Sn-Glycero-3-Phosphocholine; 1-O-Tolylbiguanide; 2-Ethyl-1,6-Hexanediol; Acetic Acid; Acetic Acid, Glacial; Acetic Anhydride; Acetone; Acetone Sodium Bisulfite; Acetylated Lanolin Alcohols; Acetylated Monoglycerides; Acetylcysteine; Acetyltryptophan, DL−; Acrylates Copolymer; Acrylic Acid-Isooctyl Acrylate Copolymer; Acrylic Adhesive 788; Activated Charcoal; Adcote 72A103; Adhesive Tape; Adipic Acid; Aerotex Resin 3730; Alanine; Albumin Aggregated; Albumin Colloidal; Albumin Human; Alcohol; Alcohol, Dehydrated; Alcohol, Denatured; Alcohol, Diluted; Alfadex; Alginic Acid; Alkyl Ammonium Sulfonic Acid Betaine; Alkyl Aryl Sodium Sulfonate; Allantoin; Allyl .Alpha.-Ionone; Almond Oil; Alpha-Terpineol; Alpha-Tocopherol; Alpha-Tocopherol Acetate, Dl−; Alpha-Tocopherol, Dl−; Aluminum Acetate; Aluminum Chlorhydroxy Allantoinate; Aluminum Hydroxide; Aluminum Hydroxide—Sucrose, Hydrated; Aluminum Hydroxide Gel; Aluminum Hydroxide Gel F 500; Aluminum Hydroxide Gel F 5000; Aluminum Monostearate; Aluminum Oxide; Aluminum Polyester; Aluminum Silicate; Aluminum Starch Octenylsuccinate; Aluminum Stearate; Aluminum Subacetate; Aluminum Sulfate Anhydrous; Amerchol C; Amerchol-Cab; Aminomethylpropanol; Ammonia; Ammonia Solution; Ammonia Solution, Strong; Ammonium Acetate; Ammonium Hydroxide; Ammonium Lauryl Sulfate; Ammonium Nonoxynol-4 Sulfate; Ammonium Salt Of C-12-C-15 Linear Primary Alcohol Ethoxylate; Ammonium Sulfate; Ammonyx; Amphoteric-2; Amphoteric-9; Anethole; Anhydrous Citric Acid; Anhydrous Dextrose; Anhydrous Lactose; Anhydrous Trisodium Citrate; Aniseed Oil; Anoxid Sbn; Antifoam; Antipyrine; Apaflurane; Apricot Kernel Oil Peg-6 Esters; Aquaphor; Arginine; Arlacel; Ascorbic Acid; Ascorbyl Palmitate; Aspartic Acid; Balsam Peru; Barium Sulfate; Beeswax; Beeswax, Synthetic; Beheneth-10; Bentonite; Benzalkonium Chloride; Benzenesulfonic Acid; Benzethonium Chloride; Benzododecinium Bromide; Benzoic Acid; Benzyl Alcohol; Benzyl Benzoate; Benzyl Chloride; Betadex; Bibapcitide; Bismuth Subgallate; Boric Acid; Brocrinat; Butane; Butyl Alcohol; Butyl Ester Of Vinyl Methyl Ether/Maleic Anhydride Copolymer (125000 Mw); Butyl Stearate; Butylated Hydroxyanisole; Butylated Hydroxytoluene; Butylene Glycol; Butylparaben; Butyric Acid; C20-40 Pareth-24; Caffeine; Calcium; Calcium Carbonate; Calcium Chloride; Calcium Gluceptate; Calcium Hydroxide; Calcium Lactate; Calcobutrol; Caldiamide Sodium; Caloxetate Trisodium; Calteridol Calcium; Canada Balsam; Caprylic/Capric Triglyceride; Caprylic/Capric/Stearic Triglyceride; Captan; Captisol; Caramel; Carbomer 1342; Carbomer 1382; Carbomer 934; Carbomer 934p; Carbomer 940; Carbomer 941; Carbomer 980; Carbomer 981; Carbomer Homopolymer Type B (Allyl Pentaerythritol Crosslinked); Carbomer Homopolymer Type C (Allyl Pentaerythritol Crosslinked); Carbon Dioxide; Carboxy Vinyl Copolymer; Carboxymethylcellulose; Carboxymethylcellulose Sodium; Carboxypolymethylene; Carrageenan; Carrageenan Salt; Castor Oil; Cedar Leaf Oil; Cellulose; Cellulose, Microcrystalline; Cerasynt-Se; Ceresin; Ceteareth-12; Ceteareth-15; Ceteareth-30; Cetearyl Alcohol/Ceteareth-20; Cetearyl Ethylhexanoate; Ceteth-10; Ceteth-2; Ceteth-20; Ceteth-23; Cetostearyl Alcohol; Cetrimonium Chloride; Cetyl Alcohol; Cetyl Esters Wax; Cetyl Palmitate; Cetylpyridinium Chloride; Chlorobutanol; Chlorobutanol Hemihydrate; Chlorobutanol, Anhydrous; Chlorocresol; Chloroxylenol; Cholesterol; Choleth; Choleth-24; Citrate; Citric Acid; Citric Acid Monohydrate; Citric Acid, Hydrous; Cocamide Ether Sulfate; Cocamine Oxide; Coco Betaine; Coco Diethanolamide; Coco Monoethanolamide; Cocoa Butter; Coco-Glycerides; Coconut Oil; Coconut Oil, Hydrogenated; Coconut Oil/Palm Kernel Oil Glycerides, Hydrogenated; Cocoyl Caprylocaprate; Cola Nitida Seed Extract; Collagen; Coloring Suspension; Corn Oil; Cottonseed Oil; Cream Base; Creatine; Creatinine; Cresol; Croscarmellose Sodium; Crospovidone; Cupric Sulfate; Cupric Sulfate Anhydrous; Cyclomethicone; Cyclomethicone/Dimethicone Copolyol; Cysteine; Cysteine Hydrochloride; Cysteine Hydrochloride Anhydrous; Cysteine, Dl−; D&C Red No. 28; D&C Red No. 33; D&C Red No. 36; D&C Red No. 39; D&C Yellow No. 10; Dalfampridine; Daubert 1-5 Pestr (Matte) 164z; Decyl Methyl Sulfoxide; Dehydag Wax Sx; Dehydroacetic Acid; Dehymuls E; Denatonium Benzoate; Deoxycholic Acid; Dextran; Dextran 40; Dextrin; Dextrose; Dextrose Monohydrate; Dextrose Solution; Diatrizoic Acid; Diazolidinyl Urea; Dichlorobenzyl Alcohol; Dichlorodifluoromethane; Dichlorotetrafluoroethane; Diethanolamine; Diethyl Pyrocarbonate; Diethyl Sebacate; Diethylene Glycol Monoethyl Ether; Diethylhexyl Phthalate; Dihydroxyaluminum Aminoacetate; Diisopropanolamine; Diisopropyl Adipate; Diisopropyl Dilinoleate; Dimethicone 350; Dimethicone Copolyol; Dimethicone Mdx4-4210; Dimethicone Medical Fluid 360; Dimethyl Isosorbide; Dimethyl Sulfoxide; Dimethylaminoethyl Methacrylate-Butyl Methacrylate-Methyl Methacrylate Copolymer; Dimethyldioctadecylammonium Bentonite; Dimethylsiloxane/Methylvinylsiloxane Copolymer; Dinoseb Ammonium Salt; Dipalmitoylphosphatidylglycerol, Dl−; Dipropylene Glycol; Disodium Cocoamphodiacetate; Disodium Laureth Sulfosuccinate; Disodium Lauryl Sulfosuccinate; Disodium Sulfosalicylate; Disofenin; Divinylbenzene Styrene Copolymer; Dmdm Hydantoin; Docosanol; Docusate Sodium; Duro-Tak 280-2516; Duro-Tak 387-2516; Duro-Tak 80-1196; Duro-Tak 87-2070; Duro-Tak 87-2194; Duro-Tak 87-2287; Duro-Tak 87-2296; Duro-Tak 87-2888; Duro-Tak 87-2979; Edetate Calcium Disodium; Edetate Disodium; Edetate Disodium Anhydrous; Edetate Sodium; Edetic Acid; Egg Phospholipids; Entsufon; Entsufon Sodium; Epilactose; Epitetracycline Hydrochloride; Essence Bouquet 9200; Ethanolamine Hydrochloride; Ethyl Acetate; Ethyl Oleate; Ethylcelluloses; Ethylene Glycol; Ethylene Vinyl Acetate Copolymer; Ethylenediamine; Ethylenediamine Dihydrochloride; Ethylene-Propylene Copolymer; Ethylene-Vinyl Acetate Copolymer (28% Vinyl Acetate); Ethylene-Vinyl Acetate Copolymer (9% Vinylacetate); Ethylhexyl Hydroxystearate; Ethylparaben; Eucalyptol; Exametazime; Fat, Edible; Fat, Hard; Fatty Acid Esters; Fatty Acid Pentaerythriol Ester; Fatty Acids; Fatty Alcohol Citrate; Fatty Alcohols; Fd&C Blue No. 1; Fd&C Green No. 3; Fd&C Red No. 4; Fd&C Red No. 40; Fd&C Yellow No. 10 (Delisted); Fd&C Yellow No. 5; Fd&C Yellow No. 6; Ferric Chloride; Ferric Oxide; Flavor 89-186; Flavor 89-259; Flavor Df-119; Flavor Df-1530; Flavor Enhancer; Flavor Fig 827118; Flavor Raspberry Pfc-8407; Flavor Rhodia Pharmaceutical No. Rf 451; Fluorochlorohydrocarbons; Formaldehyde; Formaldehyde Solution; Fractionated Coconut Oil; Fragrance 3949-5; Fragrance 520a; Fragrance 6.007; Fragrance 91-122; Fragrance 9128-Y; Fragrance 93498g; Fragrance Balsam Pine No. 5124; Fragrance Bouquet 10328; Fragrance Chemoderm 6401-B; Fragrance Chemoderm 6411; Fragrance Cream No. 73457; Fragrance Cs-28197; Fragrance Felton 066m; Fragrance Firmenich 47373; Fragrance Givaudan Ess 9090/1c; Fragrance H-6540; Fragrance Herbal 10396; Fragrance Nj-1085; Fragrance P O Fl-147; Fragrance Pa 52805; Fragrance Pera Derm D; Fragrance Rbd-9819; Fragrance Shaw Mudge U-7776; Fragrance Tf 044078; Fragrance Ungerer Honeysuckle K 2771; Fragrance Ungerer N5195; Fructose; Gadolinium Oxide; Galactose; Gamma Cyclodextrin; Gelatin; Gelatin, Crosslinked; Gelfoam Sponge; Gellan Gum (Low Acyl); Gelva 737; Gentisic Acid; Gentisic Acid Ethanolamide; Gluceptate Sodium; Gluceptate Sodium Dihydrate; Gluconolactone; Glucuronic Acid; Glutamic Acid, Dl−; Glutathione; Glycerin; Glycerol Ester Of Hydrogenated Rosin; Glyceryl Citrate; Glyceryl Isostearate; Glyceryl Laurate; Glyceryl Monostearate; Glyceryl Oleate; Glyceryl Oleate/Propylene Glycol; Glyceryl Palmitate; Glyceryl Ricinoleate; Glyceryl Stearate; Glyceryl Stearate—Laureth-23; Glyceryl Stearate/Peg Stearate; Glyceryl Stearate/Peg-100 Stearate; Glyceryl Stearate/Peg-40 Stearate; Glyceryl Stearate-Stearamidoethyl Diethylamine; Glyceryl Trioleate; Glycine; Glycine Hydrochloride; Glycol Distearate; Glycol Stearate; Guanidine Hydrochloride; Guar Gum; Hair Conditioner (18n195-1m); Heptane; Hetastarch; Hexylene Glycol; High Density Polyethylene; Histidine; Human Albumin Microspheres; Hyaluronate Sodium; Hydrocarbon; Hydrocarbon Gel, Plasticized; Hydrochloric Acid; Hydrochloric Acid, Diluted; Hydrocortisone; Hydrogel Polymer; Hydrogen Peroxide; Hydrogenated Castor Oil; Hydrogenated Palm Oil; Hydrogenated Palm/Palm Kernel Oil Peg-6 Esters; Hydrogenated Polybutene 635-690; Hydroxide Ion; Hydroxyethyl Cellulose; Hydroxyethylpiperazine Ethane Sulfonic Acid; Hydroxymethyl Cellulose; Hydroxyoctacosanyl Hydroxystearate; Hydroxypropyl Cellulose; Hydroxypropyl Methylcellulose 2906; Hydroxypropyl-Beta-cyclodextrin; Hypromellose 2208 (15000 Mpa.S); Hypromellose 2910 (15000 Mpa.S); Hypromelloses; Imidurea; Iodine; Iodoxamic Acid; Iofetamine Hydrochloride; Irish Moss Extract; Isobutane; Isoceteth-20; Isoleucine; Isooctyl Acrylate; Isopropyl Alcohol; Isopropyl Isostearate; Isopropyl Myristate; Isopropyl Myristate—Myristyl Alcohol; Isopropyl Palmitate; Isopropyl Stearate; Isostearic Acid; Isostearyl Alcohol; Isotonic Sodium Chloride Solution; Jelene; Kaolin; Kathon Cg; Kathon Cg II; Lactate; Lactic Acid; Lactic Acid, Dl−; Lactic Acid, L−; Lactobionic Acid; Lactose; Lactose Monohydrate; Lactose, Hydrous; Laneth; Lanolin; Lanolin Alcohol—Mineral Oil; Lanolin Alcohols; Lanolin Anhydrous; Lanolin Cholesterols; Lanolin Nonionic Derivatives; Lanolin, Ethoxylated; Lanolin, Hydrogenated; Lauralkonium Chloride; Lauramine Oxide; Laurdimonium Hydrolyzed Animal Collagen; Laureth Sulfate; Laureth-2; Laureth-23; Laureth-4; Lauric Diethanolamide; Lauric Myristic Diethanolamide; Lauroyl Sarcosine; Lauryl Lactate; Lauryl Sulfate; Lavandula Angustifolia Flowering Top; Lecithin; Lecithin Unbleached; Lecithin, Egg; Lecithin, Hydrogenated; Lecithin, Hydrogenated Soy; Lecithin, Soybean; Lemon Oil; Leucine; Levulinic Acid; Lidofenin; Light Mineral Oil; Light Mineral Oil (85 Ssu); Limonene, (+/−)−; Lipocol Sc-15; Lysine; Lysine Acetate; Lysine Monohydrate; Magnesium Aluminum Silicate; Magnesium Aluminum Silicate Hydrate; Magnesium Chloride; Magnesium Nitrate; Magnesium Stearate; Maleic Acid; Mannitol; Maprofix; Mebrofenin; Medical Adhesive Modified 5-15; Medical Antiform A-F Emulsion; Medronate Disodium; Medronic Acid; Meglumine; Menthol; Metacresol; Metaphosphoric Acid; Methanesulfonic Acid; Methionine; Methyl Alcohol; Methyl Gluceth-10; Methyl Gluceth-20; Methyl Gluceth-20 Sesquistearate; Methyl Glucose Sesquistearate; Methyl Laurate; Methyl Pyrrolidone; Methyl Salicylate; Methyl Stearate; Methylboronic Acid; Methylcellulose (4000 Mpa.S); Methylcelluloses; Methylchloroisothiazolinone; Methylene Blue; Methylisothiazolinone; Methylparaben; Microcrystalline Wax; Mineral Oil; Mono And Diglyceride; Monostearyl Citrate; Monothioglycerol; Multisterol Extract; Myristyl Alcohol; Myristyl Lactate; Myristyl-.Gamma.-Picolinium Chloride; N-(Carbamoyl-Methoxy Peg-40)-1,2-Distearoyl-Cephalin Sodium; N,N-Dimethylacetamide; Niacinamide; Nioxime; Nitric Acid; Nitrogen; Nonoxynol Iodine; Nonoxynol-15; Nonoxynol-9; Norflurane; Oatmeal; Octadecene-1/Maleic Acid Copolymer; Octanoic Acid; Octisalate; Octoxynol-1; Octoxynol-40; Octoxynol-9; Octyldodecanol; Octylphenol Polymethylene; Oleic Acid; Oleth-10/Oleth-5; Oleth-2; Oleth-20; Oleyl Alcohol; Oleyl Oleate; Olive Oil; Oxidronate Disodium; Oxyquinoline; Palm Kernel Oil; Palmitamine Oxide; Parabens; Paraffin; Paraffin, White Soft; Parfum Creme 45/3; Peanut Oil; Peanut Oil, Refined; Pectin; Peg 6-32 Stearate/Glycol Stearate; Peg Vegetable Oil; Peg-100 Stearate; Peg-12 Glyceryl Laurate; Peg-120 Glyceryl Stearate; Peg-120 Methyl Glucose Dioleate; Peg-15 Cocamine; Peg-150 Distearate; Peg-2 Stearate; Peg-20 Sorbitan Isostearate; Peg-22 Methyl Ether/Dodecyl Glycol Copolymer; Peg-25 Propylene Glycol Stearate; Peg-4 Dilaurate; Peg-4 Laurate; Peg-40 Castor Oil; Peg-40 Sorbitan Diisostearate; Peg-45/Dodecyl Glycol Copolymer; Peg-5 Oleate; Peg-50 Stearate; Peg-54 Hydrogenated Castor Oil; Peg-6 Isostearate; Peg-60 Castor Oil; Peg-60 Hydrogenated Castor Oil; Peg-7 Methyl Ether; Peg-75 Lanolin; Peg-8 Laurate; Peg-8 Stearate; Pegoxol 7 Stearate; Pentadecalactone; Pentaerythritol Cocoate; Pentasodium Pentetate; Pentetate Calcium Trisodium; Pentetic Acid; Peppermint Oil; Perflutren; Perfume 25677; Perfume Bouquet; Perfume E-1991; Perfume Gd 5604; Perfume Tana 90/42 Scba; Perfume W-1952-1; Petrolatum; Petrolatum, White; Petroleum Distillates; Phenol; Phenol, Liquefied; Phenonip; Phenoxyethanol; Phenylalanine; Phenylethyl Alcohol; Phenylmercuric Acetate; Phenylmercuric Nitrate; Phosphatidyl Glycerol, Egg; Phospholipid; Phospholipid, Egg; Phospholipon 90g; Phosphoric Acid; Pine Needle Oil (Pinus sylvestris); Piperazine Hexahydrate; Plastibase-50w; Polacrilin; Polidronium Chloride; Poloxamer 124; Poloxamer 181; Poloxamer 182; Poloxamer 188; Poloxamer 237; Poloxamer 407; Poly(Bis(P-Carboxyphenoxy)Propane Anhydride):Sebacic Acid; Poly(Dimethylsiloxane/Methylvinylsiloxane/Methylhydrogensiloxane) Dimethylvinyl Or Dimethylhydroxy Or Trimethyl Endblocked; Poly(Dl-Lactic-Co-Glycolic Acid), (50:50; Poly(Dl-Lactic-Co-Glycolic Acid), Ethyl Ester Terminated, (50:50; Polyacrylic Acid (250000 Mw); Polybutene (1400 Mw); Polycarbophil; Polyester; Polyester Polyamine Copolymer; Polyester Rayon; Polyethylene Glycol 1000; Polyethylene Glycol 1450; Polyethylene Glycol 1500; Polyethylene Glycol 1540; Polyethylene Glycol 200; Polyethylene Glycol 300; Polyethylene Glycol 300-1600; Polyethylene Glycol 3350; Polyethylene Glycol 400; Polyethylene Glycol 4000; Polyethylene Glycol 540; Polyethylene Glycol 600; Polyethylene Glycol 6000; Polyethylene Glycol 8000; Polyethylene Glycol 900; Polyethylene High Density Containing Ferric Oxide Black (<1%); Polyethylene Low Density Containing Barium Sulfate (20-24%); Polyethylene T; Polyethylene Terephthalates; Polyglactin; Polyglyceryl-3 Oleate; Polyglyceryl-4 Oleate; Polyhydroxyethyl Methacrylate; Polyisobutylene; Polyisobutylene (1100000 Mw); Polyisobutylene (35000 Mw); Polyisobutylene 178-236; Polyisobutylene 241-294; Polyisobutylene 35-39; Polyisobutylene Low Molecular Weight; Polyisobutylene Medium Molecular Weight; Polyisobutylene/Polybutene Adhesive; Polylactide; Polyols; Polyoxyethylene—Polyoxypropylene 1800; Polyoxyethylene Alcohols; Polyoxyethylene Fatty Acid Esters; Polyoxyethylene Propylene; Polyoxyl 20 Cetostearyl Ether; Polyoxyl 35 Castor Oil; Polyoxyl 40 Hydrogenated Castor Oil; Polyoxyl 40 Stearate; Polyoxyl 400 Stearate; Polyoxyl 6 And Polyoxyl 32 Palmitostearate; Polyoxyl Distearate; Polyoxyl Glyceryl Stearate; Polyoxyl Lanolin; Polyoxyl Palmitate; Polyoxyl Stearate; Polypropylene; Polypropylene Glycol; Polyquaternium-10; Polyquaternium-7 (70/30 Acrylamide/Dadmac; Polysiloxane; Polysorbate 20; Polysorbate 40; Polysorbate 60; Polysorbate 65; Polysorbate 80; Polyurethane; Polyvinyl Acetate; Polyvinyl Alcohol; Polyvinyl Chloride; Polyvinyl Chloride-Polyvinyl Acetate Copolymer; Polyvinyl pyridine; Poppy Seed Oil; Potash; Potassium Acetate; Potassium Alum; Potassium Bicarbonate; Potassium Bisulfite; Potassium Chloride; Potassium Citrate; Potassium Hydroxide; Potassium Metabisulfite; Potassium Phosphate, Dibasic; Potassium Phosphate, Monobasic; Potassium Soap; Potassium Sorbate; Povidone Acrylate Copolymer; Povidone Hydrogel; Povidone K17; Povidone K25; Povidone K29/32; Povidone K30; Povidone K90; Povidone K90f, Povidone/Eicosene Copolymer; Povidones; Ppg-12/Smdi Copolymer; Ppg-15 Stearyl Ether; Ppg-20 Methyl Glucose Ether Distearate; Ppg-26 Oleate; Product Wat; Proline; Promulgen D; Promulgen G; Propane; Propellant A-46; Propyl Gallate; Propylene Carbonate; Propylene Glycol; Propylene Glycol Diacetate; Propylene Glycol Dicaprylate; Propylene Glycol Monolaurate; Propylene Glycol Monopalmitostearate; Propylene Glycol Palmitostearate; Propylene Glycol Ricinoleate; Propylene Glycol/Diazolidinyl Urea/Methylparaben/Propylparben; Propylparaben; Protamine Sulfate; Protein Hydrolysate; Pvm/Ma Copolymer; Quaternium-15; Quaternium-15 Cis-Form; Quaternium-52; Ra-2397; Ra-3011; Saccharin; Saccharin Sodium; Saccharin Sodium Anhydrous; Safflower Oil; Sd Alcohol 3a; Sd Alcohol 40; Sd Alcohol 40-2; Sd Alcohol 40b; Sepineo P 600; Serine; Sesame Oil; Shea Butter; Silastic Brand Medical Grade Tubing; Silastic Medical Adhesive,Silicone Type A; Silica, Dental; Silicon; Silicon Dioxide; Silicon Dioxide, Colloidal; Silicone; Silicone Adhesive 4102; Silicone Adhesive 4502; Silicone Adhesive Bio-Psa Q7-4201; Silicone Adhesive Bio-Psa Q7-4301; Silicone Emulsion; Silicone/Polyester Film Strip; Simethicone; Simethicone Emulsion; Sipon Ls 20np; Soda Ash; Sodium Acetate; Sodium Acetate Anhydrous; Sodium Alkyl Sulfate; Sodium Ascorbate; Sodium Benzoate; Sodium Bicarbonate; Sodium Bisulfate; Sodium Bisulfite; Sodium Borate; Sodium Borate Decahydrate; Sodium Carbonate; Sodium Carbonate Decahydrate; Sodium Carbonate Monohydrate; Sodium Cetostearyl Sulfate; Sodium Chlorate; Sodium Chloride; Sodium Chloride Injection; Sodium Chloride Injection, Bacteriostatic; Sodium Cholesteryl Sulfate; Sodium Citrate; Sodium Cocoyl Sarcosinate; Sodium Desoxycholate; Sodium Dithionite; Sodium Dodecylbenzenesulfonate; Sodium Formaldehyde Sulfoxylate; Sodium Gluconate; Sodium Hydroxide; Sodium Hypochlorite; Sodium Iodide; Sodium Lactate; Sodium Lactate, L−; Sodium Laureth-2 Sulfate; Sodium Laureth-3 Sulfate; Sodium Laureth-5 Sulfate; Sodium Lauroyl Sarcosinate; Sodium Lauryl Sulfate; Sodium Lauryl Sulfoacetate; Sodium Metabisulfite; Sodium Nitrate; Sodium Phosphate; Sodium Phosphate Dihydrate; Sodium Phosphate, Dibasic; Sodium Phosphate, Dibasic, Anhydrous; Sodium Phosphate, Dibasic, Dihydrate; Sodium Phosphate, Dibasic, Dodecahydrate; Sodium Phosphate, Dibasic, Heptahydrate; Sodium Phosphate, Monobasic; Sodium Phosphate, Monobasic, Anhydrous; Sodium Phosphate, Monobasic, Dihydrate; Sodium Phosphate, Monobasic, Monohydrate; Sodium Polyacrylate (2500000 Mw); Sodium Pyrophosphate; Sodium Pyrrolidone Carboxylate; Sodium Starch Glycolate; Sodium Succinate Hexahydrate; Sodium Sulfate; Sodium Sulfate Anhydrous; Sodium Sulfate Decahydrate; Sodium Sulfite; Sodium Sulfosuccinated Undecyclenic Monoalkylolamide; Sodium Tartrate; Sodium Thioglycolate; Sodium Thiomalate; Sodium Thiosulfate; Sodium Thiosulfate Anhydrous; Sodium Trimetaphosphate; Sodium Xylenesulfonate; Somay 44; Sorbic Acid; Sorbitan; Sorbitan Isostearate; Sorbitan Monolaurate; Sorbitan Monooleate; Sorbitan Monopalmitate; Sorbitan Monostearate; Sorbitan Sesquioleate; Sorbitan Trioleate; Sorbitan Tristearate; Sorbitol; Sorbitol Solution; Soybean Flour; Soybean Oil; Spearmint Oil; Spermaceti; Squalane; Stabilized Oxychloro Complex; Stannous 2-Ethylhexanoate; Stannous Chloride; Stannous Chloride Anhydrous; Stannous Fluoride; Stannous Tartrate; Starch; Starch 1500, Pregelatinized; Starch, Corn; Stearalkonium Chloride; Stearalkonium Hectorite/Propylene Carbonate; Stearamidoethyl Diethylamine; Steareth-10; Steareth-100; Steareth-2; Steareth-20; Steareth-21; Steareth-40; Stearic Acid; Stearic Diethanolamide; Stearoxytrimethylsilane; Steartrimonium Hydrolyzed Animal Collagen; Stearyl Alcohol; Sterile Water For Inhalation; Styrene/Isoprene/Styrene Block Copolymer; Succimer; Succinic Acid; Sucralose; Sucrose; Sucrose Distearate; Sucrose Polyesters; Sulfacetamide Sodium; Sulfobutylether .Beta.-Cyclodextrin; Sulfur Dioxide; Sulfuric Acid; Sulfurous Acid; Surfactol Qs; Tagatose, D−; Talc; Tall Oil; Tallow Glycerides; Tartaric Acid; Tartaric Acid, Dl−; Tenox; Tenox-2; Tert-Butyl Alcohol; Tert-Butyl Hydroperoxide; Tert-Butylhydroquinone; Tetrakis(2-Methoxyisobutylisocyanide)Copper(I) Tetrafluoroborate; Tetrapropyl Orthosilicate; Tetrofosmin; Theophylline; Thimerosal; Threonine; Thymol; Tin; Titanium Dioxide; Tocopherol; Tocophersolan; Total parenteral nutrition, lipid emulsion; Triacetin; Tricaprylin; Trichloromonofluoromethane; Trideceth-10; Triethanolamine Lauryl Sulfate; Trifluoroacetic Acid; Triglycerides, Medium Chain; Trihydroxystearin; Trilaneth-4 Phosphate; Trilaureth-4 Phosphate; Trisodium Citrate Dihydrate; Trisodium Hedta; Triton 720; Triton X-200; Trolamine; Tromantadine; Tromethamine (TRIS); Tryptophan; Tyloxapol; Tyrosine; Undecylenic Acid; Union 76 Amsco-Res 6038; Urea; Valine; Vegetable Oil; Vegetable Oil Glyceride, Hydrogenated; Vegetable Oil, Hydrogenated; Versetamide; Viscarin; Viscose/Cotton; Vitamin E; Wax, Emulsifying; Wecobee Fs; White Ceresin Wax; White Wax; Xanthan Gum; Zinc; Zinc Acetate; Zinc Carbonate; Zinc Chloride; and Zinc Oxide.

[0522] Pharmaceutical composition formulations of AAV particles disclosed herein may include cations or anions. In some embodiments, the formulations include metal cations such as, but not limited to, Zn2+, Ca2+, Cu2+, Mn2+, Mg+ and combinations thereof. As a non-limiting example, formulations may include polymers and complexes with a metal cation (See e.g., U.S. Pat. Nos. 6,265,389 and 6,555,525, the contents of each of which are herein incorporated by reference in their entirety).

[0523] Formulations of the disclosure may also include one or more pharmaceutically acceptable salts. As used herein, “pharmaceutically acceptable salts” refers to derivatives of the disclosed compounds wherein the parent compound is modified by converting an existing acid or base moiety to its salt form (e.g., by reacting the free base group with a suitable organic acid). Examples of pharmaceutically acceptable salts include, but are not limited to, mineral or organic acid salts of basic residues such as amines; alkali or organic salts of acidic residues such as carboxylic acids; and the like. Representative acid addition salts include acetate, acetic acid, adipate, alginate, ascorbate, aspartate, benzenesulfonate, benzene sulfonic acid, benzoate, bisulfate, borate, butyrate, camphorate, camphorsulfonate, citrate, cyclopentanepropionate, digluconate, dodecylsulfate, ethanesulfonate, fumarate, glucoheptonate, glycerophosphate, hemisulfate, heptonate, hexanoate, hydrobromide, hydrochloride, hydroiodide, 2-hydroxy-ethanesulfonate, lactobionate, lactate, laurate, lauryl sulfate, malate, maleate, malonate, methanesulfonate, 2-naphthalenesulfonate, nicotinate, nitrate, oleate, oxalate, palmitate, pamoate, pectinate, persulfate, 3-phenylpropionate, phosphate, picrate, pivalate, propionate, stearate, succinate, sulfate, tartrate, thiocyanate, toluenesulfonate, undecanoate, valerate salts, and the like. Representative alkali or alkaline earth metal salts include sodium, lithium, potassium, calcium, magnesium, and the like, as well as nontoxic ammonium, quaternary ammonium, and amine cations, including, but not limited to ammonium, tetramethylammonium, tetraethylammonium, methylamine, dimethylamine, trimethylamine, triethylamine, ethylamine, and the like. The pharmaceutically acceptable salts of the present disclosure include the conventional non-toxic salts of the parent compound formed, for example, from non-toxic inorganic or organic acids.

[0524] The pharmaceutically acceptable salts of the present disclosure can be synthesized from the parent compound which contains a basic or acidic moiety by conventional chemical methods. Generally, such salts can be prepared by reacting the free acid or base forms of these compounds with a stoichiometric amount of the appropriate base or acid in water or in an organic solvent, or in a mixture of the two; generally, nonaqueous media like ether, ethyl acetate, ethanol, isopropanol, or acetonitrile are preferred. Lists of suitable salts are found in Remington's Pharmaceutical Sciences, 17th ed., Mack Publishing Company, Easton, Pa., 1985, p. 1418, Pharmaceutical Salts: Properties, Selection, and Use, P. H. Stahl and C. G. Wermuth (eds.), Wiley-VCH, 2008, and Berge et al., Journal of Pharmaceutical Science, 66, 1-19 (1977); the contents of each of which are incorporated herein by reference in their entirety.

[0525] The term “pharmaceutically acceptable solvate,” as used herein, means a compound wherein molecules of a suitable solvent are incorporated in the crystal lattice. A suitable solvent is physiologically tolerable at the dosage administered. Solvates may be prepared by crystallization, recrystallization, or precipitation from a solution that includes organic solvents, water, or a mixture thereof. Examples of suitable solvents are ethanol, water (for example, mono-, di-, and tri-hydrates), N-methylpyrrolidinone (NMP), dimethyl sulfoxide (DMSO), N,N′-dimethylformamide (DMF), N,N′-dimethylacetamide (DMAC), 1,3-dimethyl-2-imidazolidinone (DMEU), 1,3-dimethyl-3,4,5,6-tetrahydro-2-(1H)-pyrimidinone (DMPU), acetonitrile (ACN), propylene glycol, ethyl acetate, benzyl alcohol, 2-pyrrolidone, benzyl benzoate, and the like. When water is the solvent, the solvate is referred to as a “hydrate.”

### III. Administration and Dosing

### Administration

[0526] In some embodiments, the AAV particle may be administered to a subject (e.g., to the CNS or PNS of a subject) in a therapeutically effective amount to reduce the symptoms of neurological disease of a subject (e.g., determined using a known evaluation method).

[0527] The AAV particles of the present disclosure may be administered by any delivery route which results in a therapeutically effective outcome. These include, but are not limited to, enteral (into the intestine), gastroenteral, epidural (into the dura mater), oral (by way of the mouth), transdermal, intracerebral (into the cerebrum), intracerebroventricular (into the cerebral ventricles), sub-pial (between pia and CNS parenchyma), intracarotid arterial (into the intracarotid artery), epicutaneous (application onto the skin), intradermal, (into the skin itself), subcutaneous (under the skin), nasal administration (through the nose), intravenous (into a vein), intravenous bolus, intravenous drip, intra-arterial (into an artery), systemic, intramuscular (into a muscle), intracardiac (into the heart), intraosseous infusion (into the bone marrow), intrathecal (into the spinal canal), intraparenchymal (into brain tissue), intraperitoneal, (infusion or injection into the peritoneum), intravesical infusion, intravitreal, (through the eye), intracavernous injection (into a pathologic cavity) intracavitary (into the base of the penis), intravaginal administration, intrauterine, extra-amniotic administration, transdermal (diffusion through the intact skin for systemic distribution), transmucosal (diffusion through a mucous membrane), transvaginal, insufflation (snorting), sublingual, sublabial, enema, eye drops (onto the conjunctiva), or in ear drops, auricular (in or by way of the ear), buccal (directed toward the cheek), conjunctival, cutaneous, dental (to a tooth or teeth), electro-osmosis, endocervical, endosinusial, endotracheal, extracorporeal, hemodialysis, infiltration, interstitial, intra-abdominal, intra-amniotic, intra-articular, intrabiliary, intrabronchial, intrabursal, intracartilaginous (within a cartilage), intracaudal (within the cauda equine), intracisternal (within the cisterna magna cerebellomedularis), intracorneal (within the cornea), dental intracoronal, intracoronary (within the coronary arteries), intracorporus cavernosum (within the dilatable spaces of the corporus cavernosa of the penis), intradiscal (within a disc), intraductal (within a duct of a gland), intraduodenal (within the duodenum), intradural (within or beneath the dura), intraepidermal (to the epidermis), intraesophageal (to the esophagus), intragastric (within the stomach), intragingival (within the gingivae), intraileal (within the distal portion of the small intestine), intralesional (within or introduced directly to a localized lesion), intraluminal (within a lumen of a tube), intralymphatic (within the lymph), intramedullary (within the marrow cavity of a bone), intrameningeal (within the meninges), intramyocardial (within the myocardium), intraocular (within the eye), intraovarian (within the ovary), intrapericardial (within the pericardium), intrapleural (within the pleura), intraprostatic (within the prostate gland), intrapulmonary (within the lungs or its bronchi), intrasinal (within the nasal or periorbital sinuses), intraspinal (within the vertebral column), intrasynovial (within the synovial cavity of a joint), intratendinous (within a tendon), intratesticular (within the testicle), intrathecal (within the cerebrospinal fluid at any level of the cerebrospinal axis), intrathoracic (within the thorax), intratubular (within the tubules of an organ), intratumor (within a tumor), intratympanic (within the aurus media), intravascular (within a vessel or vessels), intraventricular (within a ventricle), iontophoresis (by means of electric current where ions of soluble salts migrate into the tissues of the body), irrigation (to bathe or flush open wounds or body cavities), laryngeal (directly upon the larynx), nasogastric (through the nose and into the stomach), occlusive dressing technique (topical route administration which is then covered by a dressing which occludes the area), ophthalmic (to the external eye), oropharyngeal (directly to the mouth and pharynx), parenteral, percutaneous, periarticular, peridural, perineural, periodontal, rectal, respiratory (within the respiratory tract by inhaling orally or nasally for local or systemic effect), retrobulbar (behind the pons or behind the eyeball), soft tissue, subarachnoid, subconjunctival, submucosal, topical, transplacental (through or across the placenta), transtracheal (through the wall of the trachea), transtympanic (across or through the tympanic cavity), ureteral (to the ureter), urethral (to the urethra), vaginal, caudal block, diagnostic, nerve block, biliary perfusion, cardiac perfusion, photopheresis and spinal.

[0528] In some embodiments, the AAV particles and compositions comprising the AAV particles may be administered in a way which allows them to cross the blood-brain barrier, vascular barrier, or other epithelial barrier. In some embodiments, the AAV particles and compositions comprising AAV particles may be administered in a way that leverages the vascular connectivity of the central nervous system, such as, but not limited to, by intravenous administration. While not wishing to be bound by theory, cells of the brain are typically within 20 μm of the nearest capillary, making capillaries a good conduit for AAV particles described herein.

[0529] The AAV particles described herein may be administered in any suitable form, either as a liquid solution or suspension, as a solid form suitable for liquid solution or suspension in a liquid solution. The AAV particles may be formulated with any appropriate and pharmaceutically acceptable excipient.

[0530] In some embodiments, the AAV particles described herein may be delivered to a subject via a single route administration.

[0531] In some embodiments, the AAV particles described herein may be delivered to a subject via a multi-site route of administration. AAV particles may be administered at 2, 3, 4, 5 or more than 5 sites.

[0532] In some embodiments, a subject may be administered the AAV particles described herein using a bolus infusion.

[0533] In some embodiments, a subject may be administered the AAV particles described herein using sustained delivery over a period of minutes, hours or days. The infusion rate may be changed depending on the subject, distribution, formulation or another delivery parameter.

[0534] In some embodiments, the AAV particles described herein may be delivered by intramuscular delivery route. (See, e.g., U.S. Pat. No. 6,506,379; the contents of which are incorporated herein by reference in their entirety). Non-limiting examples of intramuscular administration include an intravenous injection or a subcutaneous injection.

[0535] In some embodiments, the AAV particles described herein may be delivered by intraocular delivery route. A non-limiting example of intraocular administration includes an intravitreal injection.

[0536] In some embodiments, the AAV particles that may be administered to a subject by peripheral injections. Non-limiting examples of peripheral injections include intraperitoneal, intramuscular, intravenous, conjunctival or joint injection. It was disclosed in the art that the peripheral administration of AAV particles can be transported to the central nervous system, for example, to the motor neurons (e.g., U. S. Patent Application Publication Nos. 20100240739; and 20100130594; the contents of each of which are incorporated herein by reference in their entirety).

[0537] In some embodiments, the AAV particles may be delivered by injection into the CSF (Cerebrospinal fluid) pathway. Non-limiting examples of delivery to the CSF pathway include intrathecal and intracerebroventricular administration.

[0538] In some embodiments, the AAV particles may be delivered by systemic delivery. As a non-limiting example, the systemic delivery may be by intravascular administration.

[0539] In some embodiments, the AAV particles described herein may be administered to a subject by intracranial delivery (See, e.g., U.S. Pat. No. 8,119,611; the contents of which are incorporated herein by reference in their entirety).

[0540] In some embodiments, the AAV particles described herein may be administered by injection. As a non-limiting example, the AAV particles may be administered to a subject by injection.

[0541] In some embodiments, the AAV particles described herein may be administered by muscular injection. As a non-limiting example, the AAV particles may be administered to a subject by muscular administration.

[0542] In some embodiments, the AAV particles described herein may be administered by intramuscular administration. As a non-limiting example, the AAV particles may be administered to a subject by intramuscular administration.

[0543] In some embodiments, the AAV particles described herein are administered to a subject and transduce muscle of a subject. As a non-limiting example, the AAV particles are administered by intramuscular administration.

[0544] In some embodiments, the AAV particles described herein may be administered via intraparenchymal injection. As a non-limiting example, the AAV particles may be administered to a subject by intraparenchymal administration.

[0545] In some embodiments, the AAV particles described herein may be administered by intravenous administration. As a non-limiting example, the AAV particles may be administered to a subject by intravenous administration.

[0546] In some embodiments, the AAV particles described herein may be administered via intravenous delivery.

[0547] In some embodiments, the AAV particles described herein may be administrated via intracarotid arterial delivery.

[0548] In some embodiments, the AAV particles described herein may be administered via a single dose intravenous delivery. As a non-limiting example, the single dose intravenous delivery may be a one-time treatment. In the context of neurological disease, the single dose intravenous delivery can produce durable relief for subjects with a neurological disease and/or related symptoms. The relief may last for minutes such as, but not limited to, 1, 2, 3, 4, 5, 6, 7, 8, 9, 10, 11, 12, 13, 14, 15, 16, 17, 18, 19, 20, 21, 22, 23, 24, 25, 26, 27, 28, 29, 30, 31, 32, 33, 34, 35, 36, 37, 38, 39, 40, 41, 42, 43, 44, 45, 46, 47, 48, 49, 50, 51, 52, 53, 54, 55, 56, 57, 58, 59 minutes or more than 59 minutes; hours such as, but not limited to, 1, 2, 1, 2, 3, 4, 5, 6, 7, 8, 9, 10, 11, 12, 13, 14, 15, 16, 17, 18, 19, 20, 21, 22, 23, 24, 25, 26, 27, 28, 29, 30, 31, 32, 33, 34, 35, 36, 37, 38, 39, 40, 41, 42, 43, 44, 45, 46, 47, 48, or more than 48 hours; days such as, but not limited to, 1, 2, 3, 4, 5, 6, 7, 8, 9, 10, 11, 12, 13, 14, 15, 16, 17, 18, 19, 20, 21, 22, 23, 24, 25, 26, 27, 28, 29, 30, 31, or more than 31 days; weeks such as, but not limited to, 1, 2, 3, 4, 5, 6, 7, 8, 9, 10, 11, 12, 13, 14, 15, 16, or more than 16 weeks; months such as, but not limited to, 1, 2, 3, 4, 5, 6, 7, 8, 9, 10, 11, 12, 13, 14, 15, 16, 17, 18, 19, 20, 21, 22, 23, 24, or more than 24 months; years such as, but not limited to, 1, 2, 3, 4, 5, 6, 7, 8, 9, 10, 11, 12, 13, 14, 15, or more than 15 years.

[0549] In some embodiments, the AAV particles described herein may be administered via intravenous delivery to the DRG nociceptive neurons.

[0550] In some embodiments, the AAV particles described herein may be administered via a single dose intravenous delivery to the DRG nociceptive neurons. As a non-limiting example, the single dose intravenous delivery may be a one-time treatment. In the context of neurological disease, the single dose intravenous delivery can produce durable relief for subjects with a neurological disease and/or related symptoms. The relief may last for minutes such as, but not limited to, 1, 2, 3, 4, 5, 6, 7, 8, 9, 10, 11, 12, 13, 14, 15, 16, 17, 18, 19, 20, 21, 22, 23, 24, 25, 26, 27, 28, 29, 30, 31, 32, 33, 34, 35, 36, 37, 38, 39, 40, 41, 42, 43, 44, 45, 46, 47, 48, 49, 50, 51, 52, 53, 54, 55, 56, 57, 58, 59 minutes or more than 59 minutes; hours such as, but not limited to, 1, 2, 1, 2, 3, 4, 5, 6, 7, 8, 9, 10, 11, 12, 13, 14, 15, 16, 17, 18, 19, 20, 21, 22, 23, 24, 25, 26, 27, 28, 29, 30, 31, 32, 33, 34, 35, 36, 37, 38, 39, 40, 41, 42, 43, 44, 45, 46, 47, 48, or more than 48 hours; days such as, but not limited to, 1, 2, 3, 4, 5, 6, 7, 8, 9, 10, 11, 12, 13, 14, 15, 16, 17, 18, 19, 20, 21, 22, 23, 24, 25, 26, 27, 28, 29, 30, 31, or more than 31 days; weeks such as, but not limited to, 1, 2, 3, 4, 5, 6, 7, 8, 9, 10, 11, 12, 13, 14, 15, 16, or more than 16 weeks; months such as, but not limited to, 1, 2, 3, 4, 5, 6, 7, 8, 9, 10, 11, 12, 13, 14, 15, 16, 17, 18, 19, 20, 21, 22, 23, 24, or more than 24 months; years such as, but not limited to, 1, 2, 3, 4, 5, 6, 7, 8, 9, 10, 11, 12, 13, 14, 15, or more than 15 years.

[0551] In some embodiments, the AAV particles described herein may be administered by intrathecal injection.

[0552] In some embodiments, the AAV particles may be administered to the cisterna magna in a therapeutically effective amount to transduce spinal cord motor neurons and/or astrocytes. As a non-limiting example, the AAV particle may be administered intrathecally.

[0553] In some embodiments, the AAV particles may be administered using intrathecal infusion in a therapeutically effective amount to transduce spinal cord motor neurons and/or astrocytes.

[0554] In some embodiments, the AAV particles of the present disclosure may be administered via a single dose intrathecal injection. As a non-limiting example, the single dose intrathecal injection may be a one-time treatment. In the context of neurological disease, the single dose intrathecal injection can produce durable relief for subjects with a neurological disease and/or related symptoms. The relief may last for minutes such as, but not limited to, 1, 2, 3, 4, 5, 6, 7, 8, 9, 10, 11, 12, 13, 14, 15, 16, 17, 18, 19, 20, 21, 22, 23, 24, 25, 26, 27, 28, 29, 30, 31, 32, 33, 34, 35, 36, 37, 38, 39, 40, 41, 42, 43, 44, 45, 46, 47, 48, 49, 50, 51, 52, 53, 54, 55, 56, 57, 58, 59 minutes or more than 59 minutes; hours such as, but not limited to, 1, 2, 1, 2, 3, 4, 5, 6, 7, 8, 9, 10, 11, 12, 13, 14, 15, 16, 17, 18, 19, 20, 21, 22, 23, 24, 25, 26, 27, 28, 29, 30, 31, 32, 33, 34, 35, 36, 37, 38, 39, 40, 41, 42, 43, 44, 45, 46, 47, 48, or more than 48 hours; days such as, but not limited to, 1, 2, 3, 4, 5, 6, 7, 8, 9, 10, 11, 12, 13, 14, 15, 16, 17, 18, 19, 20, 21, 22, 23, 24, 25, 26, 27, 28, 29, 30, 31, or more than 31 days; weeks such as, but not limited to, 1, 2, 3, 4, 5, 6, 7, 8, 9, 10, 11, 12, 13, 14, 15, 16, or more than 16 weeks; months such as, but not limited to, 1, 2, 3, 4, 5, 6, 7, 8, 9, 10, 11, 12, 13, 14, 15, 16, 17, 18, 19, 20, 21, 22, 23, 24, or more than 24 months; years such as, but not limited to, 1, 2, 3, 4, 5, 6, 7, 8, 9, 10, 11, 12, 13, 14, 15, or more than 15 years.

[0555] In some embodiments, the AAV particles described herein may be administered via intrathecal injection to the DRG nociceptive neurons.

[0556] In some embodiments, the AAV particles described herein may be administered via a single dose intrathecal injection to the DRG nociceptive neurons. As a non-limiting example, the single dose intrathecal injection may be a one-time treatment. In the context of neurological disease, the single dose intrathecal injection can produce durable relief for subjects with a neurological disease and/or related symptoms. The relief may last for minutes such as, but not limited to, 1, 2, 3, 4, 5, 6, 7, 8, 9, 10, 11, 12, 13, 14, 15, 16, 17, 18, 19, 20, 21, 22, 23, 24, 25, 26, 27, 28, 29, 30, 31, 32, 33, 34, 35, 36, 37, 38, 39, 40, 41, 42, 43, 44, 45, 46, 47, 48, 49, 50, 51, 52, 53, 54, 55, 56, 57, 58, 59 minutes or more than 59 minutes; hours such as, but not limited to, 1, 2, 1, 2, 3, 4, 5, 6, 7, 8, 9, 10, 11, 12, 13, 14, 15, 16, 17, 18, 19, 20, 21, 22, 23, 24, 25, 26, 27, 28, 29, 30, 31, 32, 33, 34, 35, 36, 37, 38, 39, 40, 41, 42, 43, 44, 45, 46, 47, 48, or more than 48 hours; days such as, but not limited to, 1, 2, 3, 4, 5, 6, 7, 8, 9, 10, 11, 12, 13, 14, 15, 16, 17, 18, 19, 20, 21, 22, 23, 24, 25, 26, 27, 28, 29, 30, 31, or more than 31 days; weeks such as, but not limited to, 1, 2, 3, 4, 5, 6, 7, 8, 9, 10, 11, 12, 13, 14, 15, 16, or more than 16 weeks; months such as, but not limited to, 1, 2, 3, 4, 5, 6, 7, 8, 9, 10, 11, 12, 13, 14, 15, 16, 17, 18, 19, 20, 21, 22, 23, 24, or more than 24 months; years such as, but not limited to, 1, 2, 3, 4, 5, 6, 7, 8, 9, 10, 11, 12, 13, 14, 15, or more than 15 years.

[0557] In some embodiments, the AAV particle described herein is administered via intrathecal (IT) infusion at C1. The infusion may be for 1, 2, 3, 4, 6, 7, 8, 9, 10, 11, 12, 13, 14, 15 or more than 15 hours.

[0558] In some embodiments, the AAV particles described herein may be administered by intraparenchymal injection. As a non-limiting example, the AAV particles may be administered to a subject by intraparenchymal injection.

[0559] In some embodiments, the AAV particles described herein may be administered by intraparenchymal injection and intrathecal injection. As a non-limiting example, the AAV particles may be administered via intraparenchymal injection and intrathecal injection.

[0560] In some embodiments, the AAV particles described herein may be administered by subcutaneous injection. As a non-limiting example, the AAV particles may be administered to a subject by subcutaneous injection.

[0561] In some embodiments, the AAV particles described herein may be administered topically. As a non-limiting example, the AAV particles may be administered to a subject topically.

[0562] In some embodiments, the AAV particles may be delivered by direct injection into the brain. As a non-limiting example, the brain delivery may be by intrastriatal administration.

[0563] In some embodiments, the AAV particles described herein may be administered via intrastriatal injection.

[0564] In some embodiments, the AAV particles described herein may be administered via intrastriatal injection and another route of administration described herein.

[0565] In some embodiments, the AAV particles may be delivered by more than one route of administration. As non-limiting examples of combination administrations, AAV particles may be delivered by intrathecal and intracerebroventricular, or by intravenous and intraparenchymal administration.

[0566] In some embodiments, the AAV particle may be administered to the CNS in a therapeutically effective amount to improve function and/or survival for a subject with a neurological disease. As a non-limiting example, the vector may be administered intravenously.

[0567] The AAV particle may be administered in a “therapeutically effective” amount, i.e., an amount that is sufficient to alleviate and/or prevent at least one symptom associated with the disease, or provide improvement in the condition of the subject.

[0568] In some embodiments, the catheter may be located at more than one site in the spine for multi-site delivery. The AAV particle may be delivered in a continuous and/or bolus infusion. Each site of delivery may be a different dosing regimen or the same dosing regimen may be used for each site of delivery. As a non-limiting example, the sites of delivery may be in the cervical and the lumbar region. As another non-limiting example, the sites of delivery may be in the cervical region. As another non-limiting example, the sites of delivery may be in the lumbar region.

[0569] In some embodiments, a subject may be analyzed for spinal anatomy and pathology prior to delivery of the AAV particle described herein. As a non-limiting example, a subject with scoliosis may have a different dosing regimen and/or catheter location compared to a subject without scoliosis.

[0570] In some embodiments, the orientation of the spine of the subject during delivery of the AAV particle may be vertical to the ground.

[0571] In another embodiment, the orientation of the spine of the subject during delivery of the AAV particle may be horizontal to the ground.

[0572] In some embodiments, the spine of the subject may be at an angle as compared to the ground during the delivery of the AAV particle. The angle of the spine of the subject as compared to the ground may be at least 10, 20, 30, 40, 50, 60, 70, 80, 90, 100, 110, 120, 130, 140, 150 or 180 degrees.

[0573] In some embodiments, the delivery method and duration is chosen to provide broad transduction in the spinal cord. As a non-limiting example, intrathecal delivery is used to provide broad transduction along the rostral-caudal length of the spinal cord. As another non-limiting example, multi-site infusions provide a more uniform transduction along the rostral-caudal length of the spinal cord. As yet another non-limiting example, prolonged infusions provide a more uniform transduction along the rostral-caudal length of the spinal cord.

### Parenteral and Injectable Administration

[0574] In some embodiments, pharmaceutical compositions, AAV particles of the present disclosure may be administered parenterally. Liquid dosage forms for oral and parenteral administration include, but are not limited to, pharmaceutically acceptable emulsions, microemulsions, solutions, suspensions, syrups, and/or elixirs. In addition to active ingredients, liquid dosage forms may comprise inert diluents commonly used in the art such as, for example, water or other solvents, solubilizing agents and emulsifiers such as ethyl alcohol, isopropyl alcohol, ethyl carbonate, ethyl acetate, benzyl alcohol, benzyl benzoate, propylene glycol, 1,3-butylene glycol, dimethylformamide, oils (in particular, cottonseed, groundnut, corn, germ, olive, castor, and sesame oils), glycerol, tetrahydrofurfuryl alcohol, polyethylene glycols and fatty acid esters of sorbitan, and mixtures thereof. Besides inert diluents, oral compositions can include adjuvants such as wetting agents, emulsifying and suspending agents, sweetening, flavoring, and/or perfuming agents. In certain embodiments for parenteral administration, compositions are mixed with solubilizing agents such as CREMOPHOR©, alcohols, oils, modified oils, glycols, polysorbates, cyclodextrins, polymers, and/or combinations thereof. In other embodiments, surfactants are included such as hydroxypropylcellulose.

[0575] Injectable preparations, for example, sterile injectable aqueous or oleaginous suspensions may be formulated according to the known art using suitable dispersing agents, wetting agents, and/or suspending agents. Sterile injectable preparations may be sterile injectable solutions, suspensions, and/or emulsions in nontoxic parenterally acceptable diluents and/or solvents, for example, as a solution in 1,3-butanediol. Among the acceptable vehicles and solvents that may be employed are water, Ringer's solution, U.S.P., and isotonic sodium chloride solution. Sterile, fixed oils are conventionally employed as a solvent or suspending medium. For this purpose, any bland fixed oil can be employed including synthetic mono- or diglycerides. Fatty acids such as oleic acid can be used in the preparation of injectables.

[0576] Injectable formulations may be sterilized, for example, by filtration through a bacterial-retaining filter, and/or by incorporating sterilizing agents in the form of sterile solid compositions which can be dissolved or dispersed in sterile water or other sterile injectable medium prior to use.

[0577] In order to prolong the effect of active ingredients, it is often desirable to slow the absorption of active ingredients from subcutaneous or intramuscular injections. This may be accomplished by the use of liquid suspensions of crystalline or amorphous material with poor water solubility. The rate of absorption of active ingredients depends upon the rate of dissolution which, in turn, may depend upon crystal size and crystalline form. Alternatively, delayed absorption of a parenterally administered drug form is accomplished by dissolving or suspending the drug in an oil vehicle. Injectable depot forms are made by forming microcapsule matrices of the drug in biodegradable polymers such as polylactide-polyglycolide. Depending upon the ratio of drug to polymer and the nature of the particular polymer employed, the rate of drug release can be controlled. Examples of other biodegradable polymers include poly(orthoesters) and poly(anhydrides). Depot injectable formulations are prepared by entrapping the drug in liposomes or microemulsions which are compatible with body tissues.

### Depot Administration

[0578] As described herein, in some embodiments, pharmaceutical compositions, AAV particles of the present disclosure are formulated in depots for extended release. Generally, specific organs or tissues (“target tissues”) are targeted for administration.

[0579] In some aspects, pharmaceutical compositions, AAV particles of the present disclosure are spatially retained within or proximal to target tissues. Provided are methods of providing pharmaceutical compositions, AAV particles, to target tissues of mammalian subjects by contacting target tissues (which comprise one or more target cells) with pharmaceutical compositions, AAV particles, under conditions such that they are substantially retained in target tissues, meaning that at least 10, 20, 30, 40, 50, 60, 70, 80, 85, 90, 95, 96, 97, 98, 99, 99.9, 99.99 or greater than 99.99% of the composition is retained in the target tissues. Advantageously, retention is determined by measuring the amount of pharmaceutical compositions, AAV particles that enter one or more target cells. For example, at least 1%, 5%, 10%, 20%, 30%, 40%, 50%, 60%, 70%, 80%, 85%, 90%, 95%, 96%, 97%, 98%, 99%, 99.9%, 99.99% or greater than 99.99% of pharmaceutical compositions, AAV particles, administered to subjects are present intracellularly at a period of time following administration. For example, intramuscular injection to mammalian subjects may be performed using aqueous compositions comprising pharmaceutical compositions, AAV particles described herein and one or more transfection reagents, and retention is determined by measuring the amount of pharmaceutical compositions, AAV particles, present in target cells.

[0580] Certain aspects of the disclosure are directed to methods of providing pharmaceutical compositions, AAV particles described herein to target tissues of mammalian subjects, by contacting target tissues (comprising one or more target cells) with pharmaceutical compositions, AAV particles under conditions such that they are substantially retained in such target tissues. Pharmaceutical compositions, AAV particles comprise enough active ingredient such that the effect of interest is produced in at least one target cell. In some embodiments, pharmaceutical compositions, AAV particles generally comprise one or more cell penetration agents, although “naked” formulations (such as without cell penetration agents or other agents) are also contemplated, with or without pharmaceutically acceptable carriers.

### Pulmonary Administration

[0581] In some embodiments, pharmaceutical compositions or AAV particles of the present disclosure may be prepared, packaged, and/or sold in formulations suitable for pulmonary administration. In some embodiments, such administration is via the buccal cavity. In some embodiments, formulations may comprise dry particles comprising active ingredients. In such embodiments, dry particles may have a diameter in the range from about 0.5 nm to about 7 nm or from about 1 nm to about 6 nm. In some embodiments, formulations may be in the form of dry powders for administration using devices comprising dry powder reservoirs to which streams of propellant may be directed to disperse such powder. In some embodiments, self-propelling solvent/powder dispensing containers may be used. In such embodiments, active ingredients may be dissolved and/or suspended in low-boiling propellant in sealed containers. Such powders may comprise particles wherein at least 98% of the particles by weight have diameters greater than 0.5 nm and at least 95% of the particles by number have diameters less than 7 nm. Alternatively, at least 95% of the particles by weight have a diameter greater than 1 nm and at least 90% of the particles by number have a diameter less than 6 nm. Dry powder compositions may include a solid fine powder diluent such as sugar and are conveniently provided in a unit dose form.

[0582] Low boiling propellants generally include liquid propellants having a boiling point of below 65° F. at atmospheric pressure. Generally, propellants may constitute 50% to 99.9% (w/w) of the composition, and active ingredient may constitute 0.1% to 20% (w/w) of the composition. Propellants may further comprise additional ingredients such as liquid non-ionic and/or solid anionic surfactant and/or solid diluent (which may have particle sizes of the same order as particles comprising active ingredients).

[0583] Pharmaceutical compositions formulated for pulmonary delivery may provide active ingredients in the form of droplets of solution and/or suspension. Such formulations may be prepared, packaged, and/or sold as aqueous and/or dilute alcoholic solutions and/or suspensions, optionally sterile, comprising active ingredients, and may conveniently be administered using any nebulization and/or atomization device. Such formulations may further comprise one or more additional ingredients including, but not limited to, a flavoring agent such as saccharin sodium, a volatile oil, a buffering agent, a surface active agent, and/or a preservative such as methylhydroxybenzoate. Droplets provided by this route of administration may have an average diameter in the range from about 0.1 nm to about 200 nm.

### Ophthalmic or Otic Administration

[0584] In some embodiments, pharmaceutical compositions, AAV particles of the present disclosure may be prepared, packaged, and/or sold in formulations suitable for ophthalmic and/or otic administration. Such formulations may, for example, be in the form of eye and/or ear drops including, for example, a 0.1/1.0% (w/w) solution and/or suspension of the active ingredient in aqueous and/or oily liquid excipients. Such drops may further comprise buffering agents, salts, and/or one or more other of any additional ingredients described herein. Other ophthalmically-administrable formulations which are useful include those which comprise active ingredients in microcrystalline form and/or in liposomal preparations. Subretinal inserts may also be used as forms of administration.

### Delivery, Dose and Regimen

[0585] The present disclosure provides methods of administering AAV particles to a subject in need thereof. The pharmaceutical, diagnostic, or prophylactic AAV particles and compositions of the present disclosure may be administered to a subject using any amount and any route of administration effective for preventing, treating, managing, or diagnosing diseases, disorders and/or conditions. The exact amount required will vary from subject to subject, depending on the species, age, and general condition of the subject, the severity of the disease, the particular composition, its mode of administration, its mode of activity, and the like. The subject may be a human, a mammal, or an animal. Compositions in accordance with the disclosure are typically formulated in unit dosage form for ease of administration and uniformity of dosage. It will be understood, however, that the total daily usage of the compositions of the present disclosure may be decided by the attending physician within the scope of sound medical judgment. The specific therapeutically effective, prophylactically effective, or appropriate diagnostic dose level for any particular individual will depend upon a variety of factors including the disorder being treated and the severity of the disorder; the activity of the specific payload employed; the specific composition employed; the age, body weight, general health, sex and diet of the patient; the time of administration, route of administration, and rate of excretion of the specific AAV particle employed; the duration of the treatment; drugs used in combination or coincidental with the specific AAV particle employed; and like factors well known in the medical arts.

[0586] In some embodiments, delivery of the AAV particles as described herein results in minimal serious adverse events (SAEs) as a result of the delivery of the AAV particles.

[0587] In some embodiments, the AAV particle may be delivered in a multi-dose regimen. The multi-dose regimen may be 2, 3, 4, 5, 6, 7, 8, 9, 10 or more than 10 doses.

[0588] In some embodiments, the AAV particle may be delivered to a subject via a multi-site route of administration. A subject may be administered the AAV particle at 2, 3, 4, 5 or more than 5 sites.

[0589] In certain embodiments, AAV particle pharmaceutical compositions in accordance with the present disclosure may be administered at dosage levels sufficient to deliver from about 0.0001 mg/kg to about 100 mg/kg, from about 0.001 mg/kg to about 0.05 mg/kg, from about 0.005 mg/kg to about 0.05 mg/kg, from about 0.001 mg/kg to about 0.005 mg/kg, from about 0.05 mg/kg to about 0.5 mg/kg, from about 0.01 mg/kg to about 50 mg/kg, from about 0.1 mg/kg to about 40 mg/kg, from about 0.5 mg/kg to about 30 mg/kg, from about 0.01 mg/kg to about 10 mg/kg, from about 0.1 mg/kg to about 10 mg/kg, or from about 1 mg/kg to about 25 mg/kg, of subject body weight per day, one or more times a day, to obtain the desired therapeutic, diagnostic, or prophylactic, effect. It will be understood that the above dosing concentrations may be converted to vg or viral genomes per kg or into total viral genomes administered by one of skill in the art.

[0590] In certain embodiments, AAV particle pharmaceutical compositions in accordance with the present disclosure may be administered at about 10 to about 600 μl/site, 50 to about 500 μl/site, 100 to about 400 μl/site, 120 to about 300 μl/site, 140 to about 200 μl/site, about 160 μl/site. As non-limiting examples, AAV particles may be administered at 50 μl/site and/or 150 μl/site.

[0591] In some embodiments, delivery of the compositions in accordance with the present disclosure to cells comprises a rate of delivery defined by [VG/hour=mL/hour*VG/mL] wherein VG is viral genomes, VG/mL is composition concentration, and mL/hour is rate of prolonged delivery.

[0592] In some embodiments, delivery of compositions comprising the AAV particles in accordance with the present disclosure to cells may comprise a total concentration per subject between about 1×10⁶ VG (Viral Genome) and about 1×10¹⁶ VG. In some embodiments, delivery may comprise a composition concentration of about 1×10⁶, 2×10⁶, 3×10⁶, 4×10⁶, 5×10⁶, 6×10⁶, 7×10⁶, 8×10⁶, 9×10⁶, 1×10⁷, 2×10⁷, 3×10⁷, 4×10⁷, 5×10⁷, 6×10⁷, 7×10⁷, 8×10⁷, 9×10⁷, 1×10⁸, 2×10⁸, 3×10⁸, 4×10⁸, 5×10⁸, 6×10⁸, 7×10⁸, 8×10⁸, 9×10⁸, 1×10⁹, 2×10⁹, 3×10⁹, 4×10⁹, 5×10⁹, 6×10⁹, 7×10⁹, 8×10⁹, 9×10⁹, 1×10¹⁰, 2×10¹⁰, 3×10¹⁰, 4×10¹⁰, 5×10¹⁰, 6×10¹⁰, 7×10¹⁰, 8×10¹⁰, 9×10¹⁰, 1×10¹¹, 2×10¹¹, 2.1×10¹¹, 2.2×10¹¹, 2.3×10¹¹, 2.4×10¹¹, 2.5×10¹¹, 2.6×10¹¹, 2.7×10¹¹, 2.8×10¹¹, 2.9×10¹¹, 3×10¹¹, 4×10¹¹, 5×10¹¹, 6×10¹¹, 7×10¹¹, 7.1×10¹¹, 7.2×10¹¹, 7.3×10¹¹, 7.4×10¹¹, 7.5×10¹¹, 7.6×10¹¹, 7.7×10¹¹, 7.8×10¹¹, 7.9×10¹¹, 8×10¹¹, 9×10¹¹, 1×10¹², 1.1×10¹², 1.2×10¹², 1.3×10¹², 1.4×10¹², 1.5×10¹², 1.6×10¹², 1.7×10¹², 1.8×10¹², 1.9×10¹², 2×10¹², 3×10¹², 4×10¹², 4.1×10¹², 4.2×10¹², 4.3×10¹², 4.4×10¹², 4.5×10¹², 4.6×10¹², 4.7×10¹², 4.8×10¹², 4.9×10¹², 5×10¹², 6×10¹², 6.1×10¹², 6.2×10¹², 6.3×10¹², 6.4×10¹², 6.5×10¹², 6.6×10¹², 6.7×10¹², 6.8×10¹², 6.9×10¹², 7×10¹², 8×10¹², 8.1×10¹², 8.2×10¹², 8.3×10¹², 8.4×10¹², 8.5×10¹², 8.6×10¹², 8.7×10¹², 8.8×10¹², 8.9×10¹², 9×10¹², 1×10¹³, 2×10¹³, 3×10¹³, 4×10¹³, 5×10¹³, 6×10¹³, 6.7×10¹³, 7×10¹³, 8×10¹³, 9×10¹³, 1×10¹⁴, 2×10¹⁴, 3×10¹⁴, 4×10¹⁴, 5×10¹⁴, 6×10¹⁴, 7×10¹⁴, 8×10¹⁴, 9×10¹⁴, 1×10¹⁵, 2×10¹⁵, 3×10¹⁵, 4×10¹⁵, 5×10¹⁵, 6×10¹⁵, 7×10¹⁵, 8×10¹⁵, 9×10¹⁵, or 1×10¹⁶ VG/subject.

[0593] In some embodiments, delivery of compositions comprising the AAV particles in accordance with the present disclosure to cells may comprise a total concentration per subject between about 1×10⁶ VG/kg and about 1×10¹⁶ VG/kg. In some embodiments, delivery may comprise a composition concentration of about 1×10⁶, 2×10⁶, 3×10⁶, 4×10⁶, 5×10⁶, 6×10⁶, 7×10⁶, 8×10⁶, 9×10⁶, 1×10⁷, 2×10⁷, 3×10⁷, 4×10⁷, 5×10⁷, 6×10⁷, 7×10⁷, 8×10⁷, 9×10⁷, 1×10⁸, 2×10⁸, 3×10⁸, 4×10⁸, 5×10⁸, 6×10⁸, 7×10⁸, 8×10⁸, 9×10⁸, 1×10⁹, 2×10⁹, 3×10⁹, 4×10⁹, 5×10⁹, 6×10⁹, 7×10⁹, 8×10⁹, 9×10⁹, 1×10¹⁰, 2×10¹⁰, 3×10¹⁰, 4×10¹⁰, 5×10¹⁰, 6×10¹⁰, 7×10¹⁰, 8×10¹⁰, 9×10¹⁰, 1×10¹¹, 1.1×10¹¹, 1.2×10¹¹, 1.3×10¹¹, 1.4×10¹¹, 1.5×10¹¹, 1.6×10¹¹, 1.7×10¹¹, 1.8×10¹¹, 1.9×10¹¹, 2×10¹¹, 2.1×10¹¹, 2.2×10¹¹, 2.3×10¹¹, 2.4×10¹¹, 2.5×10¹¹, 2.6×10¹¹, 2.7×10¹¹, 2.8×10¹¹, 2.9×10¹¹, 3×10¹¹, 4×10¹¹, 5×10¹¹, 6×10¹¹, 7×10¹¹, 7.1×10¹¹, 7.2×10¹¹, 7.3×10¹¹, 7.4×10¹¹, 7.5×10¹¹, 7.6×10¹¹, 7.7×10¹¹, 7.8×10¹¹, 7.9×10¹¹, 8×10¹¹, 9×10¹¹, 1×10¹², 1.1×10¹², 1.2×10¹², 1.3×10¹², 1.4×10¹², 1.5×10¹², 1.6×10¹², 1.7×10¹², 1.8×10¹², 1.9×10¹², 2×10¹², 3×10¹², 4×10¹², 4.1×10¹², 4.2×10¹², 4.3×10¹², 4.4×10¹², 4.5×10¹², 4.6×10¹², 4.7×10¹², 4.8×10¹², 4.9×10¹², 5×10¹², 6×10¹², 6.1×10¹², 6.2×10¹², 6.3×10¹², 6.4×10¹², 6.5×10¹², 6.6×10¹², 6.7×10¹², 6.8×10¹², 6.9×10¹², 7×10¹², 8×10¹², 8.1×10¹², 8.2×10¹², 8.3×10¹², 8.4×10¹², 8.5×10¹², 8.6×10¹², 8.7×10¹², 8.8×10¹², 8.9×10¹², 9×10¹², 1×10¹³, 1.1×10¹³, 1.2×10¹³, 1.3×10¹³, 1.4×10¹³, 1.5×10¹³, 1.6×10¹³, 1.7×10¹³, 1.8×10¹³, 1.9×10¹³, 2×10¹³, 2.1×10¹³, 2.2×10¹³, 2.3×10¹³, 2.4×10¹³, 2.5×10¹³, 2.6×10¹³, 2.7×10¹³, 2.8×10¹³, 2.9×10¹³, 3×10¹³, 4×10¹³, 4.1×10¹³, 4.2×10¹³, 4.3×10¹³, 4.4×10¹³, 4.5×10¹³, 4.6×10¹³, 4.7×10¹³, 4.8×10¹³, 4.9×10¹³, 5×10¹³, 6×10¹³, 6.7×10¹³, 7×10¹³, 8×10¹³, 9×10¹³, 1×10¹⁴, 1.1×10¹⁴, 1.2×10¹⁴, 1.3×10¹⁴, 1.4×10¹⁴, 1.5×10¹⁴, 1.6×10¹³, 1.7×10¹³, 1.8×10¹³, 1.9×10¹³, 2×10¹⁴, 3×10¹⁴, 4×10¹⁴, 5×10¹⁴, 6×10¹⁴, 7×10¹⁴, 8×10¹⁴, 9×10¹⁴, 1×10¹⁵, 2×10¹⁵, 3×10¹⁵, 4×10¹⁵, 5×10¹⁵, 6×10¹⁵, 7×10¹⁵, 8×10¹⁵, 9×10¹⁵, or 1×10¹⁶ VG/kg. In some embodiments, the delivery comprises a composition concentration of 3×10¹¹ VG/kg. In some embodiments, the delivery comprises a composition concentration of 1×10¹²VG/kg. In some embodiments, the delivery comprises a composition concentration of 2.1×10¹² VG/kg. In some embodiments, the delivery comprises a composition concentration of 3×10¹²VG/kg. In some embodiments, the delivery comprises a composition concentration of 6.3×10¹² VG/kg. In some embodiments, the delivery comprises a composition concentration of 6.7×10¹² VG/kg. In some embodiments, the delivery comprises a composition concentration of 7×10¹² VG/kg. In some embodiments, the delivery comprises a composition concentration of 1×10¹³ VG/kg. In some embodiments, the delivery comprises a composition concentration of 2×10¹³ VG/kg. In some embodiments, the delivery comprises a composition concentration of 3×10¹³ VG/kg. In some embodiments, the delivery comprises a composition concentration of 4.9×10¹³VG/kg. In some embodiments, the delivery comprises a composition concentration of 1.2×10¹⁴ VG/kg. In some embodiments, the delivery comprises a composition concentration of 1×10¹²VG/kg to 1.5×10¹⁴VG/kg. In some embodiments, the delivery comprises a composition concentration of 1×10¹²VG/kg 1.5×10¹² VG/kg. In some embodiments, the delivery comprises a composition concentration of 1.5×10¹³VG/kg to 2.5×10¹³VG/kg. In some embodiments, the delivery comprises a composition concentration of 4×10¹³VG/kg to 5×10¹³ VG/kg. In some embodiments, the delivery comprises a composition concentration of 1×10¹⁴VG/kg to 1.5×10¹⁴VG/kg. In some embodiments, the delivery comprises a composition concentration of 6.3×10¹¹VG/kg to 1.2×10¹⁴ VG/kg.

[0594] In some embodiments, delivery of AAV particles to cells of the central nervous system (e.g., parenchyma) may comprise a total dose between about 1×10⁶ VG and about 1×10¹⁶ VG. In some embodiments, delivery may comprise a total dose of about 1×10⁶, 2×10⁶, 3×10⁶, 4×10⁶, 5×10⁶, 6×10⁶, 7×10⁶, 8×10⁶, 9×10⁶, 1×10⁷, 2×10⁷, 3×10⁷, 4×10⁷, 5×10⁷, 6×10⁷, 7×10⁷, 8×10⁷, 9×10⁷, 1×10⁸, 2×10⁸, 3×10⁸, 4×10⁸, 5×10⁸, 6×10⁸, 7×10⁸, 8×10⁸, 9×10⁸, 1×10⁹, 2×10⁹, 3×10⁹, 4×10⁹, 5×10⁹, 6×10⁹, 7×10⁹, 8×10⁹, 9×10⁹, 1×10¹⁰, 1.9×10¹⁰, 2×10¹⁰, 3×10¹⁰, 3.73×10¹⁰, 4×10¹⁰, 5×10¹⁰, 6×10¹⁰, 7×10¹⁰, 8×10¹⁰, 9×10¹⁰, 1×10¹¹, 2×10¹¹, 2.5×10¹¹, 3×10¹¹, 4×10¹¹, 5×10¹¹, 6×10¹¹, 7×10¹¹, 8×10¹¹, 9×10¹¹, 1×10¹², 2×10¹², 3×10¹², 4×10¹², 5×10¹², 6×10¹², 6.1×10¹², 6.2×10¹², 6.3×10¹², 6.4×10¹², 6.5×10¹², 6.6×10¹², 6.7×10¹², 6.8×10¹², 6.9×10¹², 7×10¹², 8×10¹², 9×10¹², 1×10¹³, 2×10¹³, 3×10¹³, 4×10¹³, 5×10¹³, 6×10¹³, 7×10¹³, 8×10¹³, 9×10¹³, 1×10¹⁴, 2×10¹⁴, 3×10¹⁴, 4×10¹⁴, 5×10¹⁴, 6×10¹⁴, 7×10¹⁴, 8×10¹⁴, 9×10¹⁴, 1×10¹⁵, 2×10¹⁵, 3×10¹⁵, 4×10¹⁵, 5×10¹⁵, 6×10¹⁵, 7×10¹⁵, 8×10¹⁵, 9×10¹⁵, or 1×10¹⁶ VG. As a non-limiting example, the total dose is 1×10¹³ VG. As another non-limiting example, the total dose is 2.1×10¹² VG. As another non-limiting example, the total dose is 6.3×10¹² VG.

[0595] In some embodiments, about 10⁵ to 10⁶ viral genome (unit) may be administered per dose.

[0596] In some embodiments, delivery of the compositions comprising the AAV particles in accordance with the present disclosure to cells may comprise a total concentration between about 1×10⁶ VG/mL and about 1×10¹⁶ VG/mL. In some embodiments, delivery may comprise a composition concentration of about 1×10⁶, 2×10⁶, 3×10⁶, 4×10⁶, 5×10⁶, 6×10⁶, 7×10⁶, 8×10⁶, 9×10⁶, 1×10⁷, 2×10⁷, 3×10⁷, 4×10⁷, 5×10⁷, 6×10⁷, 7×10⁷, 8×10⁷, 9×10⁷, 1×10⁸, 2×10⁸, 3×10⁸, 4×10⁸, 5×10⁸, 6×10⁸, 7×10⁸, 8×10⁸, 9×10⁸, 1×10⁹, 2×10⁹, 3×10⁹, 4×10⁹, 5×10⁹, 6×10⁹, 7×10⁹, 8×10⁹, 9×10⁹, 1×10¹⁰, 2×10¹⁰, 3×10¹⁰, 4×10¹⁰, 5×10¹⁰, 6×10¹⁰, 7×10¹⁰, 8×10¹⁰, 9×10¹⁰, 1×10¹¹, 1.1×10¹¹, 1.2×10¹¹, 1.3×10¹¹, 1.4×10¹¹, 1.5×10¹¹, 1.6×10¹¹, 1.7×10¹¹, 1.8×10¹¹, 1.9×10¹¹, 2×10¹¹, 2.1×10¹¹, 2.2×10¹¹, 2.3×10¹¹, 2.4×10¹¹, 2.5×10¹¹, 2.6×10¹¹, 2.7×10¹¹, 2.8×10¹¹, 2.9×10¹¹, 3×10¹¹, 4×10¹¹, 5×10¹¹, 6×10¹¹, 7×10¹¹, 7.1×10¹¹, 7.2×10¹¹, 7.3×10¹¹, 7.4×10¹¹, 7.5×10¹¹, 7.6×10¹¹, 7.7×10¹¹, 7.8×10¹¹, 7.9×10¹¹, 8×10¹¹, 9×10¹¹, 1×10¹², 1.1×10¹², 1.2×10¹², 1.3×10¹², 1.4×10¹², 1.5×10¹², 1.6×10¹², 1.7×10¹², 1.8×10¹², 1.9×10¹², 2×10¹², 3×10¹², 4×10¹², 4.1×10¹², 4.2×10¹², 4.3×10¹², 4.4×10¹², 4.5×10¹², 4.6×10¹², 4.7×10¹², 4.8×10¹², 4.9×10¹², 5×10¹², 6×10¹², 6.1×10¹² 6.2×10¹², 6.3×10¹², 6.4×10¹², 6.5×10¹², 6.6×10¹², 6.7×10¹², 6.8×10¹², 6.9×10¹², 7×10¹², 8×10¹² 8.1×10¹², 8.2×10¹², 8.3×10¹², 8.4×10¹², 8.5×10¹², 8.6×10¹², 8.7×10¹², 8.8×10¹², 8.9×10¹², 9×10¹², 1×10¹³, 1.1×10¹³, 1.2×10¹³, 1.3×10¹³, 1.4×10¹³, 1.5×10¹³, 1.6×10¹³, 1.7×10¹³, 1.8×10¹³, 1.9×10¹³, 2×10¹³, 2.1×10¹³, 2.2×10¹³, 2.3×10¹³, 2.4×10¹³, 2.5×10¹³, 2.6×10¹³, 2.7×10¹³, 2.8×10¹³, 2.9×10¹³, 3×10¹³, 4×10¹³, 4.1×10¹³, 4.2×10¹³, 4.3×10¹³, 4.4×10¹³, 4.5×10¹³, 4.6×10¹³, 4.7×10¹³, 4.8×10¹³, 4.9×10¹³, 5×10¹³, 6×10¹³, 6.7×10¹³, 7×10¹³, 8×10¹³, 9×10¹³, 1×10¹⁴, 1.1×10¹⁴, 1.2×10¹⁴, 1.3×10¹⁴, 1.4×10¹⁴, 1.5×10¹⁴, 1.6×10¹³, 1.7×10¹³, 1.8×10¹³, 1.9×10¹³, 2×10¹⁴, 3×10¹⁴, 4×10¹⁴, 5×10¹⁴, 6×10¹⁴, 7×10¹⁴, 8×10¹⁴, 9×10¹⁴, 1×10¹⁵, 2×10¹⁵, 3×10¹⁵, 4×10¹⁵, 5×10¹⁵, 6×10¹⁵, 7×10¹⁵, 8×10¹⁵, 9×10¹⁵, or 1×10¹⁶ VG/kg. In some embodiments, the delivery comprises a composition concentration of 3×10¹¹ VG/kg. In some embodiments, the delivery comprises a composition concentration of 1×10¹²VG/kg. In some embodiments, the delivery comprises a composition concentration of 2.1×10¹² VG/kg. In some embodiments, the delivery comprises a composition concentration of 3×10¹²VG/kg. In some embodiments, the delivery comprises a composition concentration of 6.3×10¹² VG/kg. In some embodiments, the delivery comprises a composition concentration of 6.7×10¹² VG/kg. In some embodiments, the delivery comprises a composition concentration of 7×10¹² VG/kg. In some embodiments, the delivery comprises a composition concentration of 1×10¹³VG/kg. In some embodiments, the delivery comprises a composition concentration of 2×10¹³VG/kg. In some embodiments, the delivery comprises a composition concentration of 3×10¹³ VG/kg. In some embodiments, the delivery comprises a composition concentration of 4.9×10¹³VG/kg. In some embodiments, the delivery comprises a composition concentration of 1.2×10¹⁴ VG/kg. In some embodiments, the delivery comprises a composition concentration of 1×10¹²VG/kg to 1.5×10¹⁴VG/kg. In some embodiments, the delivery comprises a composition concentration of 1×10¹²VG/kg 1.5×10¹² VG/kg. In some embodiments, the delivery comprises a composition concentration of 1.5×10¹³VG/kg to 2.5×10¹³VG/kg. In some embodiments, the delivery comprises a composition concentration of 4×10¹³VG/kg to 5×10¹³ VG/kg. In some embodiments, the delivery comprises a composition concentration of 1×10¹⁴VG/kg to 1.5×10¹⁴VG/kg. In some embodiments, the delivery comprises a composition concentration of 6.3×10¹¹VG/kg to 1.2×10¹⁴ VG/kg.

[0597] In some embodiments, delivery of AAV particles to cells of the central nervous system (e.g., parenchyma) may comprise a composition concentration between about 1×10⁶ VG/mL and about 1×10¹⁶ VG/mL. In some embodiments, delivery may comprise a composition concentration of about 1×10⁶, 2×10⁶, 3×10⁶, 4×10⁶, 5×10⁶, 6×10⁶, 7×10⁶, 8×10⁶, 9×10⁶, 1×10⁷, 2×10⁷, 3×10⁷, 4×10⁷, 5×10⁷, 6×10⁷, 7×10⁷, 8×10⁷, 9×10⁷, 1×10⁸, 2×10⁸, 3×10⁸, 4×10⁸, 5×10⁸, 6×10⁸, 7×10⁸, 8×10⁸, 9×10⁸, 1×10⁹, 2×10⁹, 3×10⁹, 4×10⁹, 5×10⁹, 6×10⁹, 7×10⁹, 8×10⁹, 9×10⁹, 1×10¹⁰, 2×10¹⁰, 3×10¹⁰, 4×10¹⁰, 5×10¹⁰, 6×10¹⁰, 7×10¹⁰, 8×10¹⁰, 9×10¹⁰, 1×10¹¹, 1.1×10¹¹, 1.2×10¹¹, 1.3×10¹¹, 1.4×10¹¹, 1.5×10¹¹, 1.6×10¹¹, 1.7×10¹¹, 1.8×10¹¹, 1.9×10¹¹, 2×10¹¹, 2.1×10¹¹, 2.2×10¹¹, 2.3×10¹¹, 2.4×10¹¹, 2.5×10¹¹, 2.6×10¹¹, 2.7×10¹¹, 2.8×10¹¹, 2.9×10¹¹, 3×10¹¹, 4×10¹¹, 5×10¹¹, 6×10¹¹, 7×10¹¹, 7.1×10¹¹, 7.2×10¹¹, 7.3×10¹¹, 7.4×10¹¹, 7.5×10¹¹, 7.6×10¹¹, 7.7×10¹¹, 7.8×10¹¹, 7.9×10¹¹, 8×10¹¹, 9×10¹¹, 1×10¹², 1.1×10¹², 1.2×10¹², 1.3×10¹², 1.4×10¹², 1.5×10¹², 1.6×10¹², 1.7×10¹², 1.8×10¹², 1.9×10¹², 2×10¹², 3×10¹², 4×10¹², 4.1×10¹², 4.2×10¹², 4.3×10¹², 4.4×10¹², 4.5×10¹², 4.6×10¹², 4.7×10¹², 4.8×10¹², 4.9×10¹², 5×10¹², 6×10¹², 6.1×10¹², 6.2×10¹², 6.3×10¹², 6.4×10¹², 6.5×10¹², 6.6×10¹², 6.7×10¹², 6.8×10¹², 6.9×10¹², 7×10¹², 8×10¹², 8.1×10¹², 8.2×10¹², 8.3×10¹², 8.4×10¹², 8.5×10¹², 8.6×10¹², 8.7×10¹², 8.8×10¹², 8.9×10¹², 9×10², 1×10¹³, 1.1×10¹³, 1.2×10¹³, 1.3×10¹³, 1.4×10¹³, 1.5×10¹³, 1.6×10¹³, 1.7×10¹³, 1.8×10¹³, 1.9×10¹³, 2×10¹³, 2.1×10¹³, 2.2×10¹³, 2.3×10¹³, 2.4×10¹³, 2.5×10¹³, 2.6×10¹³, 2.7×10¹³, 2.8×10¹³, 2.9×10¹³, 3×10¹³, 4×10¹³, 4.1×10¹³, 4.2×10¹³, 4.3×10¹³, 4.4×10¹³, 4.5×10¹³, 4.6×10¹³, 4.7×10¹³, 4.8×10¹³, 4.9×10¹³, 5×10¹³, 6×10¹³, 6.7×10¹³, 7×10¹³, 8×10¹³, 9×10¹³, 1×10¹⁴, 1.1×10¹⁴, 1.2×10¹⁴, 1.3×10¹⁴, 1.4×10¹⁴, 1.5×10¹⁴, 1.6×10¹³, 1.7×10¹³, 1.8×10¹³, 1.9×10¹³, 2×10¹⁴, 3×10¹⁴, 4×10¹⁴, 5×10¹⁴, 6×10¹⁴, 7×10¹⁴, 8×10¹⁴, 9×10¹⁴, 1×10¹⁵, 2×10¹⁵, 3×10¹⁵, 4×10¹⁵, 5×10¹⁵, 6×10¹⁵, 7×10¹⁵, 8×10¹⁵, 9×10¹⁵, or 1×10¹⁶ VG/kg. In some embodiments, the delivery comprises a composition concentration of 3×10¹¹ VG/kg. In some embodiments, the delivery comprises a composition concentration of 1×10¹²VG/kg. In some embodiments, the delivery comprises a composition concentration of 2.1×10¹² VG/kg. In some embodiments, the delivery comprises a composition concentration of 3×10¹²VG/kg. In some embodiments, the delivery comprises a composition concentration of 6.3×10¹² VG/kg. In some embodiments, the delivery comprises a composition concentration of 6.7×10¹² VG/kg. In some embodiments, the delivery comprises a composition concentration of 7×10¹² VG/kg. In some embodiments, the delivery comprises a composition concentration of 1×10¹³ VG/kg. In some embodiments, the delivery comprises a composition concentration of 2×10¹³VG/kg. In some embodiments, the delivery comprises a composition concentration of 3×10¹³ VG/kg. In some embodiments, the delivery comprises a composition concentration of 4.9×10¹³VG/kg. In some embodiments, the delivery comprises a composition concentration of 1.2×10¹⁴ VG/kg. In some embodiments, the delivery comprises a composition concentration of 1×10¹²VG/kg to 1.5×10¹⁴VG/kg. In some embodiments, the delivery comprises a composition concentration of 1×10¹²VG/kg 1.5×10¹² VG/kg. In some embodiments, the delivery comprises a composition concentration of 1.5×10¹³VG/kg to 2.5×10¹³VG/kg. In some embodiments, the delivery comprises a composition concentration of 4×10¹³VG/kg to 5×10¹³ VG/kg. In some embodiments, the delivery comprises a composition concentration of 1×10¹⁴VG/kg to 1.5×10¹⁴VG/kg. In some embodiments, the delivery comprises a composition concentration of 6.3×10¹¹VG/kg to 1.2×10¹⁴ VG/kg.

[0598] In certain embodiments, the desired dosage may be delivered using multiple administrations (e.g., two, three, four, five, six, seven, eight, nine, ten, eleven, twelve, thirteen, fourteen, or more administrations). When multiple administrations are employed, split dosing regimens such as those described herein may be used. As used herein, a “split dose” is the division of “single unit dose” or total daily dose into two or more doses, e.g., two or more administrations of the “single unit dose”. As used herein, a “single unit dose” is a dose of any therapeutic administered in one dose/at one time/single route/single point of contact, i.e., single administration event.

[0599] The desired dosage of the AAV particles of the present disclosure may be administered as a “pulse dose” or as a “continuous flow”. As used herein, a “pulse dose” is a series of single unit doses of any therapeutic administered with a set frequency over a period of time. As used herein, a “continuous flow” is a dose of therapeutic administered continuously for a period of time in a single route/single point of contact, i.e., continuous administration event. A total daily dose, an amount given or prescribed in 24 hour period, may be administered by any of these methods, or as a combination of these methods, or by any other methods suitable for a pharmaceutical administration.

[0600] In some embodiments, delivery of the AAV particles of the present disclosure to a subject provides regulating activity of a target gene in a subject. The regulating activity may be an increase in the production of the target protein in a subject or the decrease of the production of target protein in a subject. The regulating activity can be for at least 1 month, 2 months, 3 months, 4 months, 5 months, 6 months, 7 months, 8 months, 9 months, 10 months, 11 months, 1 year, 13 months, 14 months, 15 months, 16 months, 17 months, 18 months, 19 months, 20 months, 20 months, 21 months, 22 months, 23 months, 2 years, 3 years, 4 years, 5 years, 6 years, 7 years, 8 years, 9 years, 10 years or more than 10 years.

[0601] In some embodiments, the AAV particle of the present disclosure may be administered to a subject using a single dose, one-time treatment. The dose of the one-time treatment may be administered by any methods known in the art and/or described herein. As used herein, a “one-time treatment” refers to a composition which is only administered one time. If needed, a booster dose may be administered to the subject to ensure the appropriate efficacy is reached. A booster may be administered 1 month, 2 months, 3 months, 4 months, 5 months, 6 months, 7 months, 8 months, 9 months, 10 months, 11 months, 12 months, 1 year, 13 months, 14 months, 15 months, 16 months, 17 months, 18 months, 19 months, 20 months, 21 months, 22 months, 23 months, 24 months, 2 years, 3 years, 4 years, 5 years, 6 years, 7 years, 8 years, 9 years, 10 years, or more than 10 years after the one-time treatment.

### Delivery Methods

[0602] In some embodiments, the AAV particles or pharmaceutical compositions of the present disclosure may be administered or delivered using the methods for treatment of disease described in U.S. Pat. No. 8,999,948, or International Publication No. WO2014178863, the contents of each of which are herein incorporated by reference in their entirety.

[0603] In some embodiments, the AAV particles or pharmaceutical compositions of the present disclosure may be administered or delivered using the methods for delivering gene therapy in Alzheimer's Disease or other neurodegenerative conditions as described in US Patent Application Publication No. 20150126590, the contents of which are herein incorporated by reference in their entirety.

[0604] In some embodiments, the AAV particles or pharmaceutical compositions of the present disclosure may be administered or delivered using the methods for delivery of a CNS gene therapy as described in U.S. Pat. Nos. 6,436,708, and 8,946,152, and International Publication No. WO2015168666, the contents of each of which are herein incorporated by reference in their entirety.

[0605] In some embodiments, the AAV particle or pharmaceutical compositions of the present disclosure may be administered or delivered using the methods for delivering proteins using AAV particles described in European Patent Application No. EP2678433, the contents of which are herein incorporated by reference in their entirety.

[0606] In some embodiments, the AAV particle or pharmaceutical compositions of the present disclosure may be administered or delivered using the methods for delivering DNA to the bloodstream described in U.S. Pat. No. 6,211,163, the contents of which are herein incorporated by reference in their entirety.

[0607] In some embodiments, the AAV particle or pharmaceutical compositions of the present disclosure may be administered or delivered using the methods for delivering a payload to the central nervous system described in U.S. Pat. No. 7,588,757, the contents of which are herein incorporated by reference in their entirety.

[0608] In some embodiments, the AAV particle or pharmaceutical compositions of the present disclosure may be administered or delivered using the methods for delivering a payload described in U.S. Pat. No. 8,283,151, the contents of which are herein incorporated by reference in their entirety.

[0609] In some embodiments, the AAV particle or pharmaceutical compositions of the present disclosure may be administered or delivered using the methods for delivering a payload using a glutamic acid decarboxylase (GAD) delivery vector described in International Patent Publication No. WO2001089583, the contents of which are herein incorporated by reference in their entirety.

[0610] In some embodiments, the AAV particle or pharmaceutical compositions of the present disclosure may be administered or delivered using the methods for delivering a payload to neural cells described in International Patent Publication No. WO2012057363, the contents of which are herein incorporated by reference in their entirety.

### Delivery to Cells

[0611] The present disclosure provides a method of delivering to a cell or tissue or organ any of the above-described AAV particles, comprising contacting the cell or tissue or organ with said AAV particle or contacting the cell or tissue or organ with a formulation comprising said AAV particle, or contacting the cell or tissue with any of the described compositions, including pharmaceutical compositions comprising the AAV particles. The method of delivering the AAV particle to a cell or tissue or organ can be accomplished in vitro, ex vivo, or in vivo.

### Delivery to Subjects

[0612] The present disclosure additionally provides a method of delivering to a subject, including a mammalian subject, any of the above-described AAV particles comprising administering to the subject said AAV particle, or administering to the subject a formulation comprising said AAV particle, or administering to the subject any of the described compositions, including pharmaceutical compositions.

[0613] In some embodiments, the mammalian subject is human. In some aspects, the human subject is a patient with a neurological disease.

### Combinations

[0614] The AAV particles of the present disclosure may be used in combination with one or more other therapeutic, prophylactic, research or diagnostic agents. By “in combination with,” it is not intended to imply that the agents must be administered at the same time and/or formulated for delivery together, although these methods of delivery are within the scope of the present disclosure. Compositions can be administered concurrently with, prior to, or subsequent to, one or more other desired therapeutics or medical procedures. In general, each agent will be administered at a dose and/or on a time schedule determined for that agent. In some embodiments, the present disclosure encompasses the delivery of pharmaceutical, prophylactic, research, or diagnostic compositions in combination with agents that may improve their bioavailability, reduce and/or modify their metabolism, inhibit their excretion, and/or modify their distribution within the body.

### Measurement of Expression

[0615] Expression of payloads from viral genomes may be determined using various methods known in the art such as, but not limited to immunochemistry (e.g., IHC), in situ hybridization (ISH), enzyme-linked immunosorbent assay (ELISA), affinity ELISA, ELISPOT, flow cytometry, immunocytology, surface plasmon resonance analysis, kinetic exclusion assay, liquid chromatography-mass spectrometry (LCMS), high-performance liquid chromatography (HPLC), BCA assay, immunoelectrophoresis, Western blot, SDS-PAGE, protein immunoprecipitation, and/or PCR.

### Bioavailability

[0616] The AAV particles, when formulated into a composition with a delivery agent as described herein, can exhibit an increase in bioavailability as compared to a composition lacking a delivery agent as described herein. As used herein, the term “bioavailability” refers to the systemic availability of a given amount of AAV particle or expressed payload administered to a mammal. Bioavailability can be assessed by measuring the area under the curve (AUC) or the maximum serum or plasma concentration (Cₘₐₓ) of the composition following. AUC is a determination of the area under the curve plotting the serum or plasma concentration of a compound (e.g., AAV particles or expressed payloads) along the ordinate (Y-axis) against time along the abscissa (X-axis). Generally, the AUC for a particular compound can be calculated using methods known to those of ordinary skill in the art and as described in G. S. Banker, Modern Pharmaceutics, Drugs and the Pharmaceutical Sciences, v. 72, Marcel Dekker, New York, Inc., 1996, the contents of which are herein incorporated by reference in their entirety.

[0617] The Cₘₐₓ value is the maximum concentration of the AAV particle or expressed payload achieved in the serum or plasma of a mammal following administration of the AAV particle to the mammal. The Cₘₐₓ value can be measured using methods known to those of ordinary skill in the art. The phrases “increasing bioavailability” or “improving the pharmacokinetics,” as used herein mean that the systemic availability of a first AAV particle or expressed payload, measured as AUC, Cₘₐₓ, or Cₘᵢₙ in a mammal is greater, when co-administered with a delivery agent as described herein, than when such co-administration does not take place. In some embodiments, the bioavailability can increase by at least about 2%, at least about 5%, at least about 10%, at least about 15%, at least about 20%, at least about 25%, at least about 30%, at least about 35%, at least about 40%, at least about 45%, at least about 50%, at least about 55%, at least about 60%, at least about 65%, at least about 70%, at least about 75%, at least about 80%, at least about 85%, at least about 90%, at least about 95%, or about 100%.

### Therapeutic Window

[0618] As used herein “therapeutic window” refers to the range of plasma concentrations, or the range of levels of therapeutically active substance at the site of action, with a high probability of eliciting a therapeutic effect. In some embodiments, the therapeutic window of the AAV particle as described herein can increase by at least about 2%, at least about 5%, at least about 10%, at least about 15%, at least about 20%, at least about 25%, at least about 30%, at least about 35%, at least about 40%, at least about 45%, at least about 50%, at least about 55%, at least about 60%, at least about 65%, at least about 70%, at least about 75%, at least about 80%, at least about 85%, at least about 90%, at least about 95%, or about 100%.

### Volume of Distribution

[0619] As used herein, the term “volume of distribution” refers to the fluid volume that would be required to contain the total amount of the drug in the body at the same concentration as in the blood or plasma: V_{dist} equals the amount of drug in the body/concentration of drug in blood or plasma. For example, for a 10 mg dose and a plasma concentration of 10 mg/L, the volume of distribution would be 1 liter. The volume of distribution reflects the extent to which the drug is present in the extravascular tissue. A large volume of distribution reflects the tendency of a compound to bind to the tissue components compared with plasma protein binding. In a clinical setting, V_{dist} can be used to determine a loading dose to achieve a steady state concentration. In some embodiments, the volume of distribution of the AAV particles as described herein can decrease at least about 2%, at least about 5%, at least about 10%, at least about 15%, at least about 20%, at least about 25%, at least about 30%, at least about 35%, at least about 40%, at least about 45%, at least about 50%, at least about 55%, at least about 60%, at least about 65%, at least about 70%.

### Biological Effect

[0620] In some embodiments, the biological effect of the AAV particles delivered to the animals may be categorized by analyzing the payload expression in the animals. The payload expression may be determined from analyzing a biological sample collected from a mammal administered the AAV particles described herein. For example, a protein expression of 50-200 pg/ml for the protein encoded by the AAV particles delivered to the mammal may be seen as a therapeutically effective amount of protein in the mammal.

### IV. Methods and Uses of the Compositions

### Gene and Protein Expression

[0621] AAV particles, including compositions comprising the AAV particles of the present disclosure may be used for regulating expression of a gene of interest in a cell, tissue, organ or subject. The AAV particle may comprise a capsid and a viral genome that comprises a payload; the payload may be or include at least one nucleic acid sequence encoding a target protein, or a nucleic acid sequence encoding a siRNA duplex targeting a gene of interest. The AAV particle may have a serotype including a capsid and/or a peptide insert such as but not limited to VOY101, VOY201, VOY701, VOY801, VOY1101, AAVPHP.B (PHP.B), AAVPHP.A (PUPA), AAVG2B-26, AAVG2B-13, AAVTH1.1-32, AAVTH1.1-35, AAVPHP.B2 (PHP.B2), AAVPHP.B3 (PHP.B3), AAVPHP.N/PHP.B-DGT, AAVPHP.B-EST, AAVPHP.B-GGT, AAVPHP.B-ATP, AAVPHP.B-ATT-T, AAVPHP.B-DGT-T, AAVPHP.B-GGT-T, AAVPHP.B-SGS, AAVPHP.B-AQP, AAVPHP.B-QQP, AAVPHP.B-SNP(3), AAVPHP.B-SNP, AAVPHP.B-QGT, AAVPHP.B-NQT, AAVPHP.B-EGS, AAVPHP.B-SGN, AAVPHP.B-EGT, AAVPHP.B-DST, AAVPHP.B-DST, AAVPHP.B-STP, AAVPHP.B-PQP, AAVPHP.B-SQP, AAVPHP.B-QLP, AAVPHP.B-TMP, AAVPHP.B-TTP, AAVPHP.S/G2A12, AAVG2A15/G2A3 (G2A3), AAVG2B4 (G2B4), AAVG2B5, PHP.S, AAV1, AAV2, AAV2G9, AAV3, AAV3a, AAV3b, AAV3-3, AAV4, AAV4-4, AAV5, AAV6, AAV6.1, AAV6.2, AAV6.1.2, AAV7, AAV7.2, AAV8, AAV9, AAV9.11, AAV9.13, AAV9.16, AAV9.24, AAV9.45, AAV9.47, AAV9.61, AAV9.68, AAV9.84, AAV9.9, AAV10, AAV11, AAV12, AAV16.3, AAV24.1, AAV27.3, AAV42.12, AAV42-1b, AAV42-2, AAV42-3a, AAV42-3b, AAV42-4, AAV42-5a, AAV42-5b, AAV42-6b, AAV42-8, AAV42-10, AAV42-11, AAV42-12, AAV42-13, AAV42-15, AAV42-aa, AAV43-1, AAV43-12, AAV43-20, AAV43-21, AAV43-23, AAV43-25, AAV43-5, AAV44.1, AAV44.2, AAV44.5, AAV223.1, AAV223.2, AAV223.4, AAV223.5, AAV223.6, AAV223.7, AAV1-7/rh.48, AAV1-8/rh.49, AAV2-15/rh.62, AAV2-3/rh.61, AAV2-4/rh.50, AAV2-5/rh.51, AAV3.1/hu.6, AAV3.1/hu.9, AAV3-9/rh.52, AAV3-11/rh.53, AAV4-8/r11.64, AAV4-9/rh.54, AAV4-19/rh.55, AAV5-3/rh.57, AAV5-22/rh.58, AAV7.3/hu.7, AAV16.8/hu.10, AAV16.12/hu.11, AAV29.3/bb.1, AAV29.5/bb.2, AAV106.1/hu.37, AAV114.3/hu.40, AAV127.2/hu.41, AAV127.5/hu.42, AAV128.3/hu.44, AAV130.4/hu.48, AAV145.1/hu.53, AAV145.5/hu.54, AAV145.6/hu.55, AAV161.10/hu.60, AAV161.6/hu.61, AAV33.12/hu.17, AAV33.4/hu.15, AAV33.8/hu.16, AAV52/hu.19, AAV52.1/hu.20, AAV58.2/hu.25, AAVA3.3, AAVA3.4, AAVA3.5, AAVA3.7, AAVC1, AAVC2, AAVC5, AAV-DJ, AAV-DJ8, AAVF3, AAVF5, AAVH2, AAVrh.72, AAVhu.8, AAVrh.68, AAVrh.70, AAVpi.1, AAVpi.3, AAVpi.2, AAVrh.60, AAVrh.44, AAVrh.65, AAVrh.55, AAVrh.47, AAVrh.69, AAVrh.45, AAVrh.59, AAVhu.12, AAVH6, AAVLK03, AAVH-1/hu.1, AAVH-5/hu.3, AAVLG-10/rh.40, AAVLG-4/rh.38, AAVLG-9/hu.39, AAVN721-8/rh.43, AAVCh.5, AAVCh.5R1, AAVcy.2, AAVcy.3, AAVcy.4, AAVcy.5, AAVCy.5R1, AAVCy.5R2, AAVCy.5R3, AAVCy.5R4, AAVcy.6, AAVhu.1, AAVhu.2, AAVhu.3, AAVhu.4, AAVhu.5, AAVhu.6, AAVhu.7, AAVhu.9, AAVhu.10, AAVhu.11, AAVhu.13, AAVhu.15, AAVhu.16, AAVhu.17, AAVhu.18, AAVhu.20, AAVhu.21, AAVhu.22, AAVhu.23.2, AAVhu.24, AAVhu.25, AAVhu.27, AAVhu.28, AAVhu.29, AAVhu.29R, AAVhu.31, AAVhu.32, AAVhu.34, AAVhu.35, AAVhu.37, AAVhu.39, AAVhu.40, AAVhu.41, AAVhu.42, AAVhu.43, AAVhu.44, AAVhu.44R1, AAVhu.44R2, AAVhu.44R3, AAVhu.45, AAVhu.46, AAVhu.47, AAVhu.48, AAVhu.48R1, AAVhu.48R2, AAVhu.48R3, AAVhu.49, AAVhu.51, AAVhu.52, AAVhu.54, AAVhu.55, AAVhu.56, AAVhu.57, AAVhu.58, AAVhu.60, AAVhu.61, AAVhu.63, AAVhu.64, AAVhu.66, AAVhu.67, AAVhu.14/9, AAVhu.t 19, AAVrh.2, AAVrh.2R, AAVrh.8, AAVrh.8R, AAVrh.10, AAVrh.12, AAVrh.13, AAVrh.13R, AAVrh.14, AAVrh.17, AAVrh.18, AAVrh.19, AAVrh.20, AAVrh.21, AAVrh.22, AAVrh.23, AAVrh.24, AAVrh.25, AAVrh.31, AAVrh.32, AAVrh.33, AAVrh.34, AAVrh.35, AAVrh.36, AAVrh.37, AAVrh.37R2, AAVrh.38, AAVrh.39, AAVrh.40, AAVrh.46, AAVrh.48, AAVrh.48.1, AAVrh.48.1.2, AAVrh.48.2, AAVrh.49, AAVrh.51, AAVrh.52, AAVrh.53, AAVrh.54, AAVrh.56, AAVrh.57, AAVrh.58, AAVrh.61, AAVrh.64, AAVrh.64R1, AAVrh.64R2, AAVrh.67, AAVrh.73, AAVrh.74, AAVrh8R, AAVrh8R A586R mutant, AAVrh8R R533A mutant, AAAV, BAAV, caprine AAV, bovine AAV, AAVhE1.1, AAVhEr1.5, AAVhER1.14, AAVhEr1.8, AAVhEr1.16, AAVhEr1.18, AAVhEr1.35, AAVhEr1.7, AAVhEr1.36, AAVhEr2.29, AAVhEr2.4, AAVhEr2.16, AAVhEr2.30, AAVhEr2.31, AAVhEr2.36, AAVhER1.23, AAVhEr3.1, AAV2.5T, AAV-PAEC, AAV-LK01, AAV-LK02, AAV-LK03, AAV-LK04, AAV-LK05, AAV-LK06, AAV-LK07, AAV-LK08, AAV-LK09, AAV-LK10, AAV-LK11, AAV-LK12, AAV-LK13, AAV-LK14, AAV-LK15, AAV-LK16, AAV-LK17, AAV-LK18, AAV-LK19, AAV-PAEC2, AAV-PAEC4, AAV-PAEC6, AAV-PAEC7, AAV-PAEC8, AAV-PAEC11, AAV-PAEC12, AAV-2-pre-miRNA-101, AAV-8h, AAV-8b, AAV-h, AAV-b, AAV SM 10-2, AAV Shuffle 100-1, AAV Shuffle 100-3, AAV Shuffle 100-7, AAV Shuffle 10-2, AAV Shuffle 10-6, AAV Shuffle 10-8, AAV Shuffle 100-2, AAV SM 10-1, AAV SM 10-8, AAV SM 100-3, AAV SM 100-10, BNP61 AAV, BNP62 AAV, BNP63 AAV, AAVrh.50, AAVrh.43, AAVrh.62, AAVrh.48, AAVhu.19, AAVhu.11, AAVhu.53, AAV4-8/rh.64, AAVLG-9/hu.39, AAV54.5/hu.23, AAV54.2/hu.22, AAV54.7/hu.24, AAV54.1/hu.21, AAV54.4R/hu.27, AAV46.2/hu.28, AAV46.6/hu.29, AAV128.1/hu.43, true type AAV (ttAAV), UPENN AAV 10, Japanese AAV 10 serotypes, AAV CBr-7.1, AAV CBr-7.10, AAV CBr-7.2, AAV CBr-7.3, AAV CBr-7.4, AAV CBr-7.5, AAV CBr-7.7, AAV CBr-7.8, AAV CBr-B7.3, AAV CBr-B7.4, AAV CBr-E1, AAV CBr-E2, AAV CBr-E3, AAV CBr-E4, AAV CBr-E5, AAV CBr-e5, AAV CBr-E6, AAV CBr-E7, AAV CBr-E8, AAV CHt-1, AAV CHt-2, AAV CHt-3, AAV CHt-6.1, AAV CHt-6.10, AAV CHt-6.5, AAV CHt-6.6, AAV CHt-6.7, AAV CHt-6.8, AAV CHt-P1, AAV CHt-P2, AAV CHt-P5, AAV CHt-P6, AAV CHt-P8, AAV CHt-P9, AAV CKd-1, AAV CKd-10, AAV CKd-2, AAV CKd-3, AAV CKd-4, AAV CKd-6, AAV CKd-7, AAV CKd-8, AAV CKd-B1, AAV CKd-B2, AAV CKd-B3, AAV CKd-B4, AAV CKd-B5, AAV CKd-B6, AAV CKd-B7, AAV CKd-B8, AAV CKd-H1, AAV CKd-H2, AAV CKd-H3, AAV CKd-H4, AAV CKd-H5, AAV CKd-H6, AAV CKd-N3, AAV CKd-N4, AAV CKd-N9, AAV CLg-F1, AAV CLg-F2, AAV CLg-F3, AAV CLg-F4, AAV CLg-F5, AAV CLg-F6, AAV CLg-F7, AAV CLg-F8, AAV CLv-1, AAV CLv1-1, AAV Clv1-10, AAV CLv1-2, AAV CLv-12, AAV CLv1-3, AAV CLv-13, AAV CLv1-4, AAV Clv1-7, AAV Clv1-8, AAV Clv1-9, AAV CLv-2, AAV CLv-3, AAV CLv-4, AAV CLv-6, AAV CLv-8, AAV CLv-D1, AAV CLv-D2, AAV CLv-D3, AAV CLv-D4, AAV CLv-D5, AAV CLv-D6, AAV CLv-D7, AAV CLv-D8, AAV CLv-E1, AAV CLv-K1, AAV CLv-K3, AAV CLv-K6, AAV CLv-L4, AAV CLv-L5, AAV CLv-L6, AAV CLv-M1, AAV CLv-M11, AAV CLv-M2, AAV CLv-M5, AAV CLv-M6, AAV CLv-M7, AAV CLv-M8, AAV CLv-M9, AAV CLv-R1, AAV CLv-R2, AAV CLv-R3, AAV CLv-R4, AAV CLv-R5, AAV CLv-R6, AAV CLv-R7, AAV CLv-R8, AAV CLv-R9, AAV CSp-1, AAV CSp-10, AAV CSp-11, AAV CSp-2, AAV CSp-3, AAV CSp-4, AAV CSp-6, AAV CSp-7, AAV CSp-8, AAV CSp-8.10, AAV CSp-8.2, AAV CSp-8.4, AAV CSp-8.5, AAV CSp-8.6, AAV CSp-8.7, AAV CSp-8.8, AAV CSp-8.9, AAV CSp-9, AAV.hu.48R3, AAV.VR-355, AAV3B, AAV4, AAV5, AAVF1/HSC1, AAVF11/HSC11, AAVF12/HSC12, AAVF13/HSC13, AAVF14/HSC14, AAVF15/HSC15, AAVF16/HSC16, AAVF17/HSC17, AAVF2/HSC2, AAVF3/HSC3, AAVF4/HSC4, AAVF5/HSC5, AAVF6/HSC6, AAVF7/HSC7, AAVF8/HSC8, and/or AAVF9/HSC9 and variants thereof. In some embodiments, the AAV capsid is VOY101, or variant thereof. In some embodiments, the AAV capsid is VOY201, or variant thereof. In some embodiments, the AAV serotype is VOY701, or a variant thereof. In some embodiments, the AAV capsid is VOY801, or variant thereof. In some embodiments, the AAV capsid is VOY1101, or variant thereof.

[0622] In accordance with the present disclosure, methods for increasing expression of a target protein in a cell, tissue, organ or subject are provided; the method comprising administering the cell, tissue, organ or subject an effective amount of the AAV particles comprising a functional payload that comprises a nucleic acid sequence encoding the target protein.

[0623] Accordingly, the target protein may be increased by at least about 10%, preferably by at least about 10%, 30%, 40%, 50%, 60%, 70%, 80%, 85%, 90%, 95% and 100%, or at least 20-30%, 20-40%, 20-50%, 20-60%, 20-70%, 20-80%, 20-90%, 20-95%, 20-100%, 30-40%, 30-50%, 30-60%, 30-70%, 30-80%, 30-90%, 30-95%, 30-100%, 40-50%, 40-60%, 40-70%, 40-80%, 40-90%, 40-95%, 40-100%, 50-60%, 50-70%, 50-80%, 50-90%, 50-95%, 50-100%, 60-70%, 60-80%, 60-90%, 60-95%, 60-100%, 70-80%, 70-90%, 70-95%, 70-100%, 80-90%, 80-95%, 80-100%, 90-95%, 90-100% or 95-100%.

[0624] In some embodiments, the AAV particles, compositions and formulations of the present disclosure may be used to increase the expression of a target protein in a cell of the CNS, such as a neuron, astrocyte and/or oligodendrocyte. In some embodiments, the gene may encode a protein including but not limited to an antibody, Aromatic L-Amino Acid Decarboxylase (AADC), ApoE2, Frataxin, survival motor neuron (SMN) protein, glucocerebrosidase, N-sulfoglucosamine sulfohydrolase, N-acetyl-alpha-glucosaminidase, iduronate 2-sulfatase, alpha-L-iduronidase, palmitoyl-protein thioesterase 1, tripeptidyl peptidase 1, battenin, CLN5, CLN6 (linclin), MFSD8, CLN8, aspartoacylase (ASPA), progranulin (GRN), MeCP2, beta-galactosidase (GLB1) and/or gigaxonin (GAN).

[0625] In some embodiments, AAV particles, compositions and formulations of the present disclosure may be used to decrease, inhibit and suppress the expression of a gene of interest in a cell, tissue, organ or subject. Accordingly, the AAV particles comprise at least one functional payload that encodes siRNA duplexes or dsRNA specific to the target gene of interest.

[0626] In some embodiments, the present disclosure provides methods for inhibiting/silencing target gene expression in a cell. Accordingly, the siRNA duplexes or encoded dsRNA can be used to substantially inhibit target gene expression in a cell, such as but not limited to, astrocytes or microglia, cortical, hippocampal, entorhinal, thalamic, motor or primary sensory neurons. In some aspects, the inhibition of target gene expression refers to an inhibition by at least about 20%, such as by at least about 30%, 40%, 50%, 60%, 70%, 80%, 85%, 90%, 95% and 100%, or at least 20-30%, 20-40%, 20-50%, 20-60%, 20-70%, 20-80%, 20-90%, 20-95%, 20-100%, 30-40%, 30-50%, 30-60%, 30-70%, 30-80%, 30-90%, 30-95%, 30-100%, 40-50%, 40-60%, 40-70%, 40-80%, 40-90%, 40-95%, 40-100%, 50-60%, 50-70%, 50-80%, 50-90%, 50-95%, 50-100%, 60-70%, 60-80%, 60-90%, 60-95%, 60-100%, 70-80%, 70-90%, 70-95%, 70-100%, 80-90%, 80-95%, 80-100%, 90-95%, 90-100% or 95-100%. Accordingly, the protein product of the targeted gene may be inhibited by at least about 20%, preferably by at least about 30%, 40%, 50%, 60%, 70%, 80%, 85%, 90%, 95% and 100%, or at least 20-30%, 20-40%, 20-50%, 20-60%, 20-70%, 20-80%, 20-90%, 20-95%, 20-100%, 30-40%, 30-50%, 30-60%, 30-70%, 30-80%, 30-90%, 30-95%, 30-100%, 40-50%, 40-60%, 40-70%, 40-80%, 40-90%, 40-95%, 40-100%, 50-60%, 50-70%, 50-80%, 50-90%, 50-95%, 50-100%, 60-70%, 60-80%, 60-90%, 60-95%, 60-100%, 70-80%, 70-90%, 70-95%, 70-100%, 80-90%, 80-95%, 80-100%, 90-95%, 90-100% or 95-100%.

[0627] In some embodiments, the genes to be inhibited may include but are not limited to superoxide dismutase 1 (SOD1), chromosome 9 open reading frame 72 (C9ORF72), TAR DNA binding protein (TARDBP), ataxin-3 (ATXN3), huntingtin (HTT), amyloid precursor protein (APP), apolipoprotein E (ApoE), microtubule-associated protein tau (MAPT), alpha-synuclein (SNCA), voltage-gated sodium channel alpha subunit 9 (SCN9A), and/or voltage-gated sodium channel alpha subunit 10 (SCN10A).

### Neurological Disease

[0628] Various neurological diseases may be treated with pharmaceutical compositions, AAV particles, especially blood brain barrier crossing AAV particles of the present disclosure. As a non-limiting example, the neurological disease may be Absence of the Septum Pellucidum, Acid Lipase Disease, Acid Maltase Deficiency, Acquired Epileptiform Aphasia, Acute Disseminated Encephalomyelitis, Attention Deficit-Hyperactivity Disorder (ADHD), Adie's Pupil, Adie's Syndrome, Adrenoleukodystrophy, Agenesis of the Corpus Callosum, Agnosia, Aicardi Syndrome, Aicardi-Goutieres Syndrome Disorder, AIDS—Neurological Complications, Alexander Disease, Alpers' Disease, Alternating Hemiplegia, Alzheimer's Disease, Amyotrophic Lateral Sclerosis (ALS), Anencephaly, Aneurysm, Angelman Syndrome, Angiomatosis, Anoxia, Antiphospholipid Syndrome, Aphasia, Apraxia, Arachnoid Cysts, Arachnoiditis, Arnold-Chiari Malformation, Arteriovenous Malformation, Asperger Syndrome, Ataxia, Ataxia Telangiectasia, Ataxias and Cerebellar or Spinocerebellar Degeneration, Atrial Fibrillation and Stroke, Attention Deficit-Hyperactivity Disorder, Autism Spectrum Disorder, Autonomic Dysfunction, Back Pain, Barth Syndrome, Batten Disease, Becker's Myotonia, Bechet's Disease, Bell's Palsy, Benign Essential Blepharospasm, Benign Focal Amyotrophy, Benign Intracranial Hypertension, Bernhardt-Roth Syndrome, Binswanger's Disease, Blepharospasm, Bloch-Sulzberger Syndrome, Brachial Plexus Birth Injuries, Brachial Plexus Injuries, Bradbury-Eggleston Syndrome, Brain and Spinal Tumors, Brain Aneurysm, Brain Injury, Brown-Sequard Syndrome, Bulbospinal Muscular Atrophy, Cerebral Autosomal Dominant Arteriopathy with Sub-cortical Infarcts and Leukoencephalopathy (CADASIL), Canavan Disease, Carpal Tunnel Syndrome, Causalgia, Cavernomas, Cavernous Angioma, Cavernous Malformation, Central Cervical Cord Syndrome, Central Cord Syndrome, Central Pain Syndrome, Central Pontine Myelinolysis, Cephalic Disorders, Ceramidase Deficiency, Cerebellar Degeneration, Cerebellar Hypoplasia, Cerebral Aneurysms, Cerebral Arteriosclerosis, Cerebral Atrophy, Cerebral Beriberi, Cerebral Cavernous Malformation, Cerebral Gigantism, Cerebral Hypoxia, Cerebral Palsy, Cerebro-Oculo-Facio-Skeletal Syndrome (COFS), Charcot-Marie-Tooth Disease, Chiari Malformation, Cholesterol Ester Storage Disease, Chorea, Choreoacanthocytosis, Chronic Inflammatory Demyelinating Polyneuropathy (CIDP), Chronic Orthostatic Intolerance, Chronic Pain, Cockayne Syndrome Type II, Coffin Lowry Syndrome, Colpocephaly, Coma, Complex Regional Pain Syndrome, Congenital Facial Diplegia, Congenital Myasthenia, Congenital Myopathy, Congenital Vascular Cavernous Malformations, Corticobasal Degeneration, Cranial Arteritis, Craniosynostosis, Cree encephalitis, Creutzfeldt-Jakob Disease, Cumulative Trauma Disorders, Cushing's Syndrome, Cytomegalic Inclusion Body Disease, Cytomegalovirus Infection, Dancing Eyes-Dancing Feet Syndrome, Dandy-Walker Syndrome, Dawson Disease, De Morsier's Syndrome, Dejerine-Klumpke Palsy, Dementia, Dementia—Multi-Infarct, Dementia—Semantic, Dementia—Subcortical, Dementia With Lewy Bodies, Dentate Cerebellar Ataxia, Dentatorubral Atrophy, Dermatomyositis, Developmental Dyspraxia, Devic's Syndrome, Diabetic Neuropathy, Diffuse Sclerosis, Dravet Syndrome, Dysautonomia, Dysgraphia, Dyslexia, Dysphagia, Dyspraxia, Dyssynergia Cerebellaris Myoclonica, Dyssynergia Cerebellaris Progressiva, Dystonias, Early Infantile Epileptic Encephalopathy, Empty Sella Syndrome, Encephalitis, Encephalitis Lethargica, Encephaloceles, Encephalopathy, Encephalopathy (familial infantile), Encephalotrigeminal Angiomatosis, Epilepsy, Epileptic Hemiplegia, Erb's Palsy, Erb-Duchenne and Dejerine-Klumpke Palsies, Essential Tremor, Extrapontine Myelinolysis, Fabry Disease, Fahr's Syndrome, Fainting, Familial Dysautonomia, Familial Hemangioma, Familial Idiopathic Basal Ganglia Calcification, Familial Periodic Paralyses, Familial Spastic Paralysis, Farber's Disease, Febrile Seizures, Fibromuscular Dysplasia, Fisher Syndrome, Floppy Infant Syndrome, Foot Drop, Friedreich's Ataxia, Frontotemporal Dementia, Gaucher Disease, Generalized Gangliosidoses, Gerstmann's Syndrome, Gerstmann-Straussler-Scheinker Disease, Giant Axonal Neuropathy, Giant Cell Arteritis, Giant Cell Inclusion Disease, Globoid Cell Leukodystrophy, Glossopharyngeal Neuralgia, Glycogen Storage Disease, Guillain-Barre Syndrome, Hallervorden-Spatz Disease, Head Injury, Headache, Hemicrania Continua, Hemifacial Spasm, Hemiplegia Alterans, Hereditary Neuropathies, Hereditary Spastic Paraplegia, Heredopathia Atactica Polyneuritiformis, Herpes Zoster, Herpes Zoster Oticus, Hirayama Syndrome, Holmes-Adie syndrome, Holoprosencephaly, HTLV-1 Associated Myelopathy, Hughes Syndrome, Huntington's Disease, Hydranencephaly, Hydrocephalus, Hydrocephalus—Normal Pressure, Hydromyelia, Hypercortisolism, Hypersomnia, Hypertonia, Hypotonia, Hypoxia, Immune-Mediated Encephalomyelitis, Inclusion Body Myositis, Incontinentia Pigmenti, Infantile Hypotonia, Infantile Neuroaxonal Dystrophy, Infantile Phytanic Acid Storage Disease, Infantile Refsum Disease, Infantile Spasms, Inflammatory Myopathies, Iniencephaly, Intestinal Lipodystrophy, Intracranial Cysts, Intracranial Hypertension, Isaacs' Syndrome, Joubert Syndrome, Kearns-Sayre Syndrome, Kennedy's Disease, Kinsbourne syndrome, Kleine-Levin Syndrome, Klippel-Feil Syndrome, Klippel-Trenaunay Syndrome (KTS), Kltver-Bucy Syndrome, Korsakoffs Amnesic Syndrome, Krabbe Disease, Kugelberg-Welander Disease, Kuru, Lambert-Eaton Myasthenic Syndrome, Landau-Kleffner Syndrome, Lateral Femoral Cutaneous Nerve Entrapment, Lateral Medullary Syndrome, Learning Disabilities, Leigh's Disease, Lennox-Gastaut Syndrome, Lesch-Nyhan Syndrome, Leukodystrophy, Levine-Critchley Syndrome, Lewy Body Dementia, Lipid Storage Diseases, Lipoid Proteinosis, Lissencephaly, Locked-In Syndrome, Lou Gehrig's Disease, Lupus—Neurological Sequelae, Lyme Disease—Neurological Complications, Machado-Joseph Disease, Macrencephaly, Megalencephaly, Melkersson-Rosenthal Syndrome, Meningitis, Meningitis and Encephalitis, Menkes Disease, Meralgia Paresthetica, Metachromatic Leukodystrophy, Microcephaly, Migraine, Miller Fisher Syndrome, Mini Stroke, Mitochondrial Myopathy, Moebius Syndrome, Monomelic Amyotrophy, Motor Neuron Diseases, Moyamoya Disease, Mucolipidoses, Mucopolysaccharidoses, Multi-Infarct Dementia, Multifocal Motor Neuropathy, Multiple Sclerosis, Multiple System Atrophy, Multiple System Atrophy with Orthostatic Hypotension, Muscular Dystrophy, Myasthenia—Congenital, Myasthenia Gravis, Myelinoclastic Diffuse Sclerosis, Myoclonic Encephalopathy of Infants, Myoclonus, Myopathy, Myopathy—Congenital, Myopathy—Thyrotoxic, Myotonia, Myotonia Congenita, Narcolepsy, Neuroacanthocytosis, Neurodegeneration with Brain Iron Accumulation, Neurofibromatosis, Neuroleptic Malignant Syndrome, Neurological Complications of AIDS, Neurological Complications of Lyme Disease, Neurological Consequences of Cytomegalovirus Infection, Neurological Manifestations of Pompe Disease, Neurological Sequelae Of Lupus, Neuromyelitis Optica, Neuromyotonia, Neuronal Ceroid Lipofuscinosis, Neuronal Migration Disorders, Neuropathy-Hereditary, Neurosarcoidosis, Neurosyphilis, Neurotoxicity, Nevus Cavernosus, Niemann-Pick Disease, O'Sullivan-McLeod Syndrome, Occipital Neuralgia, Ohtahara Syndrome, Olivopontocerebellar Atrophy, Opsoclonus Myoclonus, Orthostatic Hypotension, Overuse Syndrome, Pain-Chronic, Pantothenate Kinase-Associated Neurodegeneration, Paraneoplastic Syndromes, Paresthesia, Parkinson's Disease, Paroxysmal Choreoathetosis, Paroxysmal Hemicrania, Parry-Romberg, Pelizaeus-Merzbacher Disease, Pena Shokeir II Syndrome, Perineural Cysts, Periodic Paralyses, Peripheral Neuropathy, Periventricular Leukomalacia, Persistent Vegetative State, Pervasive Developmental Disorders, Phytanic Acid Storage Disease, Pick's Disease, Pinched Nerve, Piriformis Syndrome, Pituitary Tumors, Polymyositis, Pompe Disease, Porencephaly, Post-Polio Syndrome, Postherpetic Neuralgia, Postinfectious Encephalomyelitis, Postural Hypotension, Postural Orthostatic Tachycardia Syndrome, Postural Tachycardia Syndrome, Primary Dentatum Atrophy, Primary Lateral Sclerosis, Primary Progressive Aphasia, Prion Diseases, Progressive Hemifacial Atrophy, Progressive Locomotor Ataxia, Progressive Multifocal Leukoencephalopathy, Progressive Sclerosing Poliodystrophy, Progressive Supranuclear Palsy, Prosopagnosia, Pseudo-Torch syndrome, Pseudotoxoplasmosis syndrome, Pseudotumor Cerebri, Psychogenic Movement, Ramsay Hunt Syndrome I, Ramsay Hunt Syndrome II, Rasmussen's Encephalitis, Reflex Sympathetic Dystrophy Syndrome, Refsum Disease, Refsum Disease—Infantile, Repetitive Motion Disorders, Repetitive Stress Injuries, Restless Legs Syndrome, Retrovirus-Associated Myelopathy, Rett Syndrome, Reye's Syndrome, Rheumatic Encephalitis, Riley-Day Syndrome, Sacral Nerve Root Cysts, Saint Vitus Dance, Salivary Gland Disease, Sandhoff Disease, Schilder's Disease, Schizencephaly, Seitelberger Disease, Seizure Disorder, Semantic Dementia, Septo-Optic Dysplasia, Severe Myoclonic Epilepsy of Infancy (SMEI), Shaken Baby Syndrome, Shingles, Shy-Drager Syndrome, Sjogren's Syndrome, Sleep Apnea, Sleeping Sickness, Sotos Syndrome, Spasticity, Spina Bifida, Spinal Cord Infarction, Spinal Cord Injury, Spinal Cord Tumors, Spinal Muscular Atrophy, Spinocerebellar Atrophy, Spinocerebellar Degeneration, Steele-Richardson-Olszewski Syndrome, Stiff-Person Syndrome, Striatonigral Degeneration, Stroke, Sturge-Weber Syndrome, Subacute Sclerosing Panencephalitis, Subcortical Arteriosclerotic Encephalopathy, Short-lasting, Unilateral, Neuralgiform (SUNCT) Headache, Swallowing Disorders, Sydenham Chorea, Syncope, Syphilitic Spinal Sclerosis, Syringohydromyelia, Syringomyelia, Systemic Lupus Erythematosus, Tabes Dorsalis, Tardive Dyskinesia, Tarlov Cysts, Tay-Sachs Disease, Temporal Arteritis, Tethered Spinal Cord Syndrome, Thomsen's Myotonia, Thoracic Outlet Syndrome, Thyrotoxic Myopathy, Tic Douloureux, Todd's Paralysis, Tourette Syndrome, Transient Ischemic Attack, Transmissible Spongiform Encephalopathies, Transverse Myelitis, Traumatic Brain Injury, Tremor, Trigeminal Neuralgia, Tropical Spastic Paraparesis, Troyer Syndrome, Tuberous Sclerosis, Vascular Erectile Tumor, Vasculitis Syndromes of the Central and Peripheral Nervous Systems, Von Economo's Disease, Von Hippel-Lindau Disease (VHL), Von Recklinghausen's Disease, Wallenberg's Syndrome, Werdnig-Hoffman Disease, Wernicke-Korsakoff Syndrome, West Syndrome, Whiplash, Whipple's Disease, Williams Syndrome, Wilson Disease, Wolman's Disease, X-Linked Spinal and Bulbar Muscular Atrophy.

[0629] The present disclosure additionally provides a method for treating neurological disorders in a mammalian subject, including a human subject, comprising administering to the subject a pharmaceutically effective amount of any of the AAV particles or pharmaceutical compositions described herein. In some embodiments, the AAV particle is a blood brain barrier crossing particle. In some embodiments, neurological disorders treated according to the methods described herein include, but are not limited to, tauopathies, Alzheimer's disease (AD), Amyotrophic lateral sclerosis (ALS), Huntington's Disease (HD), Parkinson's Disease (PD), and/or Friedreich's Ataxia (FA). In some embodiments, at least one symptom of neurological disorders in the subject is ameliorated and/or treated.

[0630] The present disclosure provides a method for administering to a subject in need thereof, including a human subject, a therapeutically effective amount of the AAV particles of the disclosure to slow, stop or reverse disease progression. As a non-limiting example, disease progression may be measured by tests or diagnostic tool(s) known to those skilled in the art. As another non-limiting example, disease progression may be measured by change in the pathological features of the brain, CSF or other tissues of the subject.

[0631] In some embodiments, the AAV particle comprising a payload region having a nucleic acid sequence encoding a target protein may be administered to the subject in need for treating and/or ameliorating a neurological disorder.

[0632] In some embodiments, the AAV particle comprising a payload region having the nucleic acid sequence encoding at least one siRNA duplex or dsRNA targeting a gene of interest may be administered to the subject in need for treating and/or ameliorating a neurological disorder.

[0633] In some embodiments, the AAV particle used for treating neurological disorders may have a serotype including a capsid and/or a peptide insert such as but not limited to VOY101, VOY201, VOY701, VOY801, VOY1101, AAVPHP.B (PHP.B), AAVPHP.A (PHP.A), AAVG2B-26, AAVG2B-13, AAVTH1.1-32, AAVTH1.1-35, AAVPHP.B2 (PHP.B2), AAVPHP.B3 (PHP.B3), AAVPHP.N/PHP.B-DGT, AAVPHP.B-EST, AAVPHP.B-GGT, AAVPHP.B-ATP, AAVPHP.B-ATT-T, AAVPHP.B-DGT-T, AAVPHP.B-GGT-T, AAVPHP.B-SGS, AAVPHP.B-AQP, AAVPHP.B-QQP, AAVPHP.B-SNP(3), AAVPHP.B-SNP, AAVPHP.B-QGT, AAVPHP.B-NQT, AAVPHP.B-EGS, AAVPHP.B-SGN, AAVPHP.B-EGT, AAVPHP.B-DST, AAVPHP.B-DST, AAVPHP.B-STP, AAVPHP.B-PQP, AAVPHP.B-SQP, AAVPHP.B-QLP, AAVPHP.B-TMP, AAVPHP.B-TTP, AAVPHP.S/G2A12, AAVG2A15/G2A3 (G2A3), AAVG2B4 (G2B4), AAVG2B5, PHP.S, AAV1, AAV2, AAV2G9, AAV3, AAV3a, AAV3b, AAV3-3, AAV4, AAV4-4, AAV5, AAV6, AAV6.1, AAV6.2, AAV6.1.2, AAV7, AAV7.2, AAV8, AAV9, AAV9.11, AAV9.13, AAV9.16, AAV9.24, AAV9.45, AAV9.47, AAV9.61, AAV9.68, AAV9.84, AAV9.9, AAV10, AAV11, AAV12, AAV16.3, AAV24.1, AAV27.3, AAV42.12, AAV42-1b, AAV42-2, AAV42-3a, AAV42-3b, AAV42-4, AAV42-5a, AAV42-5b, AAV42-6b, AAV42-8, AAV42-10, AAV42-11, AAV42-12, AAV42-13, AAV42-15, AAV42-aa, AAV43-1, AAV43-12, AAV43-20, AAV43-21, AAV43-23, AAV43-25, AAV43-5, AAV44.1, AAV44.2, AAV44.5, AAV223.1, AAV223.2, AAV223.4, AAV223.5, AAV223.6, AAV223.7, AAV1-7/rh.48, AAV1-8/rh.49, AAV2-15/rh.62, AAV2-3/rh.61, AAV2-4/rh.50, AAV2-5/rh.51, AAV3.1/hu.6, AAV3.1/hu.9, AAV3-9/rh.52, AAV3-11/rh.53, AAV4-8/r11.64, AAV4-9/rh.54, AAV4-19/rh.55, AAV5-3/rh.57, AAV5-22/rh.58, AAV7.3/hu.7, AAV16.8/hu.10, AAV16.12/hu.11, AAV29.3/bb.1, AAV29.5/bb.2, AAV106.1/hu.37, AAV114.3/hu.40, AAV127.2/hu.41, AAV127.5/hu.42, AAV128.3/hu.44, AAV130.4/hu.48, AAV145.1/hu.53, AAV145.5/hu.54, AAV145.6/hu.55, AAV161.10/hu.60, AAV161.6/hu.61, AAV33.12/hu.17, AAV33.4/hu.15, AAV33.8/hu.16, AAV52/hu.19, AAV52.1/hu.20, AAV58.2/hu.25, AAVA3.3, AAVA3.4, AAVA3.5, AAVA3.7, AAVC1, AAVC2, AAVC5, AAV-DJ, AAV-DJ8, AAVF3, AAVF5, AAVH2, AAVrh.72, AAVhu.8, AAVrh.68, AAVrh.70, AAVpi.1, AAVpi.3, AAVpi.2, AAVrh.60, AAVrh.44, AAVrh.65, AAVrh.55, AAVrh.47, AAVrh.69, AAVrh.45, AAVrh.59, AAVhu.12, AAVH6, AAVLK03, AAVH-1/hu.1, AAVH-5/hu.3, AAVLG-10/rh.40, AAVLG-4/rh.38, AAVLG-9/hu.39, AAVN721-8/rh.43, AAVCh.5, AAVCh.5R1, AAVcy.2, AAVcy.3, AAVcy.4, AAVcy.5, AAVCy.5R1, AAVCy.5R2, AAVCy.5R3, AAVCy.5R4, AAVcy.6, AAVhu.1, AAVhu.2, AAVhu.3, AAVhu.4, AAVhu.5, AAVhu.6, AAVhu.7, AAVhu.9, AAVhu.10, AAVhu.11, AAVhu.13, AAVhu.15, AAVhu.16, AAVhu.17, AAVhu.18, AAVhu.20, AAVhu.21, AAVhu.22, AAVhu.23.2, AAVhu.24, AAVhu.25, AAVhu.27, AAVhu.28, AAVhu.29, AAVhu.29R, AAVhu.31, AAVhu.32, AAVhu.34, AAVhu.35, AAVhu.37, AAVhu.39, AAVhu.40, AAVhu.41, AAVhu.42, AAVhu.43, AAVhu.44, AAVhu.44R1, AAVhu.44R2, AAVhu.44R3, AAVhu.45, AAVhu.46, AAVhu.47, AAVhu.48, AAVhu.48R1, AAVhu.48R2, AAVhu.48R3, AAVhu.49, AAVhu.51, AAVhu.52, AAVhu.54, AAVhu.55, AAVhu.56, AAVhu.57, AAVhu.58, AAVhu.60, AAVhu.61, AAVhu.63, AAVhu.64, AAVhu.66, AAVhu.67, AAVhu.14/9, AAVhu.t 19, AAVrh.2, AAVrh.2R, AAVrh.8, AAVrh.8R, AAVrh.10, AAVrh.12, AAVrh.13, AAVrh.13R, AAVrh.14, AAVrh.17, AAVrh.18, AAVrh.19, AAVrh.20, AAVrh.21, AAVrh.22, AAVrh.23, AAVrh.24, AAVrh.25, AAVrh.31, AAVrh.32, AAVrh.33, AAVrh.34, AAVrh.35, AAVrh.36, AAVrh.37, AAVrh.37R2, AAVrh.38, AAVrh.39, AAVrh.40, AAVrh.46, AAVrh.48, AAVrh.48.1, AAVrh.48.1.2, AAVrh.48.2, AAVrh.49, AAVrh.51, AAVrh.52, AAVrh.53, AAVrh.54, AAVrh.56, AAVrh.57, AAVrh.58, AAVrh.61, AAVrh.64, AAVrh.64R1, AAVrh.64R2, AAVrh.67, AAVrh.73, AAVrh.74, AAVrh8R, AAVrh8R A586R mutant, AAVrh8R R533A mutant, AAAV, BAAV, caprine AAV, bovine AAV, AAVhE1.1, AAVhEr1.5, AAVhER1.14, AAVhEr1.8, AAVhEr1.16, AAVhEr1.18, AAVhEr1.35, AAVhEr1.7, AAVhEr1.36, AAVhEr2.29, AAVhEr2.4, AAVhEr2.16, AAVhEr2.30, AAVhEr2.31, AAVhEr2.36, AAVhER1.23, AAVhEr3.1, AAV2.5T, AAV-PAEC, AAV-LK01, AAV-LK02, AAV-LK03, AAV-LK04, AAV-LK05, AAV-LK06, AAV-LK07, AAV-LK08, AAV-LK09, AAV-LK10, AAV-LK11, AAV-LK12, AAV-LK13, AAV-LK14, AAV-LK15, AAV-LK16, AAV-LK17, AAV-LK18, AAV-LK19, AAV-PAEC2, AAV-PAEC4, AAV-PAEC6, AAV-PAEC7, AAV-PAEC8, AAV-PAEC11, AAV-PAEC12, AAV-2-pre-miRNA-101, AAV-8h, AAV-8b, AAV-h, AAV-b, AAV SM 10-2, AAV Shuffle 100-1, AAV Shuffle 100-3, AAV Shuffle 100-7, AAV Shuffle 10-2, AAV Shuffle 10-6, AAV Shuffle 10-8, AAV Shuffle 100-2, AAV SM 10-1, AAV SM 10-8, AAV SM 100-3, AAV SM 100-10, BNP61 AAV, BNP62 AAV, BNP63 AAV, AAVrh.50, AAVrh.43, AAVrh.62, AAVrh.48, AAVhu.19, AAVhu.11, AAVhu.53, AAV4-8/rh.64, AAVLG-9/hu.39, AAV54.5/hu.23, AAV54.2/hu.22, AAV54.7/hu.24, AAV54.1/hu.21, AAV54.4R/hu.27, AAV46.2/hu.28, AAV46.6/hu.29, AAV128.1/hu.43, true type AAV (ttAAV), UPENN AAV 10, Japanese AAV 10 serotypes, AAV CBr-7.1, AAV CBr-7.10, AAV CBr-7.2, AAV CBr-7.3, AAV CBr-7.4, AAV CBr-7.5, AAV CBr-7.7, AAV CBr-7.8, AAV CBr-B7.3, AAV CBr-B7.4, AAV CBr-E1, AAV CBr-E2, AAV CBr-E3, AAV CBr-E4, AAV CBr-E5, AAV CBr-e5, AAV CBr-E6, AAV CBr-E7, AAV CBr-E8, AAV CHt-1, AAV CHt-2, AAV CHt-3, AAV CHt-6.1, AAV CHt-6.10, AAV CHt-6.5, AAV CHt-6.6, AAV CHt-6.7, AAV CHt-6.8, AAV CHt-P1, AAV CHt-P2, AAV CHt-P5, AAV CHt-P6, AAV CHt-P8, AAV CHt-P9, AAV CKd-1, AAV CKd-10, AAV CKd-2, AAV CKd-3, AAV CKd-4, AAV CKd-6, AAV CKd-7, AAV CKd-8, AAV CKd-B1, AAV CKd-B2, AAV CKd-B3, AAV CKd-B4, AAV CKd-B5, AAV CKd-B6, AAV CKd-B7, AAV CKd-B8, AAV CKd-H1, AAV CKd-H2, AAV CKd-H3, AAV CKd-H4, AAV CKd-H5, AAV CKd-H6, AAV CKd-N3, AAV CKd-N4, AAV CKd-N9, AAV CLg-F1, AAV CLg-F2, AAV CLg-F3, AAV CLg-F4, AAV CLg-F5, AAV CLg-F6, AAV CLg-F7, AAV CLg-F8, AAV CLv-1, AAV CLv1-1, AAV Clv1-10, AAV CLv1-2, AAV CLv-12, AAV CLv1-3, AAV CLv-13, AAV CLv1-4, AAV Clv1-7, AAV Clv1-8, AAV Clv1-9, AAV CLv-2, AAV CLv-3, AAV CLv-4, AAV CLv-6, AAV CLv-8, AAV CLv-D1, AAV CLv-D2, AAV CLv-D3, AAV CLv-D4, AAV CLv-D5, AAV CLv-D6, AAV CLv-D7, AAV CLv-D8, AAV CLv-E1, AAV CLv-K1, AAV CLv-K3, AAV CLv-K6, AAV CLv-L4, AAV CLv-L5, AAV CLv-L6, AAV CLv-M1, AAV CLv-M11, AAV CLv-M2, AAV CLv-M5, AAV CLv-M6, AAV CLv-M7, AAV CLv-M8, AAV CLv-M9, AAV CLv-R1, AAV CLv-R2, AAV CLv-R3, AAV CLv-R4, AAV CLv-R5, AAV CLv-R6, AAV CLv-R7, AAV CLv-R8, AAV CLv-R9, AAV CSp-1, AAV CSp-10, AAV CSp-11, AAV CSp-2, AAV CSp-3, AAV CSp-4, AAV CSp-6, AAV CSp-7, AAV CSp-8, AAV CSp-8.10, AAV CSp-8.2, AAV CSp-8.4, AAV CSp-8.5, AAV CSp-8.6, AAV CSp-8.7, AAV CSp-8.8, AAV CSp-8.9, AAV CSp-9, AAV.hu.48R3, AAV.VR-355, AAV3B, AAV4, AAV5, AAVF1/HSC1, AAVF11/HSC11, AAVF12/HSC12, AAVF13/HSC13, AAVF14/HSC14, AAVF15/HSC15, AAVF16/HSC16, AAVF17/HSC17, AAVF2/HSC2, AAVF3/HSC3, AAVF4/HSC4, AAVF5/HSC5, AAVF6/HSC6, AAVF7/HSC7, AAVF8/HSC8, and/or AAVF9/HSC9 and variants thereof.

[0634] In some embodiments, the AAV particles for treating neurological disorders in the subject comprise the VOY101 capsid. In some embodiments, the VOY101 capsid comprises the amino acid sequence of SEQ ID NO. 1. In some embodiments, the VOY101 capsid comprises the nucleic acid sequence of SEQ ID NO. 1800 or 1809.

[0635] In some embodiments, the AAV particles for treating neurological disorders in the subject comprise the VOY201 capsid. In some embodiments, the VOY201 capsid comprises the amino acid sequence of SEQ ID NO. 1823. In some embodiments, the VOY201 capsid comprises the nucleic acid sequence of SEQ ID NO. 1810.

[0636] In some embodiments, the AAV particles for treating neurological disorders in the subject comprise the VOY701 capsid. In some embodiments, the VOY701 capsid comprises the nucleic acid sequence of SEQ ID NO. 1828. In some embodiments, the VOY701 capsid comprises the amino acid sequence of SEQ ID NO. 1829.

[0637] In some embodiments, the AAV particles for treating neurological disorders in the subject comprise the VOY801 capsid. In some embodiments, the VOY801 capsid comprises the nucleic acid sequence of SEQ ID NO. 1824.

[0638] In some embodiments, the AAV particles for treating neurological disorders in the subject comprise the VOY1101 capsid. In some embodiments, the VOY1101 capsid comprises the nucleic acid sequence of SEQ ID NO. 1825.

[0639] In some embodiments, the AAV particles comprising payloads for treating neurological disorders such as siRNA molecules may be introduced directly into the central nervous system of the subject, for example, by infusion into the putamen.

[0640] In some embodiments, the AAV particles comprising payloads for treating neurological disorders such as siRNA molecules may be introduced directly into the central nervous system of the subject, for example, by infusion to the thalamus a subject.

[0641] In some embodiments, the AAV particles comprising payloads for treating neurological disorders such as siRNA molecules may be introduced directly into the central nervous system of the subject, for example, by infusion to the white matter a subject. In some embodiments, the AAV particles comprising payloads for treating neurological disorders such as siRNA molecules may be introduced to the central nervous system of the subject, for example, by intravenous administration to a subject.

[0642] In some embodiments, the pharmaceutical composition comprising the AAV particles described herein is used as a solo therapy. In other embodiments, the pharmaceutical composition comprising the AAV particles described herein is used in combination therapy. As a non-limiting example, the combination therapy may be in combination with one or more neuroprotective agents such as small molecule compounds, growth factors and hormones which have been tested for their neuroprotective effect on motor neuron degeneration.

### Tauopathies

[0643] Tauopathies are a group of neurodegenerative diseases characterized by the dysfunction and/or aggregation of the microtubule associated protein tau. Tau is normally a very soluble protein known to associate with microtubules based on the extent of its phosphorylation. Tau is considered a critical component of intracellular trafficking processes, particularly in neuronal cells, given their unique structure. Hyperphosphorylation of tau depresses its binding to microtubules and microtubule assembly activity. Further, hyperphosphorylation of tau renders it prone to misfolding and aggregation. In tauopathies, the tau becomes hyperphosphorylated, misfolds and aggregates as NFT of paired helical filaments (PHF), twisted ribbons or straight filaments. These NFT are largely considered indicative of impending neuronal cell death and thought to contribute to widespread neuronal cell loss, leading to a variety of behavioral and cognitive deficits.

[0644] The first genetically defined tauopathy was described when mutations in the tau gene were shown to lead to an autosomal dominantly inherited tauopathy known as frontotemporal dementia and parkinsonism linked to chromosome 17 (FTDP-17). This was the first causal evidence that changes in tau could lead to neurodegenerative changes in the brain. These molecules are considered to be more amyloidogenic, meaning they are more likely to become hyperphosphorylated and more likely to aggregate into NFT (Hutton, M. et al., 1998, Nature 393(6686):702-5).

[0645] Other known tauopathies include, but are not limited to, Alzheimer's disease (AD), frontotemporal dementia (FTD), Frontotemporal lobar degeneration (FTLD), chronic traumatic encephalopathy (CTE), Progressive Supranuclear Palsy (PSP), Down's syndrome, Pick's disease, Corticobasal degeneration (CBD), Amyotrophic lateral sclerosis (ALS), Prion diseases, Creutzfeldt-Jakob disease (CJD), Multiple system atrophy, Tangle-only dementia, and Progressive subcortical gliosis.

[0646] Though tauopathies are predominantly associated with tau protein malfunction and aggregation, much like in AD, ApoE is also considered to play a role in the pathogenesis of this group of diseases. ApoE, a cholesterol trafficking molecule, was first suspected to have a role in tauopathy when it was discovered that NFT are also immunoreactive for ApoE. Investigation of the correlations between tau and ApoE in tauopathies have shown contradictory results but suggest a link between ApoE4 and increased NFT load. However, the correlation to cognitive decline has not been shown. Work in this area is still actively being pursued.

[0647] Treatments for tauopathies have yet to be identified, though some symptomatic relief may be provided. Delivery of AAV particles described herein may be used to treat subjects suffering from tauopathy. In some cases, methods of the present disclosure may be used to treat subjects suspected of developing a tauopathy. Delivery of AAV particles may result in decreased accumulation of NFT. Further, these decreases in NFT load may or may not be associated with improvements in cognitive, language or behavioral arenas.

[0648] In some embodiments, delivery of AAV particles of the disclosure, comprising ApoE2, ApoE3 or ApoE4 polynucleotides, may be used to treat subjects suffering from tauopathy.

[0649] In some embodiments, delivery of AAV particles of the disclosure comprising modulatory polynucleotides for the silencing of ApoE2, ApoE3 or ApoE4 gene and/or protein expression may be used to treat subjects suffering from tauopathy.

[0650] In some embodiments, delivery of AAV particles of the disclosure comprising modulatory polynucleotides for the silencing of tau gene and/or protein expression may be used to treat subjects suffering from tauopathy. In some embodiments, the modulatory polynucleotides are siRNA duplexes or nucleic acids encoding siRNA duplexes or encoded dsRNA.

[0651] In some embodiments, delivery of AAV particles of the disclosure comprising a nucleic acid encoding an anti-tau antibody may be used to treat subjects suffering from tauopathy.

[0652] In some embodiments, the compositions described herein are used in combination with one or more known or exploratory treatments for tauopathy. Non-limiting examples of such treatments include inhibitors of tau aggregation, such as Methylene blue, phenothiazines, anthraquinones, n-phenylamines or rhodamines, microtubule stabilizers such as NAP, taxol or paclitaxel, kinase or phosphatase inhibitors such as those targeting GSK3β (lithium) or PP2A, and/or immunization with tau phospho-epitopes or treatment with anti-tau antibodies.

### Alzheimer's Disease

[0653] Alzheimer Disease (AD) is a debilitating neurodegenerative disease and the leading cause of dementia in the elderly today, currently afflicting an estimated 5 million people in the United States and more than 35 million people worldwide. AD is largely a disease of extreme forgetfulness, wherein the ability to lead a normal life is incredibly impaired. Clinical manifestations of the disease include progressive declines in memory, executive function (decision making) and language. Individuals with AD often die from secondary illnesses such as cachexia, pneumonia or sepsis.

[0654] AD is likely the most well-known tauopathy, though it is often characterized as an amyloid based disorder. The AD brain is characterized by the presence of two forms of pathological aggregates, the extracellular plaques composed of β-amyloid (Aβ) and the intracellular neurofibrillary tangles (NFT) comprised of hyperphosphorylated microtubule associated protein tau. Based on early genetic findings, β-amyloid alterations were thought to initiate disease, with changes in tau considered downstream. For this reason, most clinical trials have been Aβ-centric.

[0655] In addition to the traditional hallmarks of the disease (A3 and tau), apolipoprotein E has proven to be an important risk factor in the pathogenesis of late onset AD (the form of AD that is not genetically linked to alterations in Aβ processing or production and accounts for 99% of the AD population). ApoE, like other apolipoproteins, contributes to the structure of specific lipoprotein particles and directs lipoprotein trafficking to specific cell surface receptors, and is an important cholesterol transporter. ApoE is expressed in a variety of cell types with highest expression levels evident in the liver and brain. In the brain, ApoE is predominantly expressed in astrocytes and microglia, and is thought to contribute to maintenance of synaptic connections and synaptogenesis. ApoE is thought to contribute to AD pathogenesis through its roles in the blood brain barrier, the innate immune system, synaptic function and accumulation of Aβ.

[0656] The three most common variants of ApoE are ApoE2, ApoE3 and ApoE4, with ApoE2 and ApoE4 carrying differential risks associated with development of AD. ApoE2 is considered to be a protective allele, decreasing risk of AD and delaying the age of onset, whereas ApoE4 has the opposite effect, significantly increasing risk of developing AD and reducing the age of onset of disease. Further, ApoE2 is associated with a decreased burden of accumulated A3, whereas ApoE4 is associated with increased Aβ load.

[0657] Early onset forms of AD (before 65 years, which accounts for <5% of AD cases), may be caused by familial mutations in amyloid beta precursor protein (APP), presenilin 1 (PS1 or PSEN1) or presenilin 2 (PS2 or PSEN2). Common symptoms include progressive decline in memory, executive function, language, and other areas of cognition. These symptoms are often caused by amyloid plaques and/or neurofibrillary tangles in the brain, neuronal loss, synaptic loss, brain atrophy, and/or inflammation.

[0658] Symptomatic treatments for AD have been available for many years, but none are able to alter the course of the disease. Delivery of AAV particles described herein may be used to treat subjects suffering from AD and other tauopathies. In some cases, methods of the present disclosure may be used to treat subjects suspected of developing AD or other tauopathies. Delivery of AAV particles may result in decreased A3 burden both in the brain and in the cardiovascular system of the subject or in decreased accumulation of NFT. Further, these decreases in A3 or NFT load, may or may not be associated with improvements in cognitive, language or behavioral arenas.

[0659] In some embodiments, delivery of AAV particles of the disclosure, comprising ApoE2, ApoE3 or ApoE4 polynucleotides, may be used to treat subjects suffering from AD and other tauopathies.

[0660] In some embodiments, delivery of AAV particles of the disclosure comprising modulatory polynucleotides for the silencing of the ApoE2, ApoE3 or ApoE4 gene and/or protein may be used to treat subjects suffering from AD and other tauopathies.

[0661] In some embodiments, delivery of AAV particles of the disclosure comprising modulatory polynucleotides for the silencing of the tau gene and/or protein may be used to treat subjects suffering from AD and other tauopathies. In some embodiments, the modulatory polynucleotides are siRNA duplexes or nucleic acids encoding siRNA duplexes or encoded dsRNA.

[0662] In some embodiments, delivery of AAV particles of the disclosure comprising a nucleic acid encoding an anti-tau antibody may be used to treat subjects suffering from AD and other tauopathies.

[0663] In some embodiments, the compositions described herein are used in combination with one or more known or exploratory treatments for AD or tauopathy. Non-limiting examples of such treatments include cholinesterase inhibitors (donepezil, rivastigmine, galantamine), NMDA receptor antagonists such as memantine, anti-psychotics, anti-depressants, anti-convulsants, secretase inhibitors, amyloid aggregation inhibitors, copper or zinc modulators, BACE inhibitors, inhibitors of tau aggregation, such as Methylene blue, phenothiazines, anthraquinones, n-phenylamines or rhodamines, microtubule stabilizers such as NAP, taxol or paclitaxel, kinase or phosphatase inhibitors such as those targeting GSK3β (lithium) or PP2A, and/or immunization with Aβ peptides or tau phospho-epitopes or treatment with anti-tau or anti-amyloid antibodies.

[0664] In some embodiments, the compositions described herein are evaluated using mammalian models, such as, but not limited to, mouse models of tauopathy and/or Alzheimer's Disease. A great number of mouse models are available that mimic the phenotypes of tauopathies and/or Alzheimer's Disease. However, no existing mouse model exhibits all features of human tauopathies and/or Alzheimer's Disease. Therefore, in some cases, more than one mouse model, or a mouse model cross of one or more of these models, may be used to evaluate the activities of the compositions of the present disclosure. Exemplary mouse models of tauopathies and/or Alzheimer's Disease include, but are not limited to, 3XTg-AD, 5XFAD, J20, Tg-SwDI, Tg-SwDI/Nos2, Tg2576, R1.40, APPPS1, APP23, PDAPP, APP NL-G-F, TgCRND8, TASD-41, BRI-AP42A, PSAPP (Tg2576xPS1), APPswe/PSEN1dE9, 2xKI, TAPP (Tg2576xJNPL3), hTau, PS1M146V, rTg4510, rTg4510xCamk2a-tTA, PS19, rTg4510xNop-tTA, GFAP-apoE4, Apoe^{tm3(APOE*4)}, APP.PS1/TRE4 and ApoE knock-out or knock-in mouse lines. (See Onos et al., Brain Res Bull. 2016; 122:1-11; Hall and Roberson., Brain Res Bull. 2012; 88(1): 3-12; Elder et al., Mt Sinai J Med. 2010; 77(1): 69-81, the contents of which are herein incorporated by reference in their entirety).

[0665] Tau transgenic mouse models overexpress wild-type or mutant human tau protein. More than 20 lines have been generated that contain different tau mutations (See Table 2 of Denk and Wade-Martins, Neurobiol Aging. 2009; 30(1): 1-13, the contents of which are herein incorporated by reference in their entirety). These are mutations present in patients with tauopathies and/or Alzheimer's Disease, including G272V, P301L, P301S, N297K, V337M, and R406W. The P301S transgenic mice express the human tau protein containing the P301S mutation. One P301S model (4R/0N tau under the control of the Thy1.2 promoter), created by Allen et al., exhibits similar characteristics to human tauopathies including filament accumulation of hyperphosphorylated tau, neuronal degeneration, and neuroinflammation. In addition, these mice develop a pronounced motor phenotype by 5-6 months of age (Allen et al., J Neurosci. 2002; 22(21):9340-51; Bellucci et al., Am J Pathol. 2004; 165(5):1643-52, the contents of which are herein incorporated by reference in their entirety). Another P301S mouse line (4R/1N tau under the control of the mouse prion promoter), created by Yoshiyama et al., displays hippocampal synapse loss, impaired synaptic function and concomitant microglial activation by 3-6 months of age. The animals also showed pathological hyperphosphorylated tau accumulations, neuronal loss, as well as hippocampal and entorhinal cortical atrophy by 9-12 months of age (Yoshiyama et al., Neuron. 2007; 53(3):337-51, the contents of which are herein incorporated by reference in their entirety).

[0666] APOE knock-in mice express human isoforms of APOE. In some cases, the human APOE genes were engineered in to replace the endogenous mouse APOE alleles (targeted replacement). These targeted placement (TR) models of ApoE2, ApoE3 or ApoE4 were developed in the laboratory of Nobuya Maeda (Sullivan et al., J Clin Invest. 1998; 102(1):130-5; Sullivan et al., J Biol Chem. 1997; 272(29):17972-80; Knouff et al., J Clin Invest. 1999; 103(11):1579-86, the contents of which are herein incorporated by reference in their entirety) and characterized in many studies. The ApoE TR mice differ on spatial memory performance and avoidance behavior. ApoE4-TR mice show cognitive and synaptic plasticity impairment compared to ApoE3-TR mice. In addition, ApoE4-TR mice exhibit anatomical and functional abnormalities in the hippocampus and the amygdala (Grootendorst, Behav Brain Res. 2005; 159(1):1-14; Bour et al., Behav Brain Res. 2008; 193(2):174-82, the contents of which are herein incorporated by reference in their entirety).

[0667] In some embodiments, an AAV-ApoE2 particle may be administered to PDAPP or APP.PS1/TRE4 mice as described in Zhao et al 2016 Neurobiol Aging 159-172, the contents of which are herein incorporated by reference in their entirety. Intracerebral or intrathalamic administration of AAV-ApoE2 (AAV9-CAG-APOE2 or AAVrh.10-CAG-APOE2) showed significant decreases in brain Aβ (oligomeric, soluble and insoluble), amyloid deposition and amyloid pathology, as determined by immunohistochemistry, ELISA or Western blot. More specifically, AAV preparations (2 μL, 1.0×10¹⁰ vg) were bilaterally injected by stereotactic surgery into either the hippocampus or the thalamus of adult mice at a rate of 0.2 μL/min and allowed to express for 8 weeks prior to tissue collection for post-mortem analysis. Lower doses of AAV-ApoE2, or delivery at a late stage of pathology, proved to be less effective.

### Frontotemporal Dementia (FTD)

[0668] Frontotemporal Dementia (FTD), also known as frontotemporal degenerations or Pick's disease, refers to a group of disorders which are caused by progressive nerve cell loss in the brain. This nerve cell loss can cause a loss of unction in the frontal and/or temporal lobes of the brain. There are about 45,000 people in the United States who have FTD and the majority are between 45 and 65.

[0669] There are three subtypes of FTD, behavior variant frontotemporal dementia (bvFTD), primary progressive aphasia (PPA) and disturbances of motor function. Subjects with bvFTD tend to have major changes in personality, interpersonal relationships and conduct and the nerve loss is most prominent in areas that control conduct, empathy, foresight, and judgment. PPA affects language skills, speaking, writing, and comprehension. Both bvFTD and PPA are less common than AD in those over the age of 65, however bvFTD and PPA are nearly as common as AD in those between 45 and 65.

[0670] A mutation of tau is genetically associated with those subjects who have FTD.

### Amyotrophic Lateral Sclerosis (ALS)

[0671] Amyotrophic Lateral Sclerosis (ALS), also known as Lou Gehrig's disease or classical motor neuron disease, is a rapidly progressive and fatal neurological disease. ALS is associated with cell degeneration and death of upper and lower motor neurons, leading to disablement of muscle movement, weakening, wasting and loss of control over voluntary muscle movement. Early symptoms include muscle weakness of hands, legs and swallowing muscles, eventually progressing to inability to breathe due to diaphragm failure. According to Centers for Disease Control and Prevention (CDC), ALS affects an estimated 12,000-15,000 individuals in the US. About 5-10% of cases are familial.

[0672] ALS, as other non-infectious neurodegenerative diseases, has been characterized by presence of misfolded proteins, including, but not limited to, tau, C9orf72, TARDBP. or SOD1 (superoxide dismutase 1 protein), and myelin associated inhibitors and their receptors, (see, e.g., Krishnamurthy and Sigurdsson, 2011, N Biotechnol. 28(5):511-7, and Musaro, 2013, FEBS J.; 280(17):4315-22, Freibaum and Taylor, 2017, Front Mol Neurosci. 10(35):1-9, and references therein). Familial ALS has been associated with mutations of TAR DNA-binding protein 43 (TDP-43) and RNA-binding protein FUS/TLS. Some proteins have been identified to slow down progression of ALS, such as, but not limited, to growth factors, e.g. insulin-like growth factor 1 (IGF-1), glial cell line-derived growth factor, brain-derived growth factor, vascular endothelial growth factor and ciliary neurotrophic factor, or growth factors promoting muscle growth, e.g. myostatin.

[0673] As of today, there is no prevention or cure for ALS. FDA approved drug niluzole has been approved to prolong life expectancy, but does not have an effect on symptoms. Additionally, drugs and medical devices are available to tolerate pain and attacks associated with ALS. There remains a need for therapy affecting the underlying pathophysiology.

[0674] In some embodiment, methods of the present disclosure may be used to treat subjects suffering from ALS. In some cases, methods of the present disclosure may be used to treat subjects suspected of developing ALS.

[0675] AAV Particles and methods of using the AAV particles described in the present disclosure may be used to prevent, manage and/or treat ALS. As non-limiting examples, the AAV particles described herein may be used for the treatment, prevention or management of ALS and/or may comprise modulatory polynucleotides targeting SOD1, C9orf72, TARDBP and/or Tau.

### Huntington's Disease

[0676] Huntington's disease (HD) is a rare, inherited disorder causing degeneration of neurons in the motor control region of the brain, as well as other areas. Typical symptoms of the disease include uncontrolled movements (chorea), abnormal postures, impaired coordination, slurred speech and difficulty of feeding and swallowing accompanied by changes in behavior, judgment and cognition. HD is caused by mutations in the gene associated with the huntingtin (HTT) protein. The mutation causes the (CAG) blocks of DNA to repeat abnormally. HD affects approximately 30,000 individuals in the US.

[0677] HD is characterized by mutations of the huntingtin (HTT) protein with abnormal expansions of polyglutamine tracts, e.g. expansion of the length of glutamine residues encoded by CAG repeats. The expansion threshold for occurrence of the disease is considered to be approximately 35-40 residues. HD is also associated with beta sheet rich aggregates in striatal neurons formed by N-terminal regions of HTT. The expansions and aggregates lead to gradual loss of neurons as HD progresses. Additionally, the cell death in HD is associated with death receptor 6 (DR6) which is known to induce apoptosis.

[0678] As of today, there is no therapy or cure, to prevent the progression of the disease. Drug therapies available are aimed at management of the symptoms. For example, the FDA has approved tetrabenazine to be prescribed for prevention of chorea. Additionally, e.g. antipsychotic drugs may help to control delusions, hallucinations and violent outbursts. There remains a need for therapy affecting the underlying pathophysiology.

[0679] In some embodiment, methods of the present disclosure may be used to treat subjects suffering from HD. In some cases, methods of the present disclosure may be used to treat subjects suspected of developing HD.

[0680] AAV particles and methods of using the AAV particles described in the present disclosure may be used to prevent, manage and/or treat HD. As a non-limiting example, the AAV particles of the present disclosure used to treat, prevent and/or manage HD may comprise a modulatory polynucleotide targeting HTT, wherein the modulatory polynucleotides are siRNA duplexes or nucleic acids encoding siRNA duplexes or encoded dsRNA.

### Parkinson's Disease

[0681] Parkinson's Disease (PD) is a progressive disorder of the nervous system affecting especially the substantia nigra of the brain. PD develops as a result of the loss of dopamine producing brain cells. Typical early symptoms of PD include shaking or trembling of a limb, e.g. hands, arms, legs, feet and face. Additional characteristic symptoms are stiffness of the limbs and torso, slow movement or an inability to move, impaired balance and coordination, cognitive changes, and psychiatric conditions e.g. depression and visual hallucinations. PD has both familial and idiopathic forms and it is suggested to be linked to genetic and environmental causes. PD affects more than 4 million people worldwide. In the US, approximately 60,000 cases are identified annually. Generally, PD begins at the age of 50 or older. An early-onset form of the condition begins at age younger than 50, and juvenile-onset PD begins before the age of 20.

[0682] Death of dopamine producing brain cells related to PD has been associated with aggregation, deposition and dysfunction of alpha-synuclein protein (see, e.g. Marques and Outeiro, 2012, Cell Death Dis. 3:e350, Jenner, 1989, J Neurol Neurosurg Psychiatry. Special Supplement, 22-28, and references therein). Studies have suggested that alpha-synuclein has a role in presynaptic signaling, membrane trafficking and regulation of dopamine release and transport. Alpha-synuclein aggregates, e.g. in forms of oligomers, have been suggested to be species responsible for neuronal dysfunction and death. Mutations of the alpha-synuclein gene (SNCA) have been identified in the familial forms of PD, but also environmental factors, e.g. neurotoxin affect alpha-synuclein aggregation. Other suggested causes of brain cell death in PD are dysfunction of proteasomal and lysosomal systems, reduced mitochondrial activity.

[0683] PD is related to other diseases related to alpha-synuclein aggregation, referred to as “synucleinopathies.” Such diseases include, but are not limited to, Parkinson's Disease Dementia (PDD), multiple system atrophy (MSA), dementia with Lewy bodies, juvenile-onset generalized neuroaxonal dystrophy (Hallervorden-Spatz disease), pure autonomic failure (PAF), neurodegeneration with brain iron accumulation type-1 (NBIA-1) and combined Alzheimer's and Parkinson's disease.

[0684] As of today, no cure or preventative therapy for PD has been identified. A variety of drug therapies available provide symptomatic relief. Non-limiting examples of symptomatic medical treatments include carbidopa and levodopa combination reducing stiffness and slow movement, and anticholinergics to reduce trembling and stiffness. Other optional therapies include e.g. deep brain stimulation and surgery. There remains a need for therapy affecting the underlying pathophysiology.

[0685] In some embodiments, methods of the present disclosure may be used to treat subjects suffering from PD and other synucleinopathies. In some cases, methods of the present disclosure may be used to treat subjects suspected of developing PD and other synucleinopathies.

### Friedreich's Ataxia

[0686] Friedreich's Ataxia (FA) is an autosomal recessive inherited disease that causes progressive damage to the nervous system. See, Parkinson et al., Journal of Neurochemistry, 2013, 126 (Suppl. 1), 103-117, the contents of which are herein incorporated by reference in their entirety. Onset usually occurs at puberty, and always by age 25. See, Campuzano, et al., Science, 271.5254 (Mar. 8, 1996): 1423, the contents of which are herein incorporated by reference in their entirety. FA results from the degeneration of nervous tissue in the spinal cord due to reduced expression of the mitochondrial protein frataxin (FXN) in sensory neurons that are essential (through connections with the cerebellum) for directing muscle movement of the arms and legs. See, Koeppen, Arnulf; J Neurol Sci., 2011, April 15; 303(1-2): 1-12, the contents of which are herein incorporated by reference in their entirety. Initial symptoms include poor coordination such as gait disturbance, poor balance, leg weakness, decreased walking, impaired coordination, dysarthria, nystagmus, impaired sensation, kyphoscoliosis, and foot deformities. See, Parkinson et al., Journal of Neurochemistry, 2013, 126 (Suppl. 1), 103-117. The disease generally progresses until a wheelchair is required for mobility. Mortality often involves cardiac failure as a result of cardiac hypertrophy, see Tsou et al., J Neurol Sci. 2011 Aug. 15; 307(1-2):46-9. Incidence of FA among the Caucasian populations is between about 1 in 20,000 and about 1 in 50,000, with a deduced carrier frequency of about 1 in 120 in European populations. See, Nageshwaran and Festenstein, Frontiers in Neurology, Vol. 6, Art. 262 (2015); Campuzano, et al., Science, 271.5254 (Mar. 8, 1996): 1423, the contents of each of which are herein incorporated by reference in their entirety.

[0687] The expansion of an intronic GAA triplet repeat in the FXN gene is the genetic cause of reduced expression of frataxin resulting in FA. See, Parkinson et al., Journal of Neurochemistry, 2013, 126 (Suppl. 1), 103-117. Over time the deficiency causes the aforementioned symptoms, as well as frequent fatigue due to effects on cellular metabolism.

[0688] Currently, no effective treatments exist for FA and patients are most often simply monitored for symptom management. Consequently, there remains a long felt need in the art to develop pharmaceutical compositions and methods for the treatment of FXN related disorders and to ameliorate deficiencies of the protein in patients afflicted with FA.

[0689] Delivery of AAV particles described herein may be used to treat subjects suffering from Friedreich's Ataxia. In some cases, methods of the present disclosure may be used to treat subjects suspected of developing Friedreich's Ataxia. Delivery of AAV particles may result in increased frataxin protein. Further, this increase in frataxin protein may or may not be associated with improvements in mobility.

[0690] In some embodiments, delivery of AAV particles of the disclosure, comprising frataxin polynucleotides, may be used to treat subjects suffering from Friedreich's Ataxia.

[0691] In some embodiments, the AAV particles of the disclosure, comprising frataxin polynucleotides, may be delivered to the dentate nucleus of the cerebellum, brainstem nuclei and/or Clarke's column of the spinal cord. Delivery to one or more of these regions may treat and/or reduce the effects of Friedreich's Ataxia in a subject.

[0692] In some embodiments, the AAV particles of the disclosure, comprising frataxin polynucleotides, may be delivered by intravenous administration to the central nervous system, peripheral nervous system, and/or peripheral organs (e.g., but not limited to, to the heart) for the treatment of Friedreich's Ataxia in a subject.

### Methods of Treatment of Neurological Disease

### AAV Particles Encoding Protein Payloads

[0693] Provided in the present disclosure are methods for introducing AAV particles into cells, the method comprising introducing into said cells any of the vectors in an amount sufficient for an increase in the production of payloads (e.g., target mRNA and dsRNA duplexes) to occur. In some aspects, the cells may be muscle cells, stem cells, neurons such as but not limited to, motor, hippocampal, entorhinal, thalamic, cortical neurons, motor neurons or sensory neurons and glial cells such as astrocytes or microglia.

[0694] Disclosed herein are methods for treating neurological disease associated with insufficient function/presence of a target protein (e.g., ApoE, FXN) in a subject in need of treatment. The method optionally comprises administering to the subject a therapeutically effective amount of a composition comprising AAV particles as described herein. As a non-limiting example, the AAV particles can increase target gene expression, increase target protein production, and thus reduce one or more symptoms of neurological disease in the subject such that the subject is therapeutically treated.

[0695] In some embodiments, the AAV particle of the present disclosure comprising a nucleic acid encoding a protein payload comprises an AAV capsid that allows for transmission across the blood brain barrier upon administration of the AAV particle. In one example, the AAV capsid is VOY101 and in another example, the AAV capsid is VOY201. In one example, the AAV capsid is VOY801 and in another example, the AAV capsid is VOY1101. In yet another example, the AAV capsid is VOY701.

[0696] In some embodiments, the composition comprising the AAV particles of the present disclosure is administered to the central nervous system of the subject via systemic administration. In some embodiments, the systemic administration is intravenous injection.

[0697] In some embodiments, composition comprising the AAV particles of the present disclosure is administered to the central nervous system of the subject via intracarotid arterial delivery.

[0698] In some embodiments, the composition comprising the AAV particles of the present disclosure is administered to the central nervous system of the subject. In other embodiments, the composition comprising the AAV particles of the present disclosure is administered to a tissue of a subject (e.g., brain of the subject).

[0699] In some embodiments, the composition comprising the AAV particles of the present disclosure is administered to the central nervous system of the subject via intraparenchymal injection. Non-limiting examples of intraparenchymal injections include intrathalamic, intrastriatal, intrahippocampal or targeting the entorhinal cortex.

[0700] In some embodiments, the composition comprising the AAV particles of the present disclosure is administered to the central nervous system of the subject via intraparenchymal injection and intrathecal injection.

[0701] In some embodiments, the AAV particles of the present disclosure may be delivered into specific types of targeted cells, including, but not limited to, hippocampal, cortical, motor or entorhinal neurons; glial cells including oligodendrocytes, astrocytes and microglia; and/or other cells surrounding neurons such as immune cells (e.g., T cells).

[0702] In some embodiments, the AAV particles of the present disclosure may be delivered to neurons in the striatum and/or cortex.

[0703] In some embodiments, the AAV particles of the present disclosure may be used as a therapy for neurological disease.

[0704] In some embodiments, the AAV particles of the present disclosure may be used as a therapy for tauopathies.

[0705] In some embodiments, the AAV particles of the present disclosure may be used as a therapy for Alzheimer's Disease.

[0706] In some embodiments, the AAV particles of the present disclosure may be used as a therapy for Amyotrophic Lateral Sclerosis.

[0707] In some embodiments, the AAV particles of the present disclosure may be used as a therapy for Huntington's Disease.

[0708] In some embodiments, the AAV particles of the present disclosure may be used as a therapy for Parkinson's Disease.

[0709] In some embodiments, the AAV particles of the present disclosure may be used as a therapy for Friedreich's Ataxia.

[0710] In some embodiments, the AAV particles of the present disclosure may be used to increase target protein expression in astrocytes in order to treat a neurological disease. Target protein in astrocytes may be increased by 5%, 10%, 15%, 20%, 25%, 30%, 35%, 40%, 45%, 50%, 55%, 60%, 65%, 70%, 75%, 80%, 85%, 90%, 95%, or more than 95%, 5-15%, 5-20%, 5-25%, 5-30%, 5-35%, 5-40%, 5-45%, 5-50%, 5-55%, 5-60%, 5-65%, 5-70%, 5-75%, 5-80%, 5-85%, 5-90%, 5-95%, 10-20%, 10-25%, 10-30%, 10-35%, 10-40%, 10-45%, 10-50%, 10-55%, 10-60%, 10-65%, 10-70%, 10-75%, 10-80%, 10-85%, 10-90%, 10-95%, 15-25%, 15-30%, 15-35%, 15-40%, 15-45%, 15-50%, 15-55%, 15-60%, 15-65%, 15-70%, 15-75%, 15-80%, 15-85%, 15-90%, 15-95%, 20-30%, 20-35%, 20-40%, 20-45%, 20-50%, 20-55%, 20-60%, 20-65%, 20-70%, 20-75%, 20-80%, 20-85%, 20-90%, 20-95%, 25-35%, 25-40%, 25-45%, 25-50%, 25-55%, 25-60%, 25-65%, 25-70%, 25-75%, 25-80%, 25-85%, 25-90%, 25-95%, 30-40%, 30-45%, 30-50%, 30-55%, 30-60%, 30-65%, 30-70%, 30-75%, 30-80%, 30-85%, 30-90%, 30-95%, 35-45%, 35-50%, 35-55%, 35-60%, 35-65%, 35-70%, 35-75%, 35-80%, 35-85%, 35-90%, 35-95%, 40-50%, 40-55%, 40-60%, 40-65%, 40-70%, 40-75%, 40-80%, 40-85%, 40-90%, 40-95%, 45-55%, 45-60%, 45-65%, 45-70%, 45-75%, 45-80%, 45-85%, 45-90%, 45-95%, 50-60%, 50-65%, 50-70%, 50-75%, 50-80%, 50-85%, 50-90%, 50-95%, 55-65%, 55-70%, 55-75%, 55-80%, 55-85%, 55-90%, 55-95%, 60-70%, 60-75%, 60-80%, 60-85%, 60-90%, 60-95%, 65-75%, 65-80%, 65-85%, 65-90%, 65-95%, 70-80%, 70-85%, 70-90%, 70-95%, 75-85%, 75-90%, 75-95%, 80-90%, 80-95%, or 90-95%.

[0711] In some embodiments, the AAV particles may be used to increase target protein in microglia. The increase of target protein in microglia may be, independently, increased by 5%, 10%, 15%, 20%, 25%, 30%, 35%, 40%, 45%, 50%, 55%, 60%, 65%, 70%, 75%, 80%, 85%, 90%, 95%, or more than 95%, 5-15%, 5-20%, 5-25%, 5-30%, 5-35%, 5-40%, 5-45%, 5-50%, 5-55%, 5-60%, 5-65%, 5-70%, 5-75%, 5-80%, 5-85%, 5-90%, 5-95%, 10-20%, 10-25%, 10-30%, 10-35%, 10-40%, 10-45%, 10-50%, 10-55%, 10-60%, 10-65%, 10-70%, 10-75%, 10-80%, 10-85%, 10-90%, 10-95%, 15-25%, 15-30%, 15-35%, 15-40%, 15-45%, 15-50%, 15-55%, 15-60%, 15-65%, 15-70%, 15-75%, 15-80%, 15-85%, 15-90%, 15-95%, 20-30%, 20-35%, 20-40%, 20-45%, 20-50%, 20-55%, 20-60%, 20-65%, 20-70%, 20-75%, 20-80%, 20-85%, 20-90%, 20-95%, 25-35%, 25-40%, 25-45%, 25-50%, 25-55%, 25-60%, 25-65%, 25-70%, 25-75%, 25-80%, 25-85%, 25-90%, 25-95%, 30-40%, 30-45%, 30-50%, 30-55%, 30-60%, 30-65%, 30-70%, 30-75%, 30-80%, 30-85%, 30-90%, 30-95%, 35-45%, 35-50%, 35-55%, 35-60%, 35-65%, 35-70%, 35-75%, 35-80%, 35-85%, 35-90%, 35-95%, 40-50%, 40-55%, 40-60%, 40-65%, 40-70%, 40-75%, 40-80%, 40-85%, 40-90%, 40-95%, 45-55%, 45-60%, 45-65%, 45-70%, 45-75%, 45-80%, 45-85%, 45-90%, 45-95%, 50-60%, 50-65%, 50-70%, 50-75%, 50-80%, 50-85%, 50-90%, 50-95%, 55-65%, 55-70%, 55-75%, 55-80%, 55-85%, 55-90%, 55-95%, 60-70%, 60-75%, 60-80%, 60-85%, 60-90%, 60-95%, 65-75%, 65-80%, 65-85%, 65-90%, 65-95%, 70-80%, 70-85%, 70-90%, 70-95%, 75-85%, 75-90%, 75-95%, 80-90%, 80-95%, or 90-95%.

[0712] In some embodiments, the AAV particles may be used to increase target protein in cortical neurons. The increase of target protein in the cortical neurons may be, independently, increased by 5%, 10%, 15%, 20%, 25%, 30%, 35%, 40%, 45%, 50%, 55%, 60%, 65%, 70%, 75%, 80%, 85%, 90%, 95%, or more than 95%, 5-15%, 5-20%, 5-25%, 5-30%, 5-35%, 5-40%, 5-45%, 5-50%, 5-55%, 5-60%, 5-65%, 5-70%, 5-75%, 5-80%, 5-85%, 5-90%, 5-95%, 10-20%, 10-25%, 10-30%, 10-35%, 10-40%, 10-45%, 10-50%, 10-55%, 10-60%, 10-65%, 10-70%, 10-75%, 10-80%, 10-85%, 10-90%, 10-95%, 15-25%, 15-30%, 15-35%, 15-40%, 15-45%, 15-50%, 15-55%, 15-60%, 15-65%, 15-70%, 15-75%, 15-80%, 15-85%, 15-90%, 15-95%, 20-30%, 20-35%, 20-40%, 20-45%, 20-50%, 20-55%, 20-60%, 20-65%, 20-70%, 20-75%, 20-80%, 20-85%, 20-90%, 20-95%, 25-35%, 25-40%, 25-45%, 25-50%, 25-55%, 25-60%, 25-65%, 25-70%, 25-75%, 25-80%, 25-85%, 25-90%, 25-95%, 30-40%, 30-45%, 30-50%, 30-55%, 30-60%, 30-65%, 30-70%, 30-75%, 30-80%, 30-85%, 30-90%, 30-95%, 35-45%, 35-50%, 35-55%, 35-60%, 35-65%, 35-70%, 35-75%, 35-80%, 35-85%, 35-90%, 35-95%, 40-50%, 40-55%, 40-60%, 40-65%, 40-70%, 40-75%, 40-80%, 40-85%, 40-90%, 40-95%, 45-55%, 45-60%, 45-65%, 45-70%, 45-75%, 45-80%, 45-85%, 45-90%, 45-95%, 50-60%, 50-65%, 50-70%, 50-75%, 50-80%, 50-85%, 50-90%, 50-95%, 55-65%, 55-70%, 55-75%, 55-80%, 55-85%, 55-90%, 55-95%, 60-70%, 60-75%, 60-80%, 60-85%, 60-90%, 60-95%, 65-75%, 65-80%, 65-85%, 65-90%, 65-95%, 70-80%, 70-85%, 70-90%, 70-95%, 75-85%, 75-90%, 75-95%, 80-90%, 80-95%, or 90-95%.

[0713] In some embodiments, the AAV particles may be used to increase target protein in hippocampal neurons. The increase of target protein in the hippocampal neurons may be, independently, increased by 5%, 10%, 15%, 20%, 25%, 30%, 35%, 40%, 45%, 50%, 55%, 60%, 65%, 70%, 75%, 80%, 85%, 90%, 95%, or more than 95%, 5-15%, 5-20%, 5-25%, 5-30%, 5-35%, 5-40%, 5-45%, 5-50%, 5-55%, 5-60%, 5-65%, 5-70%, 5-75%, 5-80%, 5-85%, 5-90%, 5-95%, 10-20%, 10-25%, 10-30%, 10-35%, 10-40%, 10-45%, 10-50%, 10-55%, 10-60%, 10-65%, 10-70%, 10-75%, 10-80%, 10-85%, 10-90%, 10-95%, 15-25%, 15-30%, 15-35%, 15-40%, 15-45%, 15-50%, 15-55%, 15-60%, 15-65%, 15-70%, 15-75%, 15-80%, 15-85%, 15-90%, 15-95%, 20-30%, 20-35%, 20-40%, 20-45%, 20-50%, 20-55%, 20-60%, 20-65%, 20-70%, 20-75%, 20-80%, 20-85%, 20-90%, 20-95%, 25-35%, 25-40%, 25-45%, 25-50%, 25-55%, 25-60%, 25-65%, 25-70%, 25-75%, 25-80%, 25-85%, 25-90%, 25-95%, 30-40%, 30-45%, 30-50%, 30-55%, 30-60%, 30-65%, 30-70%, 30-75%, 30-80%, 30-85%, 30-90%, 30-95%, 35-45%, 35-50%, 35-55%, 35-60%, 35-65%, 35-70%, 35-75%, 35-80%, 35-85%, 35-90%, 35-95%, 40-50%, 40-55%, 40-60%, 40-65%, 40-70%, 40-75%, 40-80%, 40-85%, 40-90%, 40-95%, 45-55%, 45-60%, 45-65%, 45-70%, 45-75%, 45-80%, 45-85%, 45-90%, 45-95%, 50-60%, 50-65%, 50-70%, 50-75%, 50-80%, 50-85%, 50-90%, 50-95%, 55-65%, 55-70%, 55-75%, 55-80%, 55-85%, 55-90%, 55-95%, 60-70%, 60-75%, 60-80%, 60-85%, 60-90%, 60-95%, 65-75%, 65-80%, 65-85%, 65-90%, 65-95%, 70-80%, 70-85%, 70-90%, 70-95%, 75-85%, 75-90%, 75-95%, 80-90%, 80-95%, or 90-95%.

[0714] In some embodiments, the AAV particles may be used to increase target protein in DRG and/or sympathetic neurons. The increase of target protein in the DRG and/or sympathetic neurons may be, independently, increased by 5%, 10%, 15%, 20%, 25%, 30%, 35%, 40%, 45%, 50%, 55%, 60%, 65%, 70%, 75%, 80%, 85%, 90%, 95%, or more than 95%, 5-15%, 5-20%, 5-25%, 5-30%, 5-35%, 5-40%, 5-45%, 5-50%, 5-55%, 5-60%, 5-65%, 5-70%, 5-75%, 5-80%, 5-85%, 5-90%, 5-95%, 10-20%, 10-25%, 10-30%, 10-35%, 10-40%, 10-45%, 10-50%, 10-55%, 10-60%, 10-65%, 10-70%, 10-75%, 10-80%, 10-85%, 10-90%, 10-95%, 15-25%, 15-30%, 15-35%, 15-40%, 15-45%, 15-50%, 15-55%, 15-60%, 15-65%, 15-70%, 15-75%, 15-80%, 15-85%, 15-90%, 15-95%, 20-30%, 20-35%, 20-40%, 20-45%, 20-50%, 20-55%, 20-60%, 20-65%, 20-70%, 20-75%, 20-80%, 20-85%, 20-90%, 20-95%, 25-35%, 25-40%, 25-45%, 25-50%, 25-55%, 25-60%, 25-65%, 25-70%, 25-75%, 25-80%, 25-85%, 25-90%, 25-95%, 30-40%, 30-45%, 30-50%, 30-55%, 30-60%, 30-65%, 30-70%, 30-75%, 30-80%, 30-85%, 30-90%, 30-95%, 35-45%, 35-50%, 35-55%, 35-60%, 35-65%, 35-70%, 35-75%, 35-80%, 35-85%, 35-90%, 35-95%, 40-50%, 40-55%, 40-60%, 40-65%, 40-70%, 40-75%, 40-80%, 40-85%, 40-90%, 40-95%, 45-55%, 45-60%, 45-65%, 45-70%, 45-75%, 45-80%, 45-85%, 45-90%, 45-95%, 50-60%, 50-65%, 50-70%, 50-75%, 50-80%, 50-85%, 50-90%, 50-95%, 55-65%, 55-70%, 55-75%, 55-80%, 55-85%, 55-90%, 55-95%, 60-70%, 60-75%, 60-80%, 60-85%, 60-90%, 60-95%, 65-75%, 65-80%, 65-85%, 65-90%, 65-95%, 70-80%, 70-85%, 70-90%, 70-95%, 75-85%, 75-90%, 75-95%, 80-90%, 80-95%, or 90-95%.

[0715] In some embodiments, the AAV particles of the present disclosure may be used to increase target protein in sensory neurons in order to treat neurological disease. Target protein in sensory neurons may be increased by 5%, 10%, 15%, 20%, 25%, 30%, 35%, 40%, 45%, 50%, 55%, 60%, 65%, 70%, 75%, 80%, 85%, 90%, 95%, or more than 95%, 5-15%, 5-20%, 5-25%, 5-30%, 5-35%, 5-40%, 5-45%, 5-50%, 5-55%, 5-60%, 5-65%, 5-70%, 5-75%, 5-80%, 5-85%, 5-90%, 5-95% 10-20%, 10-25%, 10-30%, 10-35%, 10-40%, 10-45%, 10-50%, 10-55%, 10-60%, 10-65%, 10-70%, 10-75%, 10-80%, 10-85%, 10-90%, 10-95%, 15-25%, 15-30%, 15-35%, 15-40%, 15-45%, 15-50%, 15-55%, 15-60%, 15-65%, 15-70%, 15-75%, 15-80%, 15-85%, 15-90%, 15-95%, 20-30%, 20-35%, 20-40%, 20-45%, 20-50%, 20-55%, 20-60%, 20-65%, 20-70%, 20-75%, 20-80%, 20-85%, 20-90%, 20-95%, 25-35%, 25-40%, 25-45%, 25-50%, 25-55%, 25-60%, 25-65%, 25-70%, 25-75%, 25-80%, 25-85%, 25-90%, 25-95%, 30-40%, 30-45%, 30-50%, 30-55%, 30-60%, 30-65%, 30-70%, 30-75%, 30-80%, 30-85%, 30-90%, 30-95%, 35-45%, 35-50%, 35-55%, 35-60%, 35-65%, 35-70%, 35-75%, 35-80%, 35-85%, 35-90%, 35-95%, 40-50%, 40-55%, 40-60%, 40-65%, 40-70%, 40-75%, 40-80%, 40-85%, 40-90%, 40-95%, 45-55%, 45-60%, 45-65%, 45-70%, 45-75%, 45-80%, 45-85%, 45-90%, 45-95%, 50-60%, 50-65%, 50-70%, 50-75%, 50-80%, 50-85%, 50-90%, 50-95%, 55-65%, 55-70%, 55-75%, 55-80%, 55-85%, 55-90%, 55-95%, 60-70%, 60-75%, 60-80%, 60-85%, 60-90%, 60-95%, 65-75%, 65-80%, 65-85%, 65-90%, 65-95%, 70-80%, 70-85%, 70-90%, 70-95%, 75-85%, 75-90%, 75-95%, 80-90%, 80-95%, or 90-95%.

[0716] In some embodiments, the AAV particles of the present disclosure may be used to increase target protein and reduce symptoms of neurological disease in a subject. The increase of target protein and/or the reduction of symptoms of neurological disease may be, independently, altered (increased for the production of target protein and reduced for the symptoms of neurological disease) by 5%, 10%, 15%, 20%, 25%, 30%, 35%, 40%, 45%, 50%, 55%, 60%, 65%, 70%, 75%, 80%, 85%, 90%, 95%, or more than 95%, 5-15%, 5-20%, 5-25%, 5-30%, 5-35%, 5-40%, 5-45%, 5-50%, 5-55%, 5-60%, 5-65%, 5-70%, 5-75%, 5-80%, 5-85%, 5-90%, 5-95%, 10-20%, 10-25%, 10-30%, 10-35%, 10-40%, 10-45%, 10-50%, 10-55%, 10-60%, 10-65%, 10-70%, 10-75%, 10-80%, 10-85%, 10-90%, 10-95%, 15-25%, 15-30%, 15-35%, 15-40%, 15-45%, 15-50%, 15-55%, 15-60%, 15-65%, 15-70%, 15-75%, 15-80%, 15-85%, 15-90%, 15-95%, 20-30%, 20-35%, 20-40%, 20-45%, 20-50%, 20-55%, 20-60%, 20-65%, 20-70%, 20-75%, 20-80%, 20-85%, 20-90%, 20-95%, 25-35%, 25-40%, 25-45%, 25-50%, 25-55%, 25-60%, 25-65%, 25-70%, 25-75%, 25-80%, 25-85%, 25-90%, 25-95%, 30-40%, 30-45%, 30-50%, 30-55%, 30-60%, 30-65%, 30-70%, 30-75%, 30-80%, 30-85%, 30-90%, 30-95%, 35-45%, 35-50%, 35-55%, 35-60%, 35-65%, 35-70%, 35-75%, 35-80%, 35-85%, 35-90%, 35-95%, 40-50%, 40-55%, 40-60%, 40-65%, 40-70%, 40-75%, 40-80%, 40-85%, 40-90%, 40-95%, 45-55%, 45-60%, 45-65%, 45-70%, 45-75%, 45-80%, 45-85%, 45-90%, 45-95%, 50-60%, 50-65%, 50-70%, 50-75%, 50-80%, 50-85%, 50-90%, 50-95%, 55-65%, 55-70%, 55-75%, 55-80%, 55-85%, 55-90%, 55-95%, 60-70%, 60-75%, 60-80%, 60-85%, 60-90%, 60-95%, 65-75%, 65-80%, 65-85%, 65-90%, 65-95%, 70-80%, 70-85%, 70-90%, 70-95%, 75-85%, 75-90%, 75-95%, 80-90%, 80-95%, or 90-95%.

[0717] In some embodiments, the AAV particles of the present disclosure may be used to reduce the decline of functional capacity and activities of daily living as measured by a standard evaluation system such as, but not limited to, the total functional capacity (TFC) scale.

[0718] In some embodiments, the AAV particles of the present disclosure may be used to improve performance on any assessment used to measure symptoms of neurological disease. Such assessments include, but are not limited to ADAS-cog (Alzheimer Disease Assessment Scale—cognitive), MMSE (Mini-Mental State Examination), GDS (Geriatric Depression Scale), FAQ (Functional Activities Questionnaire), ADL (Activities of Daily Living), GPCOG (General Practitioner Assessment of Cognition), Mini-Cog, AMTS (Abbreviated Mental Test Score), Clock-drawing test, 6-CIT (6-item Cognitive Impairment Test), TYM (Test Your Memory), MoCa (Montreal Cognitive Assessment), ACE-R (Addenbrookes Cognitive Assessment), MIS (Memory Impairment Screen), BADLS (Bristol Activities of Daily Living Scale), Barthel Index, Functional Independence Measure, Instrumental Activities of Daily Living, IQCODE (Informant Questionnaire on Cognitive Decline in the Elderly), Neuropsychiatric Inventory, The Cohen-Mansfield Agitation Inventory, BEHAVE-AD, EuroQol, Short Form-36 and/or MBR Caregiver Strain Instrument, or any of the other tests as described in Sheehan B Ther Adv Neurol Disord 5(6):349-358 (2012), the contents of which are herein incorporated by reference in their entirety.

[0719] In some embodiments, the present composition is administered as a solo therapeutic or as combination therapeutic for the treatment of neurological disease.

[0720] The AAV particles encoding the target protein may be used in combination with one or more other therapeutic agents. By “in combination with,” it is not intended to imply that the agents must be administered at the same time and/or formulated for delivery together, although these methods of delivery are within the scope of the present disclosure. Compositions can be administered concurrently with, prior to, or subsequent to, one or more other desired therapeutics or medical procedures. In general, each agent will be administered at a dose and/or on a time schedule determined for that agent.

[0721] Therapeutic agents that may be used in combination with the AAV particles of the present disclosure can be small molecule compounds which are antioxidants, anti-inflammatory agents, anti-apoptosis agents, calcium regulators, antiglutamatergic agents, structural protein inhibitors, compounds involved in muscle function, and compounds involved in metal ion regulation.

[0722] Compounds tested for treating neurological disease which may be used in combination with the AAV particles described herein include, but are not limited to, cholinesterase inhibitors (donepezil, rivastigmine, galantamine), NMDA receptor antagonists such as memantine, anti-psychotics, anti-depressants, anti-convulsants (e.g., sodium valproate and levetiracetam for myoclonus), secretase inhibitors, amyloid aggregation inhibitors, copper or zinc modulators, BACE inhibitors, inhibitors of tau aggregation, such as Methylene blue, phenothiazines, anthraquinones, n-phenylamines or rhodamines, microtubule stabilizers such as NAP, taxol or paclitaxel, kinase or phosphatase inhibitors such as those targeting GSK3β (lithium) or PP2A, immunization with Aβ peptides or tau phospho-epitopes, anti-tau or anti-amyloid antibodies, dopamine-depleting agents (e.g., tetrabenazine for chorea), benzodiazepines (e.g., clonazepam for myoclonus, chorea, dystonia, rigidity, and/or spasticity), amino acid precursors of dopamine (e.g., levodopa for rigidity), skeletal muscle relaxants (e.g., baclofen, tizanidine for rigidity and/or spasticity), inhibitors for acetylcholine release at the neuromuscular junction to cause muscle paralysis (e.g., botulinum toxin for bruxism and/or dystonia), atypical neuroleptics (e.g., olanzapine and quetiapine for psychosis and/or irritability, risperidone, sulpiride and haloperidol for psychosis, chorea and/or irritability, clozapine for treatment-resistant psychosis, aripiprazole for psychosis with prominent negative symptoms), selective serotonin reuptake inhibitors (SSRIs) (e.g., citalopram, fluoxetine, paroxetine, sertraline, mirtazapine, venlafaxine for depression, anxiety, obsessive compulsive behavior and/or irritability), hypnotics (e.g., xopiclone and/or zolpidem for altered sleep-wake cycle), anticonvulsants (e.g., sodium valproate and carbamazepine for mania or hypomania) and mood stabilizers (e.g., lithium for mania or hypomania).

[0723] Neurotrophic factors may be used in combination therapy with the AAV particles of the present disclosure for treating neurological disease. Generally, a neurotrophic factor is defined as a substance that promotes survival, growth, differentiation, proliferation and/or maturation of a neuron, or stimulates increased activity of a neuron. In some embodiments, the present methods further comprise delivery of one or more trophic factors into the subject in need of treatment. Trophic factors may include, but are not limited to, IGF-I, GDNF, BDNF, CTNF, VEGF, Colivelin, Xaliproden, Thyrotrophin-releasing hormone and ADNF, and variants thereof.

[0724] In one aspect, the AAV particle described herein may be co-administered with AAV particles expressing neurotrophic factors such as AAV-IGF-I (See e.g., Vincent et al., Neuromolecular medicine, 2004, 6, 79-85; the contents of which are incorporated herein by reference in their entirety) and AAV-GDNF (See e.g., Wang et al., J Neurosci., 2002, 22, 6920-6928; the contents of which are incorporated herein by reference in their entirety).

[0725] In some embodiments, the composition for treating neurological disease, described herein, is administered to the subject in need intravenously, intramuscularly, subcutaneously, intraperitoneally, intraparenchymally, intrathecally and/or intraventricularly, allowing the AAV particles to pass through one or both the blood-brain barrier and the blood spinal cord barrier. In some aspects, the method includes administering (e.g., intraparenchymal administration, intraventricular administration and/or intrathecally administration) directly to the central nervous system (CNS) of a subject (using, e.g., an infusion pump and/or a delivery scaffold) a therapeutically effective amount of a composition comprising AAV particles of the present disclosure. The AAV particles may be used to increase target gene expression, and/or reducing one or more symptoms of neurological disease in the subject such that the subject is therapeutically treated.

[0726] In some embodiments, administration of the AAV particles described herein to a subject may increase target protein levels in a subject. The target protein levels may be increased by about 30%, 40%, 50%, 60%, 70%, 80%, 85%, 90%, 95% and 100%, or at least 20-30%, 20-40%, 20-50%, 20-60%, 20-70%, 20-80%, 20-90%, 20-95%, 20-100%, 30-40%, 30-50%, 30-60%, 30-70%, 30-80%, 30-90%, 30-95%, 30-100%, 40-50%, 40-60%, 40-70%, 40-80%, 40-90%, 40-95%, 40-100%, 50-60%, 50-70%, 50-80%, 50-90%, 50-95%, 50-100%, 60-70%, 60-80%, 60-90%, 60-95%, 60-100%, 70-80%, 70-90%, 70-95%, 70-100%, 80-90%, 80-95%, 80-100%, 90-95%, 90-100% or 95-100% in a subject such as, but not limited to, the CNS, a region of the CNS, or a specific cell of the CNS of a subject. As a non-limiting example, the AAV particles may increase the protein levels of a target protein by at least 50%. As a non-limiting example, the AAV particles may increase the proteins levels of a target protein by at least 40%. As a non-limiting example, a subject may have an increase of 10% of target protein. As a non-limiting example, the AAV particles may increase the protein levels of a target protein by fold increases over baseline. In some embodiments, AAV particles lead to 5-6 times higher levels of a target protein.

[0727] In some embodiments, administration of the AAV particles described herein to a subject may increase the expression of a target protein in a subject. The expression of the target protein may be increased by about 30%, 40%, 50%, 60%, 70%, 80%, 85%, 90%, 95% and 100%, or at least 20-30%, 20-40%, 20-50%, 20-60%, 20-70%, 20-80%, 20-90%, 20-95%, 20-100%, 30-40%, 30-50%, 30-60%, 30-70%, 30-80%, 30-90%, 30-95%, 30-100%, 40-50%, 40-60%, 40-70%, 40-80%, 40-90%, 40-95%, 40-100%, 50-60%, 50-70%, 50-80%, 50-90%, 50-95%, 50-100%, 60-70%, 60-80%, 60-90%, 60-95%, 60-100%, 70-80%, 70-90%, 70-95%, 70-100%, 80-90%, 80-95%, 80-100%, 90-95%, 90-100% or 95-100% in a subject such as, but not limited to, the CNS, a region of the CNS, or a specific cell of the CNS of a subject. As a non-limiting example, the AAV particles may increase the expression of a target protein by at least 50%. As a non-limiting example, the AAV particles may increase the expression of a target protein by at least 40%.

[0728] In some embodiments, intravenous administration of the AAV particles described herein to a subject may increase the CNS expression of a target protein in a subject. The expression of the target protein may be increased by about 30%, 40%, 50%, 60%, 70%, 80%, 85%, 90%, 95% and 100%, or at least 20-30%, 20-40%, 20-50%, 20-60%, 20-70%, 20-80%, 20-90%, 20-95%, 20-100%, 30-40%, 30-50%, 30-60%, 30-70%, 30-80%, 30-90%, 30-95%, 30-100%, 40-50%, 40-60%, 40-70%, 40-80%, 40-90%, 40-95%, 40-100%, 50-60%, 50-70%, 50-80%, 50-90%, 50-95%, 50-100%, 60-70%, 60-80%, 60-90%, 60-95%, 60-100%, 70-80%, 70-90%, 70-95%, 70-100%, 80-90%, 80-95%, 80-100%, 90-95%, 90-100% or 95-100% in a subject such as, but not limited to, the CNS, a region of the CNS, or a specific cell of the CNS of a subject. As a non-limiting example, the AAV particles may increase the expression of a target protein in the CNS by at least 50%. As a non-limiting example, the AAV particles may increase the expression of a target protein in the CNS by at least 40%.

[0729] In some embodiments, administration of the AAV particles to a subject will increase the expression of a target protein in a subject and the increase of the expression of the target protein will reduce the effects and/or symptoms of neurological disease in a subject.

### AAV Particles Comprising Modulatory Polynucleotides

[0730] Provided in the present disclosure are methods for introducing the AAV particles, comprising a nucleic acid sequence encoding the siRNA molecules of the present disclosure into cells, the method comprising introducing into said cells any of the vectors in an amount sufficient for degradation of a target mRNA to occur, thereby activating target-specific RNAi in the cells. In some aspects, the cells may be muscle cells, stem cells, neurons such as but not limited to, motor, hippocampal, entorhinal, thalamic or cortical neurons, and glial cells such as astrocytes or microglia.

[0731] Disclosed in the present disclosure are methods for treating neurological diseases associated with dysfunction of a target protein in a subject in need of treatment. The method optionally comprises administering to the subject a therapeutically effective amount of a composition comprising AAV particles comprising a nucleic acid sequence encoding the siRNA molecules of the present disclosure. As a non-limiting example, the siRNA molecules can silence target gene expression, inhibit target protein production, and reduce one or more symptoms of neurological disease in the subject such that the subject is therapeutically treated.

[0732] In some embodiments, the composition comprising the AAV particles of the present disclosure comprising a nucleic acid sequence encoding siRNA molecules comprise an AAV capsid that allows for transmission across the blood brain barrier after intravenous administration.

[0733] In some embodiments, the composition comprising the AAV particles comprising a nucleic acid sequence encoding the siRNA molecules of the present disclosure is administered to the central nervous system of the subject. In other embodiments, the composition comprising the AAV particles comprising a nucleic acid sequence encoding the siRNA molecules of the present disclosure is administered to a tissue of a subject (e.g., brain of the subject).

[0734] In some embodiments, the composition comprising the AAV particles comprising a nucleic acid sequence encoding the siRNA molecules of the present disclosure is administered to the central nervous system of the subject via systemic administration. In some embodiments, the systemic administration is intravenous injection.

[0735] In some embodiments, the composition comprising the AAV particles comprising a nucleic acid sequence encoding the siRNA molecules of the present disclosure is administered to the central nervous system of the subject via intraparenchymal injection. Non-limiting examples of intraparenchymal injections include intrathalamic, intrastriatal, intrahippocampal or targeting the entorhinal cortex.

[0736] In some embodiments, the composition comprising the AAV particles comprising a nucleic acid sequence encoding the siRNA molecules of the present disclosure is administered to the central nervous system of the subject via intraparenchymal injection and intrathecal injection.

[0737] In some embodiments, the AAV particles comprising a nucleic acid sequence encoding the siRNA molecules of the present disclosure may be delivered into specific types of targeted cells, including, but not limited to, hippocampal, cortical, motor or entorhinal neurons; glial cells including oligodendrocytes, astrocytes and microglia; and/or other cells surrounding neurons such as T cells.

[0738] In some embodiments, the AAV particles comprising a nucleic acid sequence encoding the siRNA molecules of the present disclosure may be delivered to neurons in the striatum and/or cortex.

[0739] In some embodiments, the AAV particles comprising a nucleic acid sequence encoding the siRNA molecules of the present disclosure may be used as a therapy for neurological disease.

[0740] In some embodiments, the AAV particles comprising a nucleic acid sequence encoding the siRNA molecules of the present disclosure may be used as a therapy for tauopathies.

[0741] In some embodiments, the AAV particles comprising a nucleic acid sequence encoding the siRNA molecules of the present disclosure may be used as a therapy for Alzheimer's Disease.

[0742] In some embodiments, the AAV particles comprising a nucleic acid sequence encoding the siRNA molecules of the present disclosure may be used as a therapy for Amyotrophic Lateral Sclerosis.

[0743] In some embodiments, the AAV particles comprising a nucleic acid sequence encoding the siRNA molecules of the present disclosure may be used as a therapy for Huntington's Disease.

[0744] In some embodiments, the AAV particles comprising a nucleic acid sequence encoding the siRNA molecules of the present disclosure may be used as a therapy for Parkinson's Disease.

[0745] In some embodiments, the AAV particles comprising a nucleic acid sequence encoding the siRNA molecules of the present disclosure may be used as a therapy for Friedreich's Ataxia.

[0746] In some embodiments, the AAV particles comprising a nucleic acid sequence encoding the siRNA molecules of the present disclosure may be used to suppress a target protein in astrocytes in order to treat neurological disease. Target protein in astrocytes may be suppressed by 5%, 10%, 15%, 20%, 25%, 30%, 35%, 40%, 45%, 50%, 55%, 60%, 65%, 70%, 75%, 80%, 85%, 90%, 95%, or more than 95%, 5-15%, 5-20%, 5-25%, 5-30%, 5-35%, 5-40%, 5-45%, 5-50%, 5-55%, 5-60%, 5-65%, 5-70%, 5-75%, 5-80%, 5-85%, 5-90%, 5-95%, 10-20%, 10-25%, 10-30%, 10-35%, 10-40%, 10-45%, 10-50%, 10-55%, 10-60%, 10-65%, 10-70%, 10-75%, 10-80%, 10-85%, 10-90%, 10-95%, 15-25%, 15-30%, 15-35%, 15-40%, 15-45%, 15-50%, 15-55%, 15-60%, 15-65%, 15-70%, 15-75%, 15-80%, 15-85%, 15-90%, 15-95%, 20-30%, 20-35%, 20-40%, 20-45%, 20-50%, 20-55%, 20-60%, 20-65%, 20-70%, 20-75%, 20-80%, 20-85%, 20-90%, 20-95%, 25-35%, 25-40%, 25-45%, 25-50%, 25-55%, 25-60%, 25-65%, 25-70%, 25-75%, 25-80%, 25-85%, 25-90%, 25-95%, 30-40%, 30-45%, 30-50%, 30-55%, 30-60%, 30-65%, 30-70%, 30-75%, 30-80%, 30-85%, 30-90%, 30-95%, 35-45%, 35-50%, 35-55%, 35-60%, 35-65%, 35-70%, 35-75%, 35-80%, 35-85%, 35-90%, 35-95%, 40-50%, 40-55%, 40-60%, 40-65%, 40-70%, 40-75%, 40-80%, 40-85%, 40-90%, 40-95%, 45-55%, 45-60%, 45-65%, 45-70%, 45-75%, 45-80%, 45-85%, 45-90%, 45-95%, 50-60%, 50-65%, 50-70%, 50-75%, 50-80%, 50-85%, 50-90%, 50-95%, 55-65%, 55-70%, 55-75%, 55-80%, 55-85%, 55-90%, 55-95%, 60-70%, 60-75%, 60-80%, 60-85%, 60-90%, 60-95%, 65-75%, 65-80%, 65-85%, 65-90%, 65-95%, 70-80%, 70-85%, 70-90%, 70-95%, 75-85%, 75-90%, 75-95%, 80-90%, 80-95%, or 90-95%. Target protein in astrocytes may be reduced may be 5%, 10%, 15%, 20%, 25%, 30%, 35%, 40%, 45%, 50%, 55%, 60%, 65%, 70%, 75%, 80%, 85%, 90%, 95%, or more than 95%, 5-15%, 5-20%, 5-25%, 5-30%, 5-35%, 5-40%, 5-45%, 5-50%, 5-55%, 5-60%, 5-65%, 5-70%, 5-75%, 5-80%, 5-85%, 5-90%, 5-95%, 10-20%, 10-25%, 10-30%, 10-35%, 10-40%, 10-45%, 10-50%, 10-55%, 10-60%, 10-65%, 10-70%, 10-75%, 10-80%, 10-85%, 10-90%, 10-95%, 15-25%, 15-30%, 15-35%, 15-40%, 15-45%, 15-50%, 15-55%, 15-60%, 15-65%, 15-70%, 15-75%, 15-80%, 15-85%, 15-90%, 15-95%, 20-30%, 20-35%, 20-40%, 20-45%, 20-50%, 20-55%, 20-60%, 20-65%, 20-70%, 20-75%, 20-80%, 20-85%, 20-90%, 20-95%, 25-35%, 25-40%, 25-45%, 25-50%, 25-55%, 25-60%, 25-65%, 25-70%, 25-75%, 25-80%, 25-85%, 25-90%, 25-95%, 30-40%, 30-45%, 30-50%, 30-55%, 30-60%, 30-65%, 30-70%, 30-75%, 30-80%, 30-85%, 30-90%, 30-95%, 35-45%, 35-50%, 35-55%, 35-60%, 35-65%, 35-70%, 35-75%, 35-80%, 35-85%, 35-90%, 35-95%, 40-50%, 40-55%, 40-60%, 40-65%, 40-70%, 40-75%, 40-80%, 40-85%, 40-90%, 40-95%, 45-55%, 45-60%, 45-65%, 45-70%, 45-75%, 45-80%, 45-85%, 45-90%, 45-95%, 50-60%, 50-65%, 50-70%, 50-75%, 50-80%, 50-85%, 50-90%, 50-95%, 55-65%, 55-70%, 55-75%, 55-80%, 55-85%, 55-90%, 55-95%, 60-70%, 60-75%, 60-80%, 60-85%, 60-90%, 60-95%, 65-75%, 65-80%, 65-85%, 65-90%, 65-95%, 70-80%, 70-85%, 70-90%, 70-95%, 75-85%, 75-90%, 75-95%, 80-90%, 80-95%, or 90-95%.

[0747] In some embodiments, the AAV particles comprising a nucleic acid sequence encoding the siRNA molecules of the present disclosure may be used to suppress a target protein in microglia. The suppression of the target protein in microglia may be, independently, suppressed by 5%, 10%, 15%, 20%, 25%, 30%, 35%, 40%, 45%, 50%, 55%, 60%, 65%, 70%, 75%, 80%, 85%, 90%, 95%, or more than 95%, 5-15%, 5-20%, 5-25%, 5-30%, 5-35%, 5-40%, 5-45%, 5-50%, 5-55%, 5-60%, 5-65%, 5-70%, 5-75%, 5-80%, 5-85%, 5-90%, 5-95%, 10-20%, 10-25%, 10-30%, 10-35%, 10-40%, 10-45%, 10-50%, 10-55%, 10-60%, 10-65%, 10-70%, 10-75%, 10-80%, 10-85%, 10-90%, 10-95%, 15-25%, 15-30%, 15-35%, 15-40%, 15-45%, 15-50%, 15-55%, 15-60%, 15-65%, 15-70%, 15-75%, 15-80%, 15-85%, 15-90%, 15-95%, 20-30%, 20-35%, 20-40%, 20-45%, 20-50%, 20-55%, 20-60%, 20-65%, 20-70%, 20-75%, 20-80%, 20-85%, 20-90%, 20-95%, 25-35%, 25-40%, 25-45%, 25-50%, 25-55%, 25-60%, 25-65%, 25-70%, 25-75%, 25-80%, 25-85%, 25-90%, 25-95%, 30-40%, 30-45%, 30-50%, 30-55%, 30-60%, 30-65%, 30-70%, 30-75%, 30-80%, 30-85%, 30-90%, 30-95%, 35-45%, 35-50%, 35-55%, 35-60%, 35-65%, 35-70%, 35-75%, 35-80%, 35-85%, 35-90%, 35-95%, 40-50%, 40-55%, 40-60%, 40-65%, 40-70%, 40-75%, 40-80%, 40-85%, 40-90%, 40-95%, 45-55%, 45-60%, 45-65%, 45-70%, 45-75%, 45-80%, 45-85%, 45-90%, 45-95%, 50-60%, 50-65%, 50-70%, 50-75%, 50-80%, 50-85%, 50-90%, 50-95%, 55-65%, 55-70%, 55-75%, 55-80%, 55-85%, 55-90%, 55-95%, 60-70%, 60-75%, 60-80%, 60-85%, 60-90%, 60-95%, 65-75%, 65-80%, 65-85%, 65-90%, 65-95%, 70-80%, 70-85%, 70-90%, 70-95%, 75-85%, 75-90%, 75-95%, 80-90%, 80-95%, or 90-95%. The reduction may be 5%, 10%, 15%, 20%, 25%, 30%, 35%, 40%, 45%, 50%, 55%, 60%, 65%, 70%, 75%, 80%, 85%, 90%, 95%, or more than 95%, 5-15%, 5-20%, 5-25%, 5-30%, 5-35%, 5-40%, 5-45%, 5-50%, 5-55%, 5-60%, 5-65%, 5-70%, 5-75%, 5-80%, 5-85%, 5-90%, 5-95%, 10-20%, 10-25%, 10-30%, 10-35%, 10-40%, 10-45%, 10-50%, 10-55%, 10-60%, 10-65%, 10-70%, 10-75%, 10-80%, 10-85%, 10-90%, 10-95%, 15-25%, 15-30%, 15-35%, 15-40%, 15-45%, 15-50%, 15-55%, 15-60%, 15-65%, 15-70%, 15-75%, 15-80%, 15-85%, 15-90%, 15-95%, 20-30%, 20-35%, 20-40%, 20-45%, 20-50%, 20-55%, 20-60%, 20-65%, 20-70%, 20-75%, 20-80%, 20-85%, 20-90%, 20-95%, 25-35%, 25-40%, 25-45%, 25-50%, 25-55%, 25-60%, 25-65%, 25-70%, 25-75%, 25-80%, 25-85%, 25-90%, 25-95%, 30-40%, 30-45%, 30-50%, 30-55%, 30-60%, 30-65%, 30-70%, 30-75%, 30-80%, 30-85%, 30-90%, 30-95%, 35-45%, 35-50%, 35-55%, 35-60%, 35-65%, 35-70%, 35-75%, 35-80%, 35-85%, 35-90%, 35-95%, 40-50%, 40-55%, 40-60%, 40-65%, 40-70%, 40-75%, 40-80%, 40-85%, 40-90%, 40-95%, 45-55%, 45-60%, 45-65%, 45-70%, 45-75%, 45-80%, 45-85%, 45-90%, 45-95%, 50-60%, 50-65%, 50-70%, 50-75%, 50-80%, 50-85%, 50-90%, 50-95%, 55-65%, 55-70%, 55-75%, 55-80%, 55-85%, 55-90%, 55-95%, 60-70%, 60-75%, 60-80%, 60-85%, 60-90%, 60-95%, 65-75%, 65-80%, 65-85%, 65-90%, 65-95%, 70-80%, 70-85%, 70-90%, 70-95%, 75-85%, 75-90%, 75-95%, 80-90%, 80-95%, or 90-95%.

[0748] In some embodiments, the AAV particles comprising a nucleic acid sequence encoding the siRNA molecules of the present disclosure may be used to suppress target protein in cortical neurons. The suppression of a target protein in cortical neurons may be, independently, suppressed by 5%, 10%, 15%, 20%, 25%, 30%, 35%, 40%, 45%, 50%, 55%, 60%, 65%, 70%, 75%, 80%, 85%, 90%, 95%, or more than 95%, 5-15%, 5-20%, 5-25%, 5-30%, 5-35%, 5-40%, 5-45%, 5-50%, 5-55%, 5-60%, 5-65%, 5-70%, 5-75%, 5-80%, 5-85%, 5-90%, 5-95%, 10-20%, 10-25%, 10-30%, 10-35%, 10-40%, 10-45%, 10-50%, 10-55%, 10-60%, 10-65%, 10-70%, 10-75%, 10-80%, 10-85%, 10-90%, 10-95%, 15-25%, 15-30%, 15-35%, 15-40%, 15-45%, 15-50%, 15-55%, 15-60%, 15-65%, 15-70%, 15-75%, 15-80%, 15-85%, 15-90%, 15-95%, 20-30%, 20-35%, 20-40%, 20-45%, 20-50%, 20-55%, 20-60%, 20-65%, 20-70%, 20-75%, 20-80%, 20-85%, 20-90%, 20-95%, 25-35%, 25-40%, 25-45%, 25-50%, 25-55%, 25-60%, 25-65%, 25-70%, 25-75%, 25-80%, 25-85%, 25-90%, 25-95%, 30-40%, 30-45%, 30-50%, 30-55%, 30-60%, 30-65%, 30-70%, 30-75%, 30-80%, 30-85%, 30-90%, 30-95%, 35-45%, 35-50%, 35-55%, 35-60%, 35-65%, 35-70%, 35-75%, 35-80%, 35-85%, 35-90%, 35-95%, 40-50%, 40-55%, 40-60%, 40-65%, 40-70%, 40-75%, 40-80%, 40-85%, 40-90%, 40-95%, 45-55%, 45-60%, 45-65%, 45-70%, 45-75%, 45-80%, 45-85%, 45-90%, 45-95%, 50-60%, 50-65%, 50-70%, 50-75%, 50-80%, 50-85%, 50-90%, 50-95%, 55-65%, 55-70%, 55-75%, 55-80%, 55-85%, 55-90%, 55-95%, 60-70%, 60-75%, 60-80%, 60-85%, 60-90%, 60-95%, 65-75%, 65-80%, 65-85%, 65-90%, 65-95%, 70-80%, 70-85%, 70-90%, 70-95%, 75-85%, 75-90%, 75-95%, 80-90%, 80-95%, or 90-95%. The reduction may be 5%, 10%, 15%, 20%, 25%, 30%, 35%, 40%, 45%, 50%, 55%, 60%, 65%, 70%, 75%, 80%, 85%, 90%, 95%, or more than 95%, 5-15%, 5-20%, 5-25%, 5-30%, 5-35%, 5-40%, 5-45%, 5-50%, 5-55%, 5-60%, 5-65%, 5-70%, 5-75%, 5-80%, 5-85%, 5-90%, 5-95%, 10-20%, 10-25%, 10-30%, 10-35%, 10-40%, 10-45%, 10-50%, 10-55%, 10-60%, 10-65%, 10-70%, 10-75%, 10-80%, 10-85%, 10-90%, 10-95%, 15-25%, 15-30%, 15-35%, 15-40%, 15-45%, 15-50%, 15-55%, 15-60%, 15-65%, 15-70%, 15-75%, 15-80%, 15-85%, 15-90%, 15-95%, 20-30%, 20-35%, 20-40%, 20-45%, 20-50%, 20-55%, 20-60%, 20-65%, 20-70%, 20-75%, 20-80%, 20-85%, 20-90%, 20-95%, 25-35%, 25-40%, 25-45%, 25-50%, 25-55%, 25-60%, 25-65%, 25-70%, 25-75%, 25-80%, 25-85%, 25-90%, 25-95%, 30-40%, 30-45%, 30-50%, 30-55%, 30-60%, 30-65%, 30-70%, 30-75%, 30-80%, 30-85%, 30-90%, 30-95%, 35-45%, 35-50%, 35-55%, 35-60%, 35-65%, 35-70%, 35-75%, 35-80%, 35-85%, 35-90%, 35-95%, 40-50%, 40-55%, 40-60%, 40-65%, 40-70%, 40-75%, 40-80%, 40-85%, 40-90%, 40-95%, 45-55%, 45-60%, 45-65%, 45-70%, 45-75%, 45-80%, 45-85%, 45-90%, 45-95%, 50-60%, 50-65%, 50-70%, 50-75%, 50-80%, 50-85%, 50-90%, 50-95%, 55-65%, 55-70%, 55-75%, 55-80%, 55-85%, 55-90%, 55-95%, 60-70%, 60-75%, 60-80%, 60-85%, 60-90%, 60-95%, 65-75%, 65-80%, 65-85%, 65-90%, 65-95%, 70-80%, 70-85%, 70-90%, 70-95%, 75-85%, 75-90%, 75-95%, 80-90%, 80-95%, or 90-95%.

[0749] In some embodiments, the AAV particles comprising a nucleic acid sequence encoding the siRNA molecules of the present disclosure may be used to suppress a target protein in hippocampal neurons. The suppression of a target protein in the hippocampal neurons may be, independently, suppressed by 5%, 10%, 15%, 20%, 25%, 30%, 35%, 40%, 45%, 50%, 55%, 60%, 65%, 70%, 75%, 80%, 85%, 90%, 95%, or more than 95%, 5-15%, 5-20%, 5-25%, 5-30%, 5-35%, 5-40%, 5-45%, 5-50%, 5-55%, 5-60%, 5-65%, 5-70%, 5-75%, 5-80%, 5-85%, 5-90%, 5-95%, 10-20%, 10-25%, 10-30%, 10-35%, 10-40%, 10-45%, 10-50%, 10-55%, 10-60%, 10-65%, 10-70%, 10-75%, 10-80%, 10-85%, 10-90%, 10-95%, 15-25%, 15-30%, 15-35%, 15-40%, 15-45%, 15-50%, 15-55%, 15-60%, 15-65%, 15-70%, 15-75%, 15-80%, 15-85%, 15-90%, 15-95%, 20-30%, 20-35%, 20-40%, 20-45%, 20-50%, 20-55%, 20-60%, 20-65%, 20-70%, 20-75%, 20-80%, 20-85%, 20-90%, 20-95%, 25-35%, 25-40%, 25-45%, 25-50%, 25-55%, 25-60%, 25-65%, 25-70%, 25-75%, 25-80%, 25-85%, 25-90%, 25-95%, 30-40%, 30-45%, 30-50%, 30-55%, 30-60%, 30-65%, 30-70%, 30-75%, 30-80%, 30-85%, 30-90%, 30-95%, 35-45%, 35-50%, 35-55%, 35-60%, 35-65%, 35-70%, 35-75%, 35-80%, 35-85%, 35-90%, 35-95%, 40-50%, 40-55%, 40-60%, 40-65%, 40-70%, 40-75%, 40-80%, 40-85%, 40-90%, 40-95%, 45-55%, 45-60%, 45-65%, 45-70%, 45-75%, 45-80%, 45-85%, 45-90%, 45-95%, 50-60%, 50-65%, 50-70%, 50-75%, 50-80%, 50-85%, 50-90%, 50-95%, 55-65%, 55-70%, 55-75%, 55-80%, 55-85%, 55-90%, 55-95%, 60-70%, 60-75%, 60-80%, 60-85%, 60-90%, 60-95%, 65-75%, 65-80%, 65-85%, 65-90%, 65-95%, 70-80%, 70-85%, 70-90%, 70-95%, 75-85%, 75-90%, 75-95%, 80-90%, 80-95%, or 90-95%. The reduction may be 5%, 10%, 15%, 20%, 25%, 30%, 35%, 40%, 45%, 50%, 55%, 60%, 65%, 70%, 75%, 80%, 85%, 90%, 95%, or more than 95%, 5-15%, 5-20%, 5-25%, 5-30%, 5-35%, 5-40%, 5-45%, 5-50%, 5-55%, 5-60%, 5-65%, 5-70%, 5-75%, 5-80%, 5-85%, 5-90%, 5-95%, 10-20%, 10-25%, 10-30%, 10-35%, 10-40%, 10-45%, 10-50%, 10-55%, 10-60%, 10-65%, 10-70%, 10-75%, 10-80%, 10-85%, 10-90%, 10-95%, 15-25%, 15-30%, 15-35%, 15-40%, 15-45%, 15-50%, 15-55%, 15-60%, 15-65%, 15-70%, 15-75%, 15-80%, 15-85%, 15-90%, 15-95%, 20-30%, 20-35%, 20-40%, 20-45%, 20-50%, 20-55%, 20-60%, 20-65%, 20-70%, 20-75%, 20-80%, 20-85%, 20-90%, 20-95%, 25-35%, 25-40%, 25-45%, 25-50%, 25-55%, 25-60%, 25-65%, 25-70%, 25-75%, 25-80%, 25-85%, 25-90%, 25-95%, 30-40%, 30-45%, 30-50%, 30-55%, 30-60%, 30-65%, 30-70%, 30-75%, 30-80%, 30-85%, 30-90%, 30-95%, 35-45%, 35-50%, 35-55%, 35-60%, 35-65%, 35-70%, 35-75%, 35-80%, 35-85%, 35-90%, 35-95%, 40-50%, 40-55%, 40-60%, 40-65%, 40-70%, 40-75%, 40-80%, 40-85%, 40-90%, 40-95%, 45-55%, 45-60%, 45-65%, 45-70%, 45-75%, 45-80%, 45-85%, 45-90%, 45-95%, 50-60%, 50-65%, 50-70%, 50-75%, 50-80%, 50-85%, 50-90%, 50-95%, 55-65%, 55-70%, 55-75%, 55-80%, 55-85%, 55-90%, 55-95%, 60-70%, 60-75%, 60-80%, 60-85%, 60-90%, 60-95%, 65-75%, 65-80%, 65-85%, 65-90%, 65-95%, 70-80%, 70-85%, 70-90%, 70-95%, 75-85%, 75-90%, 75-95%, 80-90%, 80-95%, or 90-95%.

[0750] In some embodiments, the AAV particles comprising a nucleic acid sequence encoding the siRNA molecules of the present disclosure may be used to suppress a target protein in DRG and/or sympathetic neurons. The suppression of a target protein in the DRG and/or sympathetic neurons may be, independently, suppressed by 5%, 10%, 15%, 20%, 25%, 30%, 35%, 40%, 45%, 50%, 55%, 60%, 65%, 70%, 75%, 80%, 85%, 90%, 95%, or more than 95%, 5-15%, 5-20%, 5-25%, 5-30%, 5-35%, 5-40%, 5-45%, 5-50%, 5-55%, 5-60%, 5-65%, 5-70%, 5-75%, 5-80%, 5-85%, 5-90%, 5-95%, 10-20%, 10-25%, 10-30%, 10-35%, 10-40%, 10-45%, 10-50%, 10-55%, 10-60%, 10-65%, 10-70%, 10-75%, 10-80%, 10-85%, 10-90%, 10-95%, 15-25%, 15-30%, 15-35%, 15-40%, 15-45%, 15-50%, 15-55%, 15-60%, 15-65%, 15-70%, 15-75%, 15-80%, 15-85%, 15-90%, 15-95%, 20-30%, 20-35%, 20-40%, 20-45%, 20-50%, 20-55%, 20-60%, 20-65%, 20-70%, 20-75%, 20-80%, 20-85%, 20-90%, 20-95%, 25-35%, 25-40%, 25-45%, 25-50%, 25-55%, 25-60%, 25-65%, 25-70%, 25-75%, 25-80%, 25-85%, 25-90%, 25-95%, 30-40%, 30-45%, 30-50%, 30-55%, 30-60%, 30-65%, 30-70%, 30-75%, 30-80%, 30-85%, 30-90%, 30-95%, 35-45%, 35-50%, 35-55%, 35-60%, 35-65%, 35-70%, 35-75%, 35-80%, 35-85%, 35-90%, 35-95%, 40-50%, 40-55%, 40-60%, 40-65%, 40-70%, 40-75%, 40-80%, 40-85%, 40-90%, 40-95%, 45-55%, 45-60%, 45-65%, 45-70%, 45-75%, 45-80%, 45-85%, 45-90%, 45-95%, 50-60%, 50-65%, 50-70%, 50-75%, 50-80%, 50-85%, 50-90%, 50-95%, 55-65%, 55-70%, 55-75%, 55-80%, 55-85%, 55-90%, 55-95%, 60-70%, 60-75%, 60-80%, 60-85%, 60-90%, 60-95%, 65-75%, 65-80%, 65-85%, 65-90%, 65-95%, 70-80%, 70-85%, 70-90%, 70-95%, 75-85%, 75-90%, 75-95%, 80-90%, 80-95%, or 90-95%. The reduction may be 5%, 10%, 15%, 20%, 25%, 30%, 35%, 40%, 45%, 50%, 55%, 60%, 65%, 70%, 75%, 80%, 85%, 90%, 95%, or more than 95%, 5-15%, 5-20%, 5-25%, 5-30%, 5-35%, 5-40%, 5-45%, 5-50%, 5-55%, 5-60%, 5-65%, 5-70%, 5-75%, 5-80%, 5-85%, 5-90%, 5-95%, 10-20%, 10-25%, 10-30%, 10-35%, 10-40%, 10-45%, 10-50%, 10-55%, 10-60%, 10-65%, 10-70%, 10-75%, 10-80%, 10-85%, 10-90%, 10-95%, 15-25%, 15-30%, 15-35%, 15-40%, 15-45%, 15-50%, 15-55%, 15-60%, 15-65%, 15-70%, 15-75%, 15-80%, 15-85%, 15-90%, 15-95%, 20-30%, 20-35%, 20-40%, 20-45%, 20-50%, 20-55%, 20-60%, 20-65%, 20-70%, 20-75%, 20-80%, 20-85%, 20-90%, 20-95%, 25-35%, 25-40%, 25-45%, 25-50%, 25-55%, 25-60%, 25-65%, 25-70%, 25-75%, 25-80%, 25-85%, 25-90%, 25-95%, 30-40%, 30-45%, 30-50%, 30-55%, 30-60%, 30-65%, 30-70%, 30-75%, 30-80%, 30-85%, 30-90%, 30-95%, 35-45%, 35-50%, 35-55%, 35-60%, 35-65%, 35-70%, 35-75%, 35-80%, 35-85%, 35-90%, 35-95%, 40-50%, 40-55%, 40-60%, 40-65%, 40-70%, 40-75%, 40-80%, 40-85%, 40-90%, 40-95%, 45-55%, 45-60%, 45-65%, 45-70%, 45-75%, 45-80%, 45-85%, 45-90%, 45-95%, 50-60%, 50-65%, 50-70%, 50-75%, 50-80%, 50-85%, 50-90%, 50-95%, 55-65%, 55-70%, 55-75%, 55-80%, 55-85%, 55-90%, 55-95%, 60-70%, 60-75%, 60-80%, 60-85%, 60-90%, 60-95%, 65-75%, 65-80%, 65-85%, 65-90%, 65-95%, 70-80%, 70-85%, 70-90%, 70-95%, 75-85%, 75-90%, 75-95%, 80-90%, 80-95%, or 90-95%.

[0751] In some embodiments, the AAV particles comprising a nucleic acid sequence encoding the siRNA molecules of the present disclosure may be used to suppress a target protein in sensory neurons in order to treat neurological disease. Target protein in sensory neurons may be suppressed by 5%, 10%, 15%, 20%, 25%, 30%, 35%, 40%, 45%, 50%, 55%, 60%, 65%, 70%, 75%, 80%, 85%, 90%, 95%, or more than 95%, 5-15%, 5-20%, 5-25%, 5-30%, 5-35%, 5-40%, 5-45%, 5-50%, 5-55%, 5-60%, 5-65%, 5-70%, 5-75%, 5-80%, 5-85%, 5-90%, 5-95%, 10-20%, 10-25%, 10-30%, 10-35%, 10-40%, 10-45%, 10-50%, 10-55%, 10-60%, 10-65%, 10-70%, 10-75%, 10-80%, 10-85%, 10-90%, 10-95%, 15-25%, 15-30%, 15-35%, 15-40%, 15-45%, 15-50%, 15-55%, 15-60%, 15-65%, 15-70%, 15-75%, 15-80%, 15-85%, 15-90%, 15-95%, 20-30%, 20-35%, 20-40%, 20-45%, 20-50%, 20-55%, 20-60%, 20-65%, 20-70%, 20-75%, 20-80%, 20-85%, 20-90%, 20-95%, 25-35%, 25-40%, 25-45%, 25-50%, 25-55%, 25-60%, 25-65%, 25-70%, 25-75%, 25-80%, 25-85%, 25-90%, 25-95%, 30-40%, 30-45%, 30-50%, 30-55%, 30-60%, 30-65%, 30-70%, 30-75%, 30-80%, 30-85%, 30-90%, 30-95%, 35-45%, 35-50%, 35-55%, 35-60%, 35-65%, 35-70%, 35-75%, 35-80%, 35-85%, 35-90%, 35-95%, 40-50%, 40-55%, 40-60%, 40-65%, 40-70%, 40-75%, 40-80%, 40-85%, 40-90%, 40-95%, 45-55%, 45-60%, 45-65%, 45-70%, 45-75%, 45-80%, 45-85%, 45-90%, 45-95%, 50-60%, 50-65%, 50-70%, 50-75%, 50-80%, 50-85%, 50-90%, 50-95%, 55-65%, 55-70%, 55-75%, 55-80%, 55-85%, 55-90%, 55-95%, 60-70%, 60-75%, 60-80%, 60-85%, 60-90%, 60-95%, 65-75%, 65-80%, 65-85%, 65-90%, 65-95%, 70-80%, 70-85%, 70-90%, 70-95%, 75-85%, 75-90%, 75-95%, 80-90%, 80-95%, or 90-95%. Target protein in the sensory neurons may be reduced may be 5%, 10%, 15%, 20%, 25%, 30%, 35%, 40%, 45%, 50%, 55%, 60%, 65%, 70%, 75%, 80%, 85%, 90%, 95%, or more than 95%, 5-15%, 5-20%, 5-25%, 5-30%, 5-35%, 5-40%, 5-45%, 5-50%, 5-55%, 5-60%, 5-65%, 5-70%, 5-75%, 5-80%, 5-85%, 5-90%, 5-95%, 10-20%, 10-25%, 10-30%, 10-35%, 10-40%, 10-45%, 10-50%, 10-55%, 10-60%, 10-65%, 10-70%, 10-75%, 10-80%, 10-85%, 10-90%, 10-95%, 15-25%, 15-30%, 15-35%, 15-40%, 15-45%, 15-50%, 15-55%, 15-60%, 15-65%, 15-70%, 15-75%, 15-80%, 15-85%, 15-90%, 15-95%, 20-30%, 20-35%, 20-40%, 20-45%, 20-50%, 20-55%, 20-60%, 20-65%, 20-70%, 20-75%, 20-80%, 20-85%, 20-90%, 20-95%, 25-35%, 25-40%, 25-45%, 25-50%, 25-55%, 25-60%, 25-65%, 25-70%, 25-75%, 25-80%, 25-85%, 25-90%, 25-95%, 30-40%, 30-45%, 30-50%, 30-55%, 30-60%, 30-65%, 30-70%, 30-75%, 30-80%, 30-85%, 30-90%, 30-95%, 35-45%, 35-50%, 35-55%, 35-60%, 35-65%, 35-70%, 35-75%, 35-80%, 35-85%, 35-90%, 35-95%, 40-50%, 40-55%, 40-60%, 40-65%, 40-70%, 40-75%, 40-80%, 40-85%, 40-90%, 40-95%, 45-55%, 45-60%, 45-65%, 45-70%, 45-75%, 45-80%, 45-85%, 45-90%, 45-95%, 50-60%, 50-65%, 50-70%, 50-75%, 50-80%, 50-85%, 50-90%, 50-95%, 55-65%, 55-70%, 55-75%, 55-80%, 55-85%, 55-90%, 55-95%, 60-70%, 60-75%, 60-80%, 60-85%, 60-90%, 60-95%, 65-75%, 65-80%, 65-85%, 65-90%, 65-95%, 70-80%, 70-85%, 70-90%, 70-95%, 75-85%, 75-90%, 75-95%, 80-90%, 80-95%, or 90-95%.

[0752] In some embodiments, the AAV particles comprising a nucleic acid sequence encoding the siRNA molecules of the present disclosure may be used to suppress a target protein and reduce symptoms of neurological disease in a subject. The suppression of target protein and/or the reduction of symptoms of neurological disease may be, independently, reduced or suppressed by 5%, 10%, 15%, 20%, 25%, 30%, 35%, 40%, 45%, 50%, 55%, 60%, 65%, 70%, 75%, 80%, 85%, 90%, 95%, or more than 95%, 5-15%, 5-20%, 5-25%, 5-30%, 5-35%, 5-40%, 5-45%, 5-50%, 5-55%, 5-60%, 5-65%, 5-70%, 5-75%, 5-80%, 5-85%, 5-90%, 5-95%, 10-20%, 10-25%, 10-30%, 10-35%, 10-40%, 10-45%, 10-50%, 10-55%, 10-60%, 10-65%, 10-70%, 10-75%, 10-80%, 10-85%, 10-90%, 10-95%, 15-25%, 15-30%, 15-35%, 15-40%, 15-45%, 15-50%, 15-55%, 15-60%, 15-65%, 15-70%, 15-75%, 15-80%, 15-85%, 15-90%, 15-95%, 20-30%, 20-35%, 20-40%, 20-45%, 20-50%, 20-55%, 20-60%, 20-65%, 20-70%, 20-75%, 20-80%, 20-85%, 20-90%, 20-95%, 25-35%, 25-40%, 25-45%, 25-50%, 25-55%, 25-60%, 25-65%, 25-70%, 25-75%, 25-80%, 25-85%, 25-90%, 25-95%, 30-40%, 30-45%, 30-50%, 30-55%, 30-60%, 30-65%, 30-70%, 30-75%, 30-80%, 30-85%, 30-90%, 30-95%, 35-45%, 35-50%, 35-55%, 35-60%, 35-65%, 35-70%, 35-75%, 35-80%, 35-85%, 35-90%, 35-95%, 40-50%, 40-55%, 40-60%, 40-65%, 40-70%, 40-75%, 40-80%, 40-85%, 40-90%, 40-95%, 45-55%, 45-60%, 45-65%, 45-70%, 45-75%, 45-80%, 45-85%, 45-90%, 45-95%, 50-60%, 50-65%, 50-70%, 50-75%, 50-80%, 50-85%, 50-90%, 50-95%, 55-65%, 55-70%, 55-75%, 55-80%, 55-85%, 55-90%, 55-95%, 60-70%, 60-75%, 60-80%, 60-85%, 60-90%, 60-95%, 65-75%, 65-80%, 65-85%, 65-90%, 65-95%, 70-80%, 70-85%, 70-90%, 70-95%, 75-85%, 75-90%, 75-95%, 80-90%, 80-95%, or 90-95%.

[0753] In some embodiments, the AAV particles comprising a nucleic acid sequence encoding the siRNA molecules of the present disclosure may be used to reduce the decline of functional capacity and activities of daily living as measured by a standard evaluation system such as, but not limited to, the total functional capacity (TFC) scale.

[0754] In some embodiments, the present composition is administered as a solo therapeutic or as combination therapeutic for the treatment of neurological disease.

[0755] The AAV particles encoding siRNA duplexes targeting the gene of interest may be used in combination with one or more other therapeutic agents. By “in combination with,” it is not intended to imply that the agents must be administered at the same time and/or formulated for delivery together, although these methods of delivery are within the scope of the present disclosure. Compositions can be administered concurrently with, prior to, or subsequent to, one or more other desired therapeutics or medical procedures. In general, each agent will be administered at a dose and/or on a time schedule determined for that agent.

[0756] Therapeutic agents that may be used in combination with the AAV particles encoding the nucleic acid sequence for the siRNA molecules of the present disclosure can be small molecule compounds which are antioxidants, anti-inflammatory agents, anti-apoptosis agents, calcium regulators, antiglutamatergic agents, structural protein inhibitors, compounds involved in muscle function, and compounds involved in metal ion regulation.

[0757] Compounds tested for treating neurological disease which may be used in combination with the AAV particles comprising a nucleic acid sequence encoding the siRNA molecules of the present disclosure include, but are not limited to, cholinesterase inhibitors (donepezil, rivastigmine, galantamine), NMDA receptor antagonists such as memantine, anti-psychotics, anti-depressants, anti-convulsants (e.g., sodium valproate and levetiracetam for myoclonus), secretase inhibitors, amyloid aggregation inhibitors, copper or zinc modulators, BACE inhibitors, inhibitors of tau aggregation, such as Methylene blue, phenothiazines, anthraquinones, n-phenylamines or rhodamines, microtubule stabilizers such as NAP, taxol or paclitaxel, kinase or phosphatase inhibitors such as those targeting GSK3β (lithium) or PP2A, immunization with A3 peptides or tau phospho-epitopes, anti-tau or anti-amyloid antibodies, dopamine-depleting agents (e.g., tetrabenazine for chorea), benzodiazepines (e.g., clonazepam for myoclonus, chorea, dystonia, rigidity, and/or spasticity), amino acid precursors of dopamine (e.g., levodopa for rigidity), skeletal muscle relaxants (e.g., baclofen, tizanidine for rigidity and/or spasticity), inhibitors for acetylcholine release at the neuromuscular junction to cause muscle paralysis (e.g., botulinum toxin for bruxism and/or dystonia), atypical neuroleptics (e.g., olanzapine and quetiapine for psychosis and/or irritability, risperidone, sulpiride and haloperidol for psychosis, chorea and/or irritability, clozapine for treatment-resistant psychosis, aripiprazole for psychosis with prominent negative symptoms), selective serotonin reuptake inhibitors (SSRIs) (e.g., citalopram, fluoxetine, paroxetine, sertraline, mirtazapine, venlafaxine for depression, anxiety, obsessive compulsive behavior and/or irritability), hypnotics (e.g., xopiclone and/or zolpidem for altered sleep-wake cycle), anticonvulsants (e.g., sodium valproate and carbamazepine for mania or hypomania) and mood stabilizers (e.g., lithium for mania or hypomania).

[0758] Neurotrophic factors may be used in combination therapy with the AAV particles encoding the nucleic acid sequence for the siRNA molecules of the present disclosure for treating neurological disease. Generally, a neurotrophic factor is defined as a substance that promotes survival, growth, differentiation, proliferation and/or maturation of a neuron, or stimulates increased activity of a neuron. In some embodiments, the present methods further comprise delivery of one or more trophic factors into the subject in need of treatment. Trophic factors may include, but are not limited to, IGF-I, GDNF, BDNF, CTNF, VEGF, Colivelin, Xaliproden, Thyrotrophin-releasing hormone and ADNF, and variants thereof.

[0759] In one aspect, the AAV particle encoding the nucleic acid sequence for the at least one siRNA duplex targeting the gene of interest may be co-administered with AAV particles expressing neurotrophic factors such as AAV-IGF-I (See e.g., Vincent et al., Neuromolecular medicine, 2004, 6, 79-85; the content of which is incorporated herein by reference in its entirety) and AAV-GDNF (See e.g., Wang et al., J Neurosci., 2002, 22, 6920-6928; the contents of which are incorporated herein by reference in their entirety).

[0760] In some embodiments, the composition for treating neurological disease, as described herein, is administered to the subject in need intravenously, intramuscularly, subcutaneously, intraperitoneally, intraparenchymally, intrathecally and/or intraventricularly, allowing the siRNA molecules or vectors comprising the siRNA molecules to pass through one or both the blood-brain barrier and the blood spinal cord barrier. In some aspects, the method includes administering (e.g., intraparenchymal administration, intraventricular administration and/or intrathecally administration) directly to the central nervous system (CNS) of a subject (using, e.g., an infusion pump and/or a delivery scaffold) a therapeutically effective amount of a composition comprising AAV particles encoding the nucleic acid sequence for the siRNA molecules of the present disclosure. The vectors may be used to silence or suppress target gene expression, and/or reducing one or more symptoms of neurological disease in the subject such that the subject is therapeutically treated.

[0761] In some embodiments, administration of the AAV particles encoding a siRNA of the disclosure, to a subject may lower target protein levels in a subject. The target protein levels may be lowered by about 30%, 40%, 50%, 60%, 70%, 80%, 85%, 90%, 95% and 100%, or at least 20-30%, 20-40%, 20-50%, 20-60%, 20-70%, 20-80%, 20-90%, 20-95%, 20-100%, 30-40%, 30-50%, 30-60%, 30-70%, 30-80%, 30-90%, 30-95%, 30-100%, 40-50%, 40-60%, 40-70%, 40-80%, 40-90%, 40-95%, 40-100%, 50-60%, 50-70%, 50-80%, 50-90%, 50-95%, 50-100%, 60-70%, 60-80%, 60-90%, 60-95%, 60-100%, 70-80%, 70-90%, 70-95%, 70-100%, 80-90%, 80-95%, 80-100%, 90-95%, 90-100% or 95-100% in a subject such as, but not limited to, the CNS, a region of the CNS, or a specific cell of the CNS of a subject. As a non-limiting example, the AAV particles may lower the protein levels of a target protein by at least 50%. As a non-limiting example, the AAV particles may lower the proteins levels of a target protein by at least 40%.

[0762] In some embodiments, administration of the AAV particles encoding a siRNA of the disclosure, to a subject may lower the expression of a target protein in a subject. The expression of a target protein may be lowered by about 30%, 40%, 50%, 60%, 70%, 80%, 85%, 90%, 95% and 100%, or at least 20-30%, 20-40%, 20-50%, 20-60%, 20-70%, 20-80%, 20-90%, 20-95%, 20-100%, 30-40%, 30-50%, 30-60%, 30-70%, 30-80%, 30-90%, 30-95%, 30-100%, 40-50%, 40-60%, 40-70%, 40-80%, 40-90%, 40-95%, 40-100%, 50-60%, 50-70%, 50-80%, 50-90%, 50-95%, 50-100%, 60-70%, 60-80%, 60-90%, 60-95%, 60-100%, 70-80%, 70-90%, 70-95%, 70-100%, 80-90%, 80-95%, 80-100%, 90-95%, 90-100% or 95-100% in a subject such as, but not limited to, the CNS, a region of the CNS, or a specific cell of the CNS of a subject. As a non-limiting example, the AAV particles may lower the expression of a target protein by at least 50%. As a non-limiting example, the AAV particles may lower the expression of a target protein by at least 40%.

[0763] In some embodiments, intravenous administration of the AAV particles encoding a siRNA of the disclosure, to a subject may lower the expression of a target protein in the CNS of a subject. The expression of a target protein may be lowered by about 30%, 40%, 50%, 60%, 70%, 80%, 85%, 90%, 95% and 100%, or at least 20-30%, 20-40%, 20-50%, 20-60%, 20-70%, 20-80%, 20-90%, 20-95%, 20-100%, 30-40%, 30-50%, 30-60%, 30-70%, 30-80%, 30-90%, 30-95%, 30-100%, 40-50%, 40-60%, 40-70%, 40-80%, 40-90%, 40-95%, 40-100%, 50-60%, 50-70%, 50-80%, 50-90%, 50-95%, 50-100%, 60-70%, 60-80%, 60-90%, 60-95%, 60-100%, 70-80%, 70-90%, 70-95%, 70-100%, 80-90%, 80-95%, 80-100%, 90-95%, 90-100% or 95-100% in a subject such as, but not limited to, the CNS, a region of the CNS, or a specific cell of the CNS of a subject. As a non-limiting example, the AAV particles may lower the expression of a target protein by at least 50%. As a non-limiting example, the AAV particles may lower the expression of a target protein by at least 40%.

[0764] In some embodiments, administration of the AAV particles to a subject will reduce the expression of a target protein in a subject and the reduction of expression of the target protein will reduce the effects and/or symptoms of neurological disease in a subject.

[0765] In some embodiments, the AAV particles may be used to decrease target protein in a subject. The decrease may independently be 5%, 10%, 15%, 20%, 25%, 30%, 35%, 40%, 45%, 50%, 55%, 60%, 65%, 70%, 75%, 80%, 85%, 90%, 95%, or more than 95%, 5-15%, 5-20%, 5-25%, 5-30%, 5-35%, 5-40%, 5-45%, 5-50%, 5-55%, 5-60%, 5-65%, 5-70%, 5-75%, 5-80%, 5-85%, 5-90%, 5-95%, 10-20%, 10-25%, 10-30%, 10-35%, 10-40%, 10-45%, 10-50%, 10-55%, 10-60%, 10-65%, 10-70%, 10-75%, 10-80%, 10-85%, 10-90%, 10-95%, 15-25%, 15-30%, 15-35%, 15-40%, 15-45%, 15-50%, 15-55%, 15-60%, 15-65%, 15-70%, 15-75%, 15-80%, 15-85%, 15-90%, 15-95%, 20-30%, 20-35%, 20-40%, 20-45%, 20-50%, 20-55%, 20-60%, 20-65%, 20-70%, 20-75%, 20-80%, 20-85%, 20-90%, 20-95%, 25-35%, 25-40%, 25-45%, 25-50%, 25-55%, 25-60%, 25-65%, 25-70%, 25-75%, 25-80%, 25-85%, 25-90%, 25-95%, 30-40%, 30-45%, 30-50%, 30-55%, 30-60%, 30-65%, 30-70%, 30-75%, 30-80%, 30-85%, 30-90%, 30-95%, 35-45%, 35-50%, 35-55%, 35-60%, 35-65%, 35-70%, 35-75%, 35-80%, 35-85%, 35-90%, 35-95%, 40-50%, 40-55%, 40-60%, 40-65%, 40-70%, 40-75%, 40-80%, 40-85%, 40-90%, 40-95%, 45-55%, 45-60%, 45-65%, 45-70%, 45-75%, 45-80%, 45-85%, 45-90%, 45-95%, 50-60%, 50-65%, 50-70%, 50-75%, 50-80%, 50-85%, 50-90%, 50-95%, 55-65%, 55-70%, 55-75%, 55-80%, 55-85%, 55-90%, 55-95%, 60-70%, 60-75%, 60-80%, 60-85%, 60-90%, 60-95%, 65-75%, 65-80%, 65-85%, 65-90%, 65-95%, 70-80%, 70-85%, 70-90%, 70-95%, 75-85%, 75-90%, 75-95%, 80-90%, 80-95%, or 90-95%. As a non-limiting example, a subject may have a decrease of 70% of target protein. As a non-limiting example, a subject may have a 50% decrease of target protein. As a non-limiting example, a subject may have a 40% decrease of target protein. As a non-limiting example, a subject may have a decrease of 10% of target protein.

### V. Kits and Devices

### Kits

[0766] In some embodiments, the disclosure provides a variety of kits for conveniently and/or effectively carrying out methods described herein. Typically, kits will comprise sufficient amounts and/or numbers of components to allow a user to perform multiple treatments of a subject(s) and/or to perform multiple experiments.

[0767] Any of the AAV particles of the present disclosure may be comprised in a kit. In some embodiments, kits may further include reagents and/or instructions for creating and/or synthesizing compounds and/or compositions described herein. In some embodiments, kits may also include one or more buffers. In some embodiments, kits may include components for making protein or nucleic acid arrays or libraries and thus, may include, for example, solid supports.

[0768] In some embodiments, kit components may be packaged either in aqueous media or in lyophilized form. The container means of the kits will generally include at least one vial, test tube, flask, bottle, syringe or other container means, into which a component may be placed, and preferably, suitably aliquoted. Where there is more than one kit component, (labeling reagent and label may be packaged together), kits may also generally contain second, third or other additional containers into which additional components may be separately placed. In some embodiments, kits may also comprise second container means for containing sterile, pharmaceutically acceptable buffers and/or other diluents. In some embodiments, various combinations of components may be comprised in one or more vial. Kits may also typically include means for containing compounds and/or compositions described herein, e.g., proteins, nucleic acids, and any other reagent containers in close confinement for commercial sale. Such containers may include injection or blow-molded plastic containers into which desired vials are retained.

[0769] In some embodiments, kit components are provided in one and/or more liquid solutions. In some embodiments, liquid solutions are aqueous solutions, with sterile aqueous solutions being particularly preferred. In some embodiments, kit components may be provided as dried powder(s). When reagents and/or components are provided as dry powders, such powders may be reconstituted by the addition of suitable volumes of solvent. In some embodiments, it is envisioned that solvents may also be provided in another container means. In some embodiments, labeling dyes are provided as dried powders. In some embodiments, it is contemplated that 10, 20, 30, 40, 50, 60, 70, 80, 90, 100, 120, 120, 130, 140, 150, 160, 170, 180, 190, 200, 300, 400, 500, 600, 700, 800, 900, 1000 micrograms or at least or at most those amounts of dried dye are provided in kits described herein. In such embodiments, dye may then be resuspended in any suitable solvent, such as DMSO.

[0770] In some embodiments, kits may include instructions for employing kit components as well the use of any other reagent not included in the kit. Instructions may include variations that may be implemented.

### Devices

[0771] In some embodiments, the AAV particles may delivered to a subject using a device to deliver the AAV particles and a head fixation assembly. The head fixation assembly may be, but is not limited to, any of the head fixation assemblies sold by MRI interventions. As a non-limiting example, the head fixation assembly may be any of the assemblies described in U.S. Pat. Nos. 8,099,150, 8,548,569 and 9,031,636 and International Patent Publication Nos. WO201108495 and WO2014014585, the contents of each of which are incorporated by reference in their entirety. A head fixation assembly may be used in combination with an MRI compatible drill such as, but not limited to, the MRI compatible drills described in International Patent Publication No. WO2013181008 and US Patent Publication No. US20130325012, the contents of which are herein incorporated by reference in their entirety.

[0772] In some embodiments, the AAV particles may be delivered using a method, system and/or computer program for positioning apparatus to a target point on a subject to deliver the AAV particles. As a non-limiting example, the method, system and/or computer program may be the methods, systems and/or computer programs described in U.S. Pat. No. 8,340,743, the contents of which are herein incorporated by reference in their entirety. The method may include: determining a target point in the body and a reference point, wherein the target point and the reference point define a planned trajectory line (PTL) extending through each; determining a visualization plane, wherein the PTL intersects the visualization plane at a sighting point; mounting the guide device relative to the body to move with respect to the PTL, wherein the guide device does not intersect the visualization plane; determining a point of intersection (GPP) between the guide axis and the visualization plane; and aligning the GPP with the sighting point in the visualization plane.

[0773] In some embodiments, the AAV particles may be delivered to a subject using a convention-enhanced delivery device. Non-limiting examples of targeted delivery of drugs using convection are described in US Patent Publication Nos. US20100217228, US20130035574 and US20130035660 and International Patent Publication No. WO2013019830 and WO2008144585, the contents of each of which are herein incorporated by reference in their entirety.

[0774] In some embodiments, a subject may be imaged prior to, during and/or after delivery of the AAV particles. The imaging method may be a method known in the art and/or described herein, such as but not limited to, magnetic resonance imaging (MRI). As a non-limiting example, imaging may be used to assess therapeutic effect. As another non-limiting example, imaging may be used for assisted delivery of AAV particles.

[0775] In some embodiments, the AAV particles may be delivered using an MRI-guided device. Non-limiting examples of MRI-guided devices are described in U.S. Pat. Nos. 9,055,884, 9,042,958, 8,886,288, 8,768,433, 8,396,532, 8,369,930, 8,374,677 and 8,175,677 and US Patent Application No. US20140024927 the contents of each of which are herein incorporated by reference in their entireties. As a non-limiting example, the MRI-guided device may be able to provide data in real time such as those described in U.S. Pat. Nos. 8,886,288 and 8,768,433, the contents of each of which are herein incorporated by reference in their entirety. As another non-limiting example, the MRI-guided device or system may be used with a targeting cannula such as the systems described in U.S. Pat. Nos. 8,175,677 and 8,374,677, the contents of each of which are herein incorporated by reference in their entireties. As yet another non-limiting example, the MRI-guided device includes a trajectory guide frame for guiding an interventional device as described, for example, in U.S. Pat. No. 9,055,884 and US Patent Application No. US20140024927, the contents of each of which are herein incorporated by reference in their entireties.

[0776] In some embodiments, the AAV particles may be delivered using an MRI-compatible tip assembly. Non-limiting examples of MRI-compatible tip assemblies are described in US Patent Publication No. US20140275980, the content of which is herein incorporated by reference in its entirety.

[0777] In some embodiments, the AAV particles may be delivered using a cannula which is MRI-compatible. Non-limiting examples of MRI-compatible cannulas include those taught in International Patent Publication No. WO2011130107, the contents of which are herein incorporated by reference in their entirety.

[0778] In some embodiments, the AAV particles may be delivered using a catheter which is MRI-compatible. Non-limiting examples of MRI-compatible catheters include those taught in International Patent Publication No. WO2012116265, U.S. Pat. No. 8,825,133 and US Patent Publication No. US20140024909, the contents of each of which are herein incorporated by reference in their entirety.

[0779] In some embodiments, the AAV particles may be delivered using a device with an elongated tubular body and a diaphragm as described in US Patent Publication Nos. US20140276582 and US20140276614, the contents of each of which are herein incorporated by reference in their entirety.

[0780] In some embodiments, the AAV particles may be delivered using an MRI compatible localization and/or guidance system such as, but not limited to, those described in US Patent Publication Nos. US20150223905 and US20150230871, the contents of each of which are herein incorporated by reference in their entireties. As a non-limiting example, the MRI compatible localization and/or guidance systems may comprise a mount adapted for fixation to a patient, a targeting cannula with a lumen configured to attach to the mount so as to be able to controllably translate in at least three dimensions, and an elongate probe configured to snugly advance via slide and retract in the targeting cannula lumen, the elongate probe comprising at least one of a stimulation or recording electrode.

[0781] In some embodiments, the AAV particles may be delivered to a subject using a trajectory frame as described in US Patent Publication Nos. US20150031982 and US20140066750 and International Patent Publication Nos. WO2015057807 and WO2014039481, the contents of each of which are herein incorporated by reference in their entirety.

[0782] In some embodiments, the AAV particles may be delivered to a subject using a gene gun.

### VI. Definitions

[0783] At various places in the present specification, substituents of compounds of the present disclosure are disclosed in groups or in ranges. It is specifically intended that the present disclosure include each and every individual sub combination of the members of such groups and ranges.

[0784] Unless stated otherwise, the following terms and phrases have the meanings described below. The definitions are not meant to be limiting in nature and serve to provide a clearer understanding of certain aspects of the present disclosure.

[0785] About: As used herein, the term “about” means+/−10% of the recited value.

[0786] Adeno-associated virus: The term “adeno-associated virus” or “AAV” as used herein refers to members of the dependovirus genus comprising any particle, sequence, gene, protein, or component derived therefrom.

[0787] AAV Particle: As used herein, an “AAV particle” is a virus which comprises a capsid and a viral genome with at least one payload region and at least one ITR region. AAV particles of the present disclosure may be produced recombinantly and may be based on adeno-associated virus (AAV) parent or reference sequences. AAV particle may be derived from any serotype, described herein or known in the art, including combinations of serotypes (i.e., “pseudotyped” AAV) or from various genomes (e.g., single stranded or self-complementary). In addition, the AAV particle may be replication defective and/or targeted.

[0788] Activity: As used herein, the term “activity” refers to the condition in which things are happening or being done. Compositions of the disclosure may have activity and this activity may involve one or more biological events.

[0789] Administering: As used herein, the term “administering” refers to providing a pharmaceutical agent or composition to a subject.

[0790] Administered in combination: As used herein, the term “administered in combination” or “combined administration” means that two or more agents are administered to a subject at the same time or within an interval such that there may be an overlap of an effect of each agent on the patient. In some embodiments, they are administered within about 60, 30, 15, 10, 5, or 1 minute of one another. In some embodiments, the administrations of the agents are spaced sufficiently closely together such that a combinatorial (e.g., a synergistic) effect is achieved.

[0791] Amelioration: As used herein, the term “amelioration” or “ameliorating” refers to a lessening of severity of at least one indicator of a condition or disease. For example, in the context of neurodegeneration disorder, amelioration includes the reduction of neuron loss.

[0792] Animal: As used herein, the term “animal” refers to any member of the animal kingdom. In some embodiments, “animal” refers to humans at any stage of development. In some embodiments, “animal” refers to non-human animals at any stage of development. In certain embodiments, the non-human animal is a mammal (e.g., a rodent, a mouse, a rat, a rabbit, a monkey, a dog, a cat, a sheep, cattle, a primate, or a pig). In some embodiments, animals include, but are not limited to, mammals, birds, reptiles, amphibians, fish, and worms. In some embodiments, the animal is a transgenic animal, genetically-engineered animal, or a clone.

[0793] Antisense strand: As used herein, the term “the antisense strand” or “the first strand” or “the guide strand” of a siRNA molecule refers to a strand that is substantially complementary to a section of about 10-50 nucleotides, e.g., about 15-30, 16-25, 18-23 or 19-22 nucleotides of the mRNA of the gene targeted for silencing. The antisense strand or first strand has sequence sufficiently complementary to the desired target mRNA sequence to direct target-specific silencing, e.g., complementarity sufficient to trigger the destruction of the desired target mRNA by the RNAi machinery or process.

[0794] Approximately: As used herein, the term “approximately” or “about,” as applied to one or more values of interest, refers to a value that is similar to a stated reference value. In certain embodiments, the term “approximately” or “about” refers to a range of values that fall within 25%, 20%, 19%, 18%, 17%, 16%, 15%, 14%, 13%, 12%, 11%, 10%, 9%, 8%, 7%, 6%, 5%, 4%, 3%, 2%, 1%, or less in either direction (greater than or less than) of the stated reference value unless otherwise stated or otherwise evident from the context (except where such number would exceed 100% of a possible value).

[0795] Associated with: As used herein, the terms “associated with,” “conjugated,” “linked,” “attached,” and “tethered,” when used with respect to two or more moieties, means that the moieties are physically associated or connected with one another, either directly or via one or more additional moieties that serves as a linking agent, to form a structure that is sufficiently stable so that the moieties remain physically associated under the conditions in which the structure is used, e.g., physiological conditions. An “association” need not be strictly through direct covalent chemical bonding. It may also suggest ionic or hydrogen bonding or a hybridization based connectivity sufficiently stable such that the “associated” entities remain physically associated.

[0796] Bifunctional: As used herein, the term “bifunctional” refers to any substance, molecule or moiety which is capable of or maintains at least two functions. The functions may affect the same outcome or a different outcome. The structure that produces the function may be the same or different.

[0797] Biocompatible: As used herein, the term “biocompatible” means compatible with living cells, tissues, organs or systems posing little to no risk of injury, toxicity or rejection by the immune system.

[0798] Biodegradable: As used herein, the term “biodegradable” means capable of being broken down into innocuous products by the action of living things.

[0799] Biologically active: As used herein, the phrase “biologically active” refers to a characteristic of any substance that has activity in a biological system and/or organism. For instance, a substance that, when administered to an organism, has a biological effect on that organism, is considered to be biologically active. In particular embodiments, an AAV particle of described herein may be considered biologically active if even a portion of the encoded payload is biologically active or mimics an activity considered biologically relevant.

[0800] Capsid: As used herein, the term “capsid” refers to the protein shell of a virus particle.

[0801] Complementary and substantially complementary: As used herein, the term “complementary” refers to the ability of polynucleotides to form base pairs with one another. Base pairs are typically formed by hydrogen bonds between nucleotide units in antiparallel polynucleotide strands. Complementary polynucleotide strands can form base pair in the Watson-Crick manner (e.g., A to T, A to U, C to G), or in any other manner that allows for the formation of duplexes. As persons skilled in the art are aware, when using RNA as opposed to DNA, uracil rather than thymine is the base that is considered to be complementary to adenosine. However, when a U is denoted in the context of the present disclosure, the ability to substitute a T is implied, unless otherwise stated. Perfect complementarity or 100% complementarity refers to the situation in which each nucleotide unit of one polynucleotide strand can form hydrogen bond with a nucleotide unit of a second polynucleotide strand. Less than perfect complementarity refers to the situation in which some, but not all, nucleotide units of two strands can form hydrogen bond with each other. For example, for two 20-mers, if only two base pairs on each strand can form hydrogen bond with each other, the polynucleotide strands exhibit 10% complementarity. In the same example, if 18 base pairs on each strand can form hydrogen bonds with each other, the polynucleotide strands exhibit 90% complementarity. As used herein, the term “substantially complementary” means that the siRNA has a sequence (e.g., in the antisense strand) which is sufficient to bind the desired target mRNA, and to trigger the RNA silencing of the target mRNA.

[0802] Compound: Compounds of the present disclosure include all of the isotopes of the atoms occurring in the intermediate or final compounds. “Isotopes” refers to atoms having the same atomic number but different mass numbers resulting from a different number of neutrons in the nuclei. For example, isotopes of hydrogen include tritium and deuterium.

[0803] The compounds and salts of the present disclosure can be prepared in combination with solvent or water molecules to form solvates and hydrates by routine methods.

[0804] Conditionally active: As used herein, the term “conditionally active” refers to a mutant or variant of a wild-type polypeptide, wherein the mutant or variant is more or less active at physiological conditions than the parent polypeptide. Further, the conditionally active polypeptide may have increased or decreased activity at aberrant conditions as compared to the parent polypeptide. A conditionally active polypeptide may be reversibly or irreversibly inactivated at normal physiological conditions or aberrant conditions.

[0805] Conserved: As used herein, the term “conserved” refers to nucleotides or amino acid residues of a polynucleotide sequence or polypeptide sequence, respectively, that are those that occur unaltered in the same position of two or more sequences being compared. Nucleotides or amino acids that are relatively conserved are those that are conserved amongst more related sequences than nucleotides or amino acids appearing elsewhere in the sequences.

[0806] In some embodiments, two or more sequences are said to be “completely conserved” if they are 100% identical to one another. In some embodiments, two or more sequences are said to be “highly conserved” if they are at least 70% identical, at least 80% identical, at least 90% identical, or at least 95% identical to one another. In some embodiments, two or more sequences are said to be “highly conserved” if they are about 70% identical, about 80% identical, about 90% identical, about 95%, about 98%, or about 99% identical to one another. In some embodiments, two or more sequences are said to be “conserved” if they are at least 30% identical, at least 40% identical, at least 50% identical, at least 60% identical, at least 70% identical, at least 80% identical, at least 90% identical, or at least 95% identical to one another. In some embodiments, two or more sequences are said to be “conserved” if they are about 30% identical, about 40% identical, about 50% identical, about 60% identical, about 70% identical, about 80% identical, about 90% identical, about 95% identical, about 98% identical, or about 99% identical to one another. Conservation of sequence may apply to the entire length of a polynucleotide or polypeptide or may apply to a portion, region or feature thereof.

[0807] Control Elements: As used herein, “control elements”, “regulatory control elements” or “regulatory sequences” refers to promoter regions, polyadenylation signals, transcription termination sequences, upstream regulatory domains, origins of replication, internal ribosome entry sites (“IRES”), enhancers, and the like, which provide for the replication, transcription and translation of a coding sequence in a recipient cell. Not all of these control elements need always be present as long as the selected coding sequence is capable of being replicated, transcribed and/or translated in an appropriate host cell.

[0808] Controlled Release: As used herein, the term “controlled release” refers to a pharmaceutical composition or compound release profile that conforms to a particular pattern of release to effect a therapeutic outcome.

[0809] Cytostatic: As used herein, “cytostatic” refers to inhibiting, reducing, suppressing the growth, division, or multiplication of a cell (e.g., a mammalian cell (e.g., a human cell)), bacterium, virus, fungus, protozoan, parasite, prion, or a combination thereof.

[0810] Cytotoxic: As used herein, “cytotoxic” refers to killing or causing injurious, toxic, or deadly effect on a cell (e.g., a mammalian cell (e.g., a human cell)), bacterium, virus, fungus, protozoan, parasite, prion, or a combination thereof.

[0811] Delivery: As used herein, “delivery” refers to the act or manner of delivering an AAV particle, a compound, substance, entity, moiety, cargo or payload.

[0812] Delivery Agent: As used herein, “delivery agent” refers to any substance which facilitates, at least in part, the in vivo delivery of an AAV particle to targeted cells.

[0813] Destabilized: As used herein, the term “destable,” “destabilize,” or “destabilizing region” means a region or molecule that is less stable than a starting, wild-type or native form of the same region or molecule.

[0814] Detectable label: As used herein, “detectable label” refers to one or more markers, signals, or moieties which are attached, incorporated or associated with another entity that is readily detected by methods known in the art including radiography, fluorescence, chemiluminescence, enzymatic activity, absorbance and the like. Detectable labels include radioisotopes, fluorophores, chromophores, enzymes, dyes, metal ions, ligands such as biotin, avidin, streptavidin and haptens, quantum dots, and the like. Detectable labels may be located at any position in the peptides or proteins disclosed herein. They may be within the amino acids, the peptides, or proteins, or located at the N- or C-termini.

[0815] Digest: As used herein, the term “digest” means to break apart into smaller pieces or components. When referring to polypeptides or proteins, digestion results in the production of peptides.

[0816] Distal: As used herein, the term “distal” means situated away from the center or away from a point or region of interest.

[0817] Dosing regimen: As used herein, a “dosing regimen” is a schedule of administration or physician determined regimen of treatment, prophylaxis, or palliative care.

[0818] Encapsulate: As used herein, the term “encapsulate” means to enclose, surround or encase.

[0819] Engineered: As used herein, “engineered” indicates when a wild type or native molecule is designed to have a feature or property, whether structural or chemical, that varies from the starting point.

[0820] Effective Amount: As used herein, the term “effective amount” of an agent is that amount sufficient to effect beneficial or desired results, for example, clinical results, and, as such, an “effective amount” depends upon the context in which it is being applied. For example, in the context of administering an agent that treats cancer, an effective amount of an agent is, for example, an amount sufficient to achieve treatment, as defined herein, of cancer, as compared to the response obtained without administration of the agent.

[0821] Expression: As used herein, “expression” of a nucleic acid sequence refers to one or more of the following events: (1) production of an RNA template from a DNA sequence (e.g., by transcription); (2) processing of an RNA transcript (e.g., by splicing, editing, 5′ cap formation, and/or 3′ end processing); (3) translation of an RNA into a polypeptide or protein; and (4) post-translational modification of a polypeptide or protein.

[0822] Feature: As used herein, a “feature” refers to a characteristic, a property, or a distinctive element.

[0823] Formulation: As used herein, a “formulation” includes at least one AAV particle and a delivery agent.

[0824] Fragment: A “fragment,” as used herein, refers to a portion. For example, fragments of proteins may comprise polypeptides obtained by digesting full-length protein isolated from cultured cells.

[0825] Functional: As used herein, a “functional” biological molecule is a biological molecule in a form in which it exhibits a property and/or activity by which it is characterized.

[0826] Gene expression: The term “gene expression” refers to the process by which a nucleic acid sequence undergoes successful transcription and in most instances translation to produce a protein or peptide. For clarity, when reference is made to measurement of “gene expression”, this should be understood to mean that measurements may be of the nucleic acid product of transcription, e.g., RNA or mRNA or of the amino acid product of translation, e.g., polypeptides or peptides. Methods of measuring the amount or levels of RNA, mRNA, polypeptides and peptides are well known in the art.

[0827] Homology: As used herein, the term “homology” refers to the overall relatedness between polymeric molecules, e.g. between polynucleotide molecules (e.g. DNA molecules and/or RNA molecules) and/or between polypeptide molecules. In some embodiments, polymeric molecules are considered to be “homologous” to one another if their sequences are at least 25%, 30%, 35%, 40%, 45%, 50%, 55%, 60%, 65%, 70%, 75%, 80%, 85%, 90%, 95%, or 99% identical or similar. The term “homologous” necessarily refers to a comparison between at least two sequences (polynucleotide or polypeptide sequences). In accordance with the disclosure, two polynucleotide sequences are considered to be homologous if the polypeptides they encode are at least about 50%, 60%, 70%, 80%, 90%, 95%, or even 99% for at least one stretch of at least about 20 amino acids. In some embodiments, homologous polynucleotide sequences are characterized by the ability to encode a stretch of at least 4-5 uniquely specified amino acids. For polynucleotide sequences less than 60 nucleotides in length, homology is determined by the ability to encode a stretch of at least 4-5 uniquely specified amino acids. In accordance with the disclosure, two protein sequences are considered to be homologous if the proteins are at least about 50%, 60%, 70%, 80%, or 90% identical for at least one stretch of at least about 20 amino acids.

[0828] Heterologous Region: As used herein the term “heterologous region” refers to a region which would not be considered a homologous region.

[0829] Homologous Region: As used herein the term “homologous region” refers to a region which is similar in position, structure, evolution origin, character, form or function.

[0830] Identity: As used herein, the term “identity” refers to the overall relatedness between polymeric molecules, e.g., between polynucleotide molecules (e.g. DNA molecules and/or RNA molecules) and/or between polypeptide molecules. Calculation of the percent identity of two polynucleotide sequences, for example, can be performed by aligning the two sequences for optimal comparison purposes (e.g., gaps can be introduced in one or both of a first and a second nucleic acid sequences for optimal alignment and non-identical sequences can be disregarded for comparison purposes). In certain embodiments, the length of a sequence aligned for comparison purposes is at least 30%, at least 40%, at least 50%, at least 60%, at least 70%, at least 80%, at least 90%, at least 95%, or 100% of the length of the reference sequence. The nucleotides at corresponding nucleotide positions are then compared. When a position in the first sequence is occupied by the same nucleotide as the corresponding position in the second sequence, then the molecules are identical at that position. The percent identity between the two sequences is a function of the number of identical positions shared by the sequences, taking into account the number of gaps, and the length of each gap, which needs to be introduced for optimal alignment of the two sequences. The comparison of sequences and determination of percent identity between two sequences can be accomplished using a mathematical algorithm. For example, the percent identity between two nucleotide sequences can be determined using methods such as those described in Computational Molecular Biology, Lesk, A. M., ed., Oxford University Press, New York, 1988; Biocomputing: Informatics and Genome Projects, Smith, D. W., ed., Academic Press, New York, 1993; Sequence Analysis in Molecular Biology, von Heinje, G., Academic Press, 1987; Computer Analysis of Sequence Data, Part I, Griffin, A. M., and Griffin, H. G., eds., Humana Press, New Jersey, 1994; and Sequence Analysis Primer, Gribskov, M. and Devereux, J., eds., M Stockton Press, New York, 1991; each of which is incorporated herein by reference. For example, the percent identity between two nucleotide sequences can be determined using the algorithm of Meyers and Miller (CABIOS, 1989, 4:11-17), which has been incorporated into the ALIGN program (version 2.0) using a PAM120 weight residue table, a gap length penalty of 12 and a gap penalty of 4. The percent identity between two nucleotide sequences can, alternatively, be determined using the GAP program in the GCG software package using an NWSgapdna.CMP matrix. Methods commonly employed to determine percent identity between sequences include, but are not limited to those disclosed in Carillo, H., and Lipman, D., SIAM J Applied Math., 48:1073 (1988); incorporated herein by reference. Techniques for determining identity are codified in publicly available computer programs. Exemplary computer software to determine homology between two sequences include, but are not limited to, GCG program package, Devereux, J., et al., Nucleic Acids Research, 12(1), 387 (1984)), BLASTP, BLASTN, and FASTA Altschul, S. F. et al., J. Molec. Biol., 215, 403 (1990)).

[0831] Inhibit expression of a gene: As used herein, the phrase “inhibit expression of a gene” means to cause a reduction in the amount of an expression product of the gene. The expression product can be an RNA transcribed from the gene (e.g., an mRNA) or a polypeptide translated from an mRNA transcribed from the gene. Typically, a reduction in the level of an mRNA results in a reduction in the level of a polypeptide translated therefrom. The level of expression may be determined using standard techniques for measuring mRNA or protein.

[0832] In vitro: As used herein, the term “in vitro” refers to events that occur in an artificial environment, e.g., in a test tube or reaction vessel, in cell culture, in a Petri dish, etc., rather than within an organism (e.g., animal, plant, or microbe).

[0833] In vivo: As used herein, the term “in vivo” refers to events that occur within an organism (e.g., animal, plant, or microbe or cell or tissue thereof).

[0834] Insert: As used herein the term “insert” may refer to the addition of a targeting peptide sequence to a parent AAV capsid sequence. An “insertion” may result in the replacement of one or more amino acids of the parent AAV capsid sequence. Alternatively, an insertion may result in no changes to the parent AAV capsid sequence beyond the addition of the targeting peptide sequence. The term “insert” is not limited to the context of amino acid sequences and similarly applies to nucleic acid sequences.

[0835] Isolated: As used herein, the term “isolated” refers to a substance or entity that has been separated from at least some of the components with which it was associated (whether in nature or in an experimental setting). Isolated substances may have varying levels of purity in reference to the substances from which they have been associated. Isolated substances and/or entities may be separated from at least about 10%, about 20%, about 30%, about 40%, about 50%, about 60%, about 70%, about 80%, about 90%, or more of the other components with which they were initially associated. In some embodiments, isolated agents are more than about 80%, about 85%, about 90%, about 91%, about 92%, about 93%, about 94%, about 95%, about 96%, about 97%, about 98%, about 99%, or more than about 99% pure. As used herein, a substance is “pure” if it is substantially free of other components.

[0836] Substantially isolated: By “substantially isolated” is meant that a substance is substantially separated from the environment in which it was formed or detected. Partial separation can include, for example, a composition enriched in the substance or AAV particles of the present disclosure. Substantial separation can include compositions containing at least about 50%, at least about 60%, at least about 70%, at least about 80%, at least about 90%, at least about 95%, at least about 97%, or at least about 99% by weight of the compound of the present disclosure, or salt thereof. Methods for isolating compounds and their salts are routine in the art.

[0837] Library: As used herein, the term “library” refers to a diverse collection of linear polypeptides, polynucleotides, viral particles, or viral vectors. As examples, a library may be a DNA library or an AAV capsid library.

[0838] Linker: As used herein “linker” refers to a molecule or group of molecules which connects two molecules. A linker may be a nucleic acid sequence connecting two nucleic acid sequences encoding two different polypeptides. The linker may or may not be translated. The linker may be a cleavable linker.

[0839] MicroRNA (miRNA) binding site: As used herein, a microRNA (miRNA) binding site represents a nucleotide location or region of a nucleic acid transcript to which at least the “seed” region of a miRNA binds.

[0840] Modified: As used herein “modified” refers to a changed state or structure of a molecule described herein. Molecules may be modified in many ways including chemically, structurally, and functionally.

[0841] Mutation: As used herein, the term “mutation” refers to any changing of the structure of a gene, resulting in a variant (also called “mutant”) form that may be transmitted to subsequent generations. Mutations in a gene may be caused by the alternation of single base in DNA, or the deletion, insertion, or rearrangement of larger sections of genes or chromosomes.

[0842] Naturally Occurring: As used herein, “naturally occurring” or “wild-type” means existing in nature without artificial aid, or involvement of the hand of man.

[0843] Non-human vertebrate: As used herein, a “non-human vertebrate” includes all vertebrates except Homo sapiens, including wild and domesticated species. Examples of non-human vertebrates include, but are not limited to, mammals, such as alpaca, banteng, bison, camel, cat, cattle, deer, dog, donkey, gayal, goat, guinea pig, horse, llama, mule, pig, rabbit, reindeer, sheep water buffalo, and yak.

[0844] Off-target: As used herein, “off target” refers to any unintended effect on any one or more target, gene, or cellular transcript.

[0845] Open reading frame: As used herein, “open reading frame” or “ORF” refers to a sequence which does not contain a stop codon in a given reading frame.

[0846] Operably linked: As used herein, the phrase “operably linked” refers to a functional connection between two or more molecules, constructs, transcripts, entities, moieties or the like.

[0847] Parent sequence: As used herein, a “parent sequence” is a nucleic acid or amino acid sequence from which a variant is derived. In some embodiments, a parent sequence is a sequence into which a heterologous sequence is inserted. In other words, a parent sequence may be considered an acceptor or recipient sequence. In some embodiments, a parent sequence is an AAV capsid sequence into which a targeting sequence is inserted.

[0848] Particle: As used herein, a “particle” is a virus comprised of at least two components, a protein capsid and a polynucleotide sequence enclosed within the capsid.

[0849] Patient: As used herein, “patient” refers to a subject who may seek or be in need of treatment, requires treatment, is receiving treatment, will receive treatment, or a subject who is under care by a trained professional for a particular disease or condition.

[0850] Payload: As used herein, “payload” or “payload region” refers to one or more polynucleotides or polynucleotide regions encoded by or within a viral genome or an expression product of such polynucleotide or polynucleotide region, e.g., a transgene, a polynucleotide encoding a polypeptide or multi-polypeptide or a modulatory nucleic acid or regulatory nucleic acid.

[0851] Peptide: As used herein, “peptide” is less than or equal to 50 amino acids long, e.g., about 5, 10, 15, 20, 25, 30, 35, 40, 45, or 50 amino acids long.

[0852] Pharmaceutically acceptable: The phrase “pharmaceutically acceptable” is employed herein to refer to those compounds, materials, compositions, and/or dosage forms which are, within the scope of sound medical judgment, suitable for use in contact with the tissues of human beings and animals without excessive toxicity, irritation, allergic response, or other problem or complication, commensurate with a reasonable benefit/risk ratio.

[0853] Pharmaceutically acceptable excipients: The phrase “pharmaceutically acceptable excipient,” as used herein, refers any ingredient other than the compounds described herein (for example, a vehicle capable of suspending or dissolving the active compound) and having the properties of being substantially nontoxic and non-inflammatory in a patient. Excipients may include, for example: antiadherents, antioxidants, binders, coatings, compression aids, disintegrants, dyes (colors), emollients, emulsifiers, fillers (diluents), film formers or coatings, flavors, fragrances, glidants (flow enhancers), lubricants, preservatives, printing inks, sorbents, suspensing or dispersing agents, sweeteners, and waters of hydration. Exemplary excipients include, but are not limited to: butylated hydroxytoluene (BHT), calcium carbonate, calcium phosphate (dibasic), calcium stearate, croscarmellose, crosslinked polyvinyl pyrrolidone, citric acid, crospovidone, cysteine, ethylcellulose, gelatin, hydroxypropyl cellulose, hydroxypropyl methylcellulose, lactose, magnesium stearate, maltitol, mannitol, methionine, methylcellulose, methyl paraben, microcrystalline cellulose, polyethylene glycol, polyvinyl pyrrolidone, povidone, pregelatinized starch, propyl paraben, retinyl palmitate, shellac, silicon dioxide, sodium carboxymethyl cellulose, sodium citrate, sodium starch glycolate, sorbitol, starch (corn), stearic acid, sucrose, talc, titanium dioxide, vitamin A, vitamin E, vitamin C, and xylitol.

[0854] Pharmaceutically acceptable salts: The present disclosure also includes pharmaceutically acceptable salts of the compounds described herein. As used herein, “pharmaceutically acceptable salts” refers to derivatives of the disclosed compounds wherein the parent compound is modified by converting an existing acid or base moiety to its salt form (e.g., by reacting the free base group with a suitable organic acid). Examples of pharmaceutically acceptable salts include, but are not limited to, mineral or organic acid salts of basic residues such as amines; alkali or organic salts of acidic residues such as carboxylic acids; and the like. Representative acid addition salts include acetate, acetic acid, adipate, alginate, ascorbate, aspartate, benzenesulfonate, benzene sulfonic acid, benzoate, bisulfate, borate, butyrate, camphorate, camphorsulfonate, citrate, cyclopentanepropionate, digluconate, dodecylsulfate, ethanesulfonate, fumarate, glucoheptonate, glycerophosphate, hemisulfate, heptonate, hexanoate, hydrobromide, hydrochloride, hydroiodide, 2-hydroxy-ethanesulfonate, lactobionate, lactate, laurate, lauryl sulfate, malate, maleate, malonate, methanesulfonate, 2-naphthalenesulfonate, nicotinate, nitrate, oleate, oxalate, palmitate, pamoate, pectinate, persulfate, 3-phenylpropionate, phosphate, picrate, pivalate, propionate, stearate, succinate, sulfate, tartrate, thiocyanate, toluenesulfonate, undecanoate, valerate salts, and the like. Representative alkali or alkaline earth metal salts include sodium, lithium, potassium, calcium, magnesium, and the like, as well as nontoxic ammonium, quaternary ammonium, and amine cations, including, but not limited to ammonium, tetramethylammonium, tetraethylammonium, methylamine, dimethylamine, trimethylamine, triethylamine, ethylamine, and the like. The pharmaceutically acceptable salts of the present disclosure include the conventional non-toxic salts of the parent compound formed, for example, from non-toxic inorganic or organic acids. The pharmaceutically acceptable salts of the present disclosure can be synthesized from the parent compound which contains a basic or acidic moiety by conventional chemical methods. Generally, such salts can be prepared by reacting the free acid or base forms of these compounds with a stoichiometric amount of the appropriate base or acid in water or in an organic solvent, or in a mixture of the two; generally, nonaqueous media like ether, ethyl acetate, ethanol, isopropanol, or acetonitrile are preferred. Lists of suitable salts are found in Remington's Pharmaceutical Sciences, 17^{th} ed., Mack Publishing Company, Easton, Pa., 1985, p. 1418, Pharmaceutical Salts: Properties, Selection, and Use, P. H. Stahl and C. G. Wermuth (eds.), Wiley-VCH, 2008, and Berge et al., Journal of Pharmaceutical Science, 66, 1-19 (1977), each of which is incorporated herein by reference in its entirety.

[0855] Pharmaceutically acceptable solvate: The term “pharmaceutically acceptable solvate,” as used herein, means a compound wherein molecules of a suitable solvent are incorporated in the crystal lattice. A suitable solvent is physiologically tolerable at the dosage administered. For example, solvates may be prepared by crystallization, recrystallization, or precipitation from a solution that includes organic solvents, water, or a mixture thereof. Examples of suitable solvents are ethanol, water (for example, mono-, di-, and tri-hydrates), N-methylpyrrolidinone (NMP), dimethyl sulfoxide (DMSO), N,N′-dimethylformamide (DMF), N,N′-dimethylacetamide (DMAC), 1,3-dimethyl-2-imidazolidinone (DMEU), 1,3-dimethyl-3,4,5,6-tetrahydro-2-(1H)-pyrimidinone (DMPU), acetonitrile (ACN), propylene glycol, ethyl acetate, benzyl alcohol, 2-pyrrolidone, benzyl benzoate, and the like. When water is the solvent, the solvate is referred to as a “hydrate.”

[0856] Pharmacokinetic: As used herein, “pharmacokinetic” refers to any one or more properties of a molecule or compound as it relates to the determination of the fate of substances administered to a living organism. Pharmacokinetics is divided into several areas including the extent and rate of absorption, distribution, metabolism and excretion. This is commonly referred to as ADME where: (A) Absorption is the process of a substance entering the blood circulation; (D) Distribution is the dispersion or dissemination of substances throughout the fluids and tissues of the body; (M) Metabolism (or Biotransformation) is the irreversible transformation of parent compounds into daughter metabolites; and (E) Excretion (or Elimination) refers to the elimination of the substances from the body. In rare cases, some drugs irreversibly accumulate in body tissue.

[0857] Physicochemical: As used herein, “physicochemical” means of or relating to a physical and/or chemical property.

[0858] Preventing: As used herein, the term “preventing” or “prevention” refers to partially or completely delaying onset of an infection, disease, disorder and/or condition; partially or completely delaying onset of one or more symptoms, features, or clinical manifestations of a particular infection, disease, disorder, and/or condition; partially or completely delaying onset of one or more symptoms, features, or manifestations of a particular infection, disease, disorder, and/or condition; partially or completely delaying progression from an infection, a particular disease, disorder and/or condition; and/or decreasing the risk of developing pathology associated with the infection, the disease, disorder, and/or condition.

[0859] Proliferate: As used herein, the term “proliferate” means to grow, expand or increase or cause to grow, expand or increase rapidly. “Proliferative” means having the ability to proliferate. “Anti-proliferative” means having properties counter to or inapposite to proliferative properties.

[0860] Prophylactic: As used herein, “prophylactic” refers to a therapeutic or course of action used to prevent the spread of disease.

[0861] Prophylaxis: As used herein, a “prophylaxis” refers to a measure taken to maintain health and prevent the spread of disease.

[0862] Protein of interest: As used herein, the terms “proteins of interest” or “desired proteins” include those provided herein and fragments, mutants, variants, and alterations thereof.

[0863] Proximal: As used herein, the term “proximal” means situated nearer to the center or to a point or region of interest.

[0864] Purified: As used herein, “purify,” “purified,” “purification” means to make substantially pure or clear from unwanted components, material defilement, admixture or imperfection. “Purified” refers to the state of being pure. “Purification” refers to the process of making pure.

[0865] Region: As used herein, the term “region” refers to a zone or general area. In some embodiments, when referring to a protein or protein module, a region may comprise a linear sequence of amino acids along the protein or protein module or may comprise a three-dimensional area, an epitope and/or a cluster of epitopes. In some embodiments, regions comprise terminal regions. As used herein, the term “terminal region” refers to regions located at the ends or termini of a given agent. When referring to proteins, terminal regions may comprise N- and/or C-termini. N-termini refer to the end of a protein comprising an amino acid with a free amino group. C-termini refer to the end of a protein comprising an amino acid with a free carboxyl group. N- and/or C-terminal regions may there for comprise the N- and/or C-termini as well as surrounding amino acids. In some embodiments, N- and/or C-terminal regions comprise from about 3 amino acid to about 30 amino acids, from about 5 amino acids to about 40 amino acids, from about 10 amino acids to about 50 amino acids, from about 20 amino acids to about 100 amino acids and/or at least 100 amino acids. In some embodiments, N-terminal regions may comprise any length of amino acids that includes the N-terminus, but does not include the C-terminus. In some embodiments, C-terminal regions may comprise any length of amino acids, which include the C-terminus, but do not comprise the N-terminus.

[0866] In some embodiments, when referring to a polynucleotide, a region may comprise a linear sequence of nucleic acids along the polynucleotide or may comprise a three-dimensional area, secondary structure, or tertiary structure. In some embodiments, regions comprise terminal regions. As used herein, the term “terminal region” refers to regions located at the ends or termini of a given agent. When referring to polynucleotides, terminal regions may comprise 5′ and 3′ termini. 5′ termini refer to the end of a polynucleotide comprising a nucleic acid with a free phosphate group. 3′ termini refer to the end of a polynucleotide comprising a nucleic acid with a free hydroxyl group. 5′ and 3′ regions may there for comprise the 5′ and 3′ termini as well as surrounding nucleic acids. In some embodiments, 5′ and 3′ terminal regions comprise from about 9 nucleic acids to about 90 nucleic acids, from about 15 nucleic acids to about 120 nucleic acids, from about 30 nucleic acids to about 150 nucleic acids, from about 60 nucleic acids to about 300 nucleic acids and/or at least 300 nucleic acids. In some embodiments, 5′ regions may comprise any length of nucleic acids that includes the 5′ terminus, but does not include the 3′ terminus. In some embodiments, 3′ regions may comprise any length of nucleic acids, which include the 3′ terminus, but does not comprise the 5′ terminus.

[0867] RNA or RNA molecule: As used herein, the term “RNA” or “RNA molecule” or “ribonucleic acid molecule” refers to a polymer of ribonucleotides; the term “DNA” or “DNA molecule” or “deoxyribonucleic acid molecule” refers to a polymer of deoxyribonucleotides. DNA and RNA can be synthesized naturally, e.g., by DNA replication and transcription of DNA, respectively; or be chemically synthesized. DNA and RNA can be single-stranded (i.e., ssRNA or ssDNA, respectively) or multi-stranded (e.g., double stranded, i.e., dsRNA and dsDNA, respectively). The term “mRNA” or “messenger RNA”, as used herein, refers to a single stranded RNA that encodes the amino acid sequence of one or more polypeptide chains.

[0868] RNA interfering or RNAi: As used herein, the term “RNA interfering” or “RNAi” refers to a sequence specific regulatory mechanism mediated by RNA molecules which results in the inhibition or interfering or “silencing” of the expression of a corresponding protein-coding gene. RNAi has been observed in many types of organisms, including plants, animals and fungi. RNAi occurs in cells naturally to remove foreign RNAs (e.g., viral RNAs). Natural RNAi proceeds via fragments cleaved from free dsRNA which direct the degradative mechanism to other similar RNA sequences. RNAi is controlled by the RNA-induced silencing complex (RISC) and is initiated by short/small dsRNA molecules in cell cytoplasm, where they interact with the catalytic RISC component argonaute. The dsRNA molecules can be introduced into cells exogenously. Exogenous dsRNA initiates RNAi by activating the ribonuclease protein Dicer, which binds and cleaves dsRNAs to produce double-stranded fragments of 21-25 base pairs with a few unpaired overhang bases on each end. These short double stranded fragments are called small interfering RNAs (siRNAs).

[0869] RNAi agent: As used herein, the term “RNAi agent” refers to an RNA molecule, or its derivative, that can induce inhibition, interfering, or “silencing” of the expression of a target gene and/or its protein product. An RNAi agent may knock-out (virtually eliminate or eliminate) expression, or knock-down (lessen or decrease) expression. The RNAi agent may be, but is not limited to, dsRNA, siRNA, shRNA, pre-miRNA, pri-miRNA, miRNA, stRNA, lncRNA, piRNA, or snoRNA.

[0870] Sample: As used herein, the term “sample” or “biological sample” refers to a subset of its tissues, cells or component parts (e.g. body fluids, including but not limited to blood, mucus, lymphatic fluid, synovial fluid, cerebrospinal fluid, saliva, amniotic fluid, amniotic cord blood, urine, vaginal fluid and semen). A sample further may include a homogenate, lysate or extract prepared from a whole organism or a subset of its tissues, cells or component parts, or a fraction or portion thereof, including but not limited to, for example, plasma, serum, spinal fluid, lymph fluid, the external sections of the skin, respiratory, intestinal, and genitourinary tracts, tears, saliva, milk, blood cells, tumors, organs. A sample further refers to a medium, such as a nutrient broth or gel, which may contain cellular components, such as proteins or nucleic acid molecule.

[0871] Self-complementary viral particle: As used herein, a “self-complementary viral particle” is a particle comprised of at least two components, a protein capsid and a polynucleotide sequence encoding a self-complementary genome enclosed within the capsid.

[0872] Sense Strand: As used herein, the term “the sense strand” or “the second strand” or “the passenger strand” of a siRNA molecule refers to a strand that is complementary to the antisense strand or first strand. The antisense and sense strands of a siRNA molecule are hybridized to form a duplex structure. As used herein, a “siRNA duplex” includes a siRNA strand having sufficient complementarity to a section of about 10-50 nucleotides of the mRNA of the gene targeted for silencing and a siRNA strand having sufficient complementarity to form a duplex with the other siRNA strand.

[0873] Short interfering RNA or siRNA: As used herein, the terms “short interfering RNA,” “small interfering RNA” or “siRNA” refer to an RNA molecule (or RNA analog) comprising between about 5-60 nucleotides (or nucleotide analogs) which is capable of directing or mediating RNAi. Preferably, a siRNA molecule comprises between about 15-30 nucleotides or nucleotide analogs, such as between about 16-25 nucleotides (or nucleotide analogs), between about 18-23 nucleotides (or nucleotide analogs), between about 19-22 nucleotides (or nucleotide analogs) (e.g., 19, 20, 21 or 22 nucleotides or nucleotide analogs), between about 19-25 nucleotides (or nucleotide analogs), and between about 19-24 nucleotides (or nucleotide analogs). The term “short” siRNA refers to a siRNA comprising 5-23 nucleotides, preferably 21 nucleotides (or nucleotide analogs), for example, 19, 20, 21 or 22 nucleotides. The term “long” siRNA refers to a siRNA comprising 24-60 nucleotides, preferably about 24-25 nucleotides, for example, 23, 24, 25 or 26 nucleotides. Short siRNAs may, in some instances, include fewer than 19 nucleotides, e.g., 16, 17 or 18 nucleotides, or as few as 5 nucleotides, provided that the shorter siRNA retains the ability to mediate RNAi. Likewise, long siRNAs may, in some instances, include more than 26 nucleotides, e.g., 27, 28, 29, 30, 35, 40, 45, 50, 55, or even 60 nucleotides, provided that the longer siRNA retains the ability to mediate RNAi or translational repression absent further processing, e.g., enzymatic processing, to a short siRNA. siRNAs can be single stranded RNA molecules (ss-siRNAs) or double stranded RNA molecules (ds-siRNAs) comprising a sense strand and an antisense strand which hybridized to form a duplex structure called siRNA duplex.

[0874] Signal Sequences: As used herein, the phrase “signal sequences” refers to a sequence which can direct the transport or localization of a protein.

[0875] Single unit dose: As used herein, a “single unit dose” is a dose of any therapeutic administered in one dose/at one time/single route/single point of contact, i.e., single administration event. In some embodiments, a single unit dose is provided as a discrete dosage form (e.g., a tablet, capsule, patch, loaded syringe, vial, etc.).

[0876] Similarity: As used herein, the term “similarity” refers to the overall relatedness between polymeric molecules, e.g. between polynucleotide molecules (e.g. DNA molecules and/or RNA molecules) and/or between polypeptide molecules. Calculation of percent similarity of polymeric molecules to one another can be performed in the same manner as a calculation of percent identity, except that calculation of percent similarity takes into account conservative substitutions as is understood in the art.

[0877] Split dose: As used herein, a “split dose” is the division of single unit dose or total daily dose into two or more doses.

[0878] Stable: As used herein “stable” refers to a compound that is sufficiently robust to survive isolation to a useful degree of purity from a reaction mixture, and preferably capable of formulation into an efficacious therapeutic agent.

[0879] Stabilized: As used herein, the term “stabilize”, “stabilized,” “stabilized region” means to make or become stable.

[0880] Subject: As used herein, the term “subject” or “patient” refers to any organism to which a composition in accordance with the disclosure may be administered, e.g., for experimental, diagnostic, prophylactic, and/or therapeutic purposes. Typical subjects include animals (e.g., mammals such as mice, rats, rabbits, non-human primates, and humans) and/or plants.

[0881] Substantially: As used herein, the term “substantially” refers to the qualitative condition of exhibiting total or near-total extent or degree of a characteristic or property of interest. One of ordinary skill in the biological arts will understand that biological and chemical phenomena rarely, if ever, go to completion and/or proceed to completeness or achieve or avoid an absolute result. The term “substantially” is therefore used herein to capture the potential lack of completeness inherent in many biological and chemical phenomena.

[0882] Substantially equal: As used herein as it relates to time differences between doses, the term means plus/minus 2%.

[0883] Substantially simultaneously: As used herein and as it relates to plurality of doses, the term means within 2 seconds.

[0884] Suffering from: An individual who is “suffering from” a disease, disorder, and/or condition has been diagnosed with or displays one or more symptoms of a disease, disorder, and/or condition.

[0885] Susceptible to: An individual who is “susceptible to” a disease, disorder, and/or condition has not been diagnosed with and/or may not exhibit symptoms of the disease, disorder, and/or condition but harbors a propensity to develop a disease or its symptoms. In some embodiments, an individual who is susceptible to a disease, disorder, and/or condition (for example, cancer) may be characterized by one or more of the following: (1) a genetic mutation associated with development of the disease, disorder, and/or condition; (2) a genetic polymorphism associated with development of the disease, disorder, and/or condition; (3) increased and/or decreased expression and/or activity of a protein and/or nucleic acid associated with the disease, disorder, and/or condition; (4) habits and/or lifestyles associated with development of the disease, disorder, and/or condition; (5) a family history of the disease, disorder, and/or condition; and (6) exposure to and/or infection with a microbe associated with development of the disease, disorder, and/or condition. In some embodiments, an individual who is susceptible to a disease, disorder, and/or condition will develop the disease, disorder, and/or condition. In some embodiments, an individual who is susceptible to a disease, disorder, and/or condition will not develop the disease, disorder, and/or condition.

[0886] Sustained release: As used herein, the term “sustained release” refers to a pharmaceutical composition or compound release profile that conforms to a release rate over a specific period of time.

[0887] Synthetic: The term “synthetic” means produced, prepared, and/or manufactured by the hand of man. Synthesis of polynucleotides or polypeptides or other molecules of the present disclosure may be chemical or enzymatic.

[0888] Targeting: As used herein, “targeting” means the process of design and selection of nucleic acid sequence that will hybridize to a target nucleic acid and induce a desired effect.

[0889] Targeting peptide: As used herein, a “targeting peptide” refers to a peptide of 3-20 amino acids in length. These targeting peptides may be inserted into, or attached to, a parent amino acid sequence to alter the characteristics (e.g., tropism) of the parent protein. As a non-limiting example, the targeting peptide can be inserted into an AAV capsid sequence for enhanced targeting to a desired cell-type, tissue, organ or organism. It is to be understood that a targeting peptide is encoded by a targeting polynucleotide which may similarly be inserted into a parent polynucleotide sequence. Therefore, a “targeting sequence” refers to a peptide or polynucleotide sequence for insertion into an appropriate parent sequence (amino acid or polynucleotide, respectively).

[0890] Targeted Cells: As used herein, “targeted cells” refers to any one or more cells of interest. The cells may be found in vitro, in vivo, in situ or in the tissue or organ of an organism. The organism may be an animal, preferably a mammal, more preferably a human and most preferably a patient.

[0891] Therapeutic Agent: The term “therapeutic agent” refers to any agent that, when administered to a subject, has a therapeutic, diagnostic, and/or prophylactic effect and/or elicits a desired biological and/or pharmacological effect.

[0892] Therapeutically effective amount: As used herein, the term “therapeutically effective amount” means an amount of an agent to be delivered (e.g., nucleic acid, drug, therapeutic agent, diagnostic agent, prophylactic agent, etc.) that is sufficient, when administered to a subject suffering from or susceptible to an infection, disease, disorder, and/or condition, to treat, improve symptoms of, diagnose, prevent, and/or delay the onset of the infection, disease, disorder, and/or condition. In some embodiments, a therapeutically effective amount is provided in a single dose. In some embodiments, a therapeutically effective amount is administered in a dosage regimen comprising a plurality of doses. Those skilled in the art will appreciate that in some embodiments, a unit dosage form may be considered to comprise a therapeutically effective amount of a particular agent or entity if it comprises an amount that is effective when administered as part of such a dosage regimen.

[0893] Therapeutically effective outcome: As used herein, the term “therapeutically effective outcome” means an outcome that is sufficient in a subject suffering from or susceptible to an infection, disease, disorder, and/or condition, to treat, improve symptoms of, diagnose, prevent, and/or delay the onset of the infection, disease, disorder, and/or condition.

[0894] Total daily dose: As used herein, a “total daily dose” is an amount given or prescribed in 24 hour period. It may be administered as a single unit dose.

[0895] Transfection: As used herein, the term “transfection” refers to methods to introduce exogenous nucleic acids into a cell. Methods of transfection include, but are not limited to, chemical methods, physical treatments and cationic lipids or mixtures.

[0896] Treating: As used herein, the term “treating” refers to partially or completely alleviating, ameliorating, improving, relieving, delaying onset of, inhibiting progression of, reducing severity of, and/or reducing incidence of one or more symptoms or features of a particular infection, disease, disorder, and/or condition. For example, “treating” cancer may refer to inhibiting survival, growth, and/or spread of a tumor. Treatment may be administered to a subject who does not exhibit signs of a disease, disorder, and/or condition and/or to a subject who exhibits only early signs of a disease, disorder, and/or condition for the purpose of decreasing the risk of developing pathology associated with the disease, disorder, and/or condition.

[0897] Unmodified: As used herein, “unmodified” refers to any substance, compound or molecule prior to being changed in any way. Unmodified may, but does not always, refer to the wild type or native form of a biomolecule. Molecules may undergo a series of modifications whereby each modified molecule may serve as the “unmodified” starting molecule for a subsequent modification.

[0898] Vector: As used herein, a “vector” is any molecule or moiety which transports, transduces or otherwise acts as a carrier of a heterologous molecule. Vectors of the present disclosure may be produced recombinantly and may be based on and/or may comprise adeno-associated virus (AAV) parent or reference sequence. Such parent or reference AAV sequences may serve as an original, second, third or subsequent sequence for engineering vectors. In non-limiting examples, such parent or reference AAV sequences may comprise any one or more of the following sequences: a polynucleotide sequence encoding a polypeptide or multi-polypeptide, which sequence may be wild-type or modified from wild-type and which sequence may encode full-length or partial sequence of a protein, protein domain, or one or more subunits of a protein; a polynucleotide comprising a modulatory or regulatory nucleic acid which sequence may be wild-type or modified from wild-type; and a transgene that may or may not be modified from wild-type sequence. These AAV sequences may serve as either the “donor” sequence of one or more codons (at the nucleic acid level) or amino acids (at the polypeptide level) or “acceptor” sequences of one or more codons (at the nucleic acid level) or amino acids (at the polypeptide level).

[0899] Viral genome: As used herein, a “viral genome” or “vector genome” is a polynucleotide comprising at least one inverted terminal repeat (ITR) and at least one encoded payload. A viral genome encodes at least one copy of the payload.

### VII. Examples

### Example 1. Production and Purification of AAV Particles

[0900] AAV particles described herein may be produced using methods known in the art, such as, for example, triple transfection or baculovirus mediated virus production. Any suitable permissive or packaging cell known in the art may be employed to produce the vectors. Mammalian cells are often preferred. Also preferred are trans-complementing packaging cell lines that provide functions deleted from a replication-defective helper virus, e.g., 293 cells or other Ela trans-complementing cells.

[0901] The gene cassette may contain some or all of the parvovirus (e.g., AAV) cap and rep genes. Preferably, however, some or all of the cap and rep functions are provided in trans by introducing a packaging vector(s) encoding the capsid and/or Rep proteins into the cell. Most preferably, the gene cassette does not encode the capsid or Rep proteins. Alternatively, a packaging cell line is used that is stably transformed to express the cap and/or rep genes.

[0902] Recombinant AAV virus particles are, in some cases, produced and purified from culture supernatants according to the procedure as described in US20160032254, the contents of which are incorporated by reference. Production may also involve methods known in the art including those using 293T cells, sf9 insect cells, triple transfection or any suitable production method.

[0903] In some cases, 293 cells are transfected with CaPO4 with plasmids required for production of AAV, i.e., AAV2 rep, an adenoviral helper construct and a ITR flanked transgene cassette. The AAV2 rep plasmid also contains the cap sequence of the particular virus being studied. Twenty-four hours after transfection, which occurs in serum containing DMEM, the medium is replaced with fresh medium with or without serum. Three (3) days after transfection, a sample is taken from the culture medium of the 293 adherent cells. Subsequently cells are scraped and transferred into a receptacle. After centrifugation to remove cellular pellet, a second sample is taken from the supernatant after scraping. Next, cell lysis is achieved by three consecutive freeze-thaw cycles (−80C to 37C). Cellular debris is removed and sample 3 is taken from the medium. The samples are quantified for AAV particles by DNase resistant genome titration by Tagman™ PCR. The total production yield from such a transfection is equal to the particle concentration from sample 3.

[0904] AAV particle titers are measured according to genome copy number (genome particles per milliliter). Genome particle concentrations are based on Tagman® PCR of the vector DNA as previously reported (Clark et al. (1999) Hum. Gene Ther., 10:1031-1039; and Veldwijk et al. (2002) Mol. Ther., 6:272-278).

### Example 2. Tissue Specific Expression

[0905] To evaluate the expression of various encoded payloads in tissues, a series of AAV particles carrying the encoded sequences driven by a panel of ubiquitous and tissue-specific promoters are made. These particles are administered to the specific tissue, e.g., systemically, via an appropriate route, e.g., a single intravenous injection and expression is monitored to determine the relative expression potential of the payload as well as of each promoter in this target tissue. Measurement of payload production is performed using standard techniques, for example by ELISA.

[0906] In some cases, the cytomegalovirus immediate early promoter (CMV), chimeric chicken-beta-actin (CAG), and ubiquitin C (UBC), CBA, H1, αMHC, cTnT, and CMV-MLC2k promoters which provide robust expression are used.

### Example 3. In Vivo Mouse Biodistribution and Transgene Expression Levels Following Intravenous Treatment with VOY101-GFP AAV Particles

[0907] An adeno-associated capsid variant (VOY101) was engineered for widespread gene transfer into the central nervous system. A viral genome comprising AAV2 wild-type Inverted Terminal Repeats (ITR), a synthetic promoter composed of CMV enhancer and chicken beta-actin promoter (CBA), an enhanced green fluorescent protein variant (eGFP) and a rabbit globin polyadenylation sequence was used to generate AAV particles, having a capsid serotype of either VOY101 or AAV9, by triple transfection into HEK293T cells. The ITR-to-ITR sequence of the viral genome is provided as SEQ ID NO: 1799.

[0908] The single-stranded AAV particles were purified and formulated in phosphate buffered saline (PBS) with 0.001% F-68, and then administered to adult C57Bl/6J mice at 6-7 weeks of age via lateral tail vein injection at ˜4 ml/kg, with a vector concentration of 5.0×10¹² vg/mL. The total dose was 2.0×10¹³ vector genomes (VG)/kg. A control group was treated with vehicle (PBS with 0.001% F-68).

[0909] Approximately 28 days following administration, several tissue samples were collected. Tissue samples allocated for GFP protein quantification or vector genome quantification were flash-frozen in liquid nitrogen. Tissue samples allocated for anti-GFP immunohistochemistry were post-fixed in 4% paraformaldehyde overnight. Analysis of the tissue samples by immuno-histochemical staining with an anti-GFP antibody and subsequent DAB substrate development showed that systemic injection with VOY101-GFP particles resulted in increased GFP levels throughout the brain and spinal cord as compared to the administered AAV9-GFP particles.

[0910] GFP protein levels were measured by ELISA and reported in ng GFP/mg of total protein and the results are shown in Table 13. Vector genome digital PCR quantification was performed using a probe set against the CMV enhancer region of the CBA promoter, normalized to host TFRC (transferrin receptor protein 1) and expressed in vector genome per diploid cell (VG/DC). The results are shown in Tables 14 and 15. In Tables 13, 14 and 15, “BLLQ” means below lower limit of quantification. For GFP protein levels, the lower limit of quantitation (LLOQ) was approximately 0.074 ng/mg protein. For VG levels, the LLOQ was approximately 0.03 VG/dc.

TABLE 13
GFP Expression in Mouse after Intravenous Injection

| AAV Serotype | GFP Expression (ng GFP/mg of total protein) | | | | |
|---|---|---|---|---|---|
| (Protein SEQ ID NO; | | Lumbar | Lumbar Dorsal | | |
| Nucleotide SEQ ID NO) | Striatum | Spinal Cord | Root Ganglia | Heart | Liver |
| VOY101 (SEQ ID NO: 1; | 30.4 ± 3.7 | 111.2 ± 18.2 | 4.2 ± 2.3 | 261.8 ± 127.8 | 428.2 ± 239.2 |
| SEQ ID NO: 1800) | | | | | |
| AAV9 (SEQ ID NO: 136; | 0.5 ± 0.1 | 1.5 ± 0.4 | 14.3 ± 9.2 | 453.2 ± 138.1 | 2115.9 ± 951.0 |
| SEQ ID NO: 135) | | | | | |
| Vehicle | BLLQ | BLLQ | 0.2 ± 0.5 | BLLQ | BLLQ |

TABLE 14
Vector Genome Distribution in Mouse after Intravenous Injection

| AAV Serotype | VG Distribution (VG/DC) | | | |
|---|---|---|---|---|
| (Protein SEQ ID NO; | | | | Cerebellum |
| Nucleotide SEQ ID NO) | Striatum | Cortex | Brainstem | cortex |
| VOY101 (SEQ ID NO: 1; | 27.8 ± 6.2 | 31.7 ± 8.2 | 33.5 ± 7.1 | 4.0 ± 1.2 |
| SEQ ID NO: 1800) | | | | |
| AAV9 (SEQ ID NO: 136; | 0.3 ± 0.1 | 0.2 ± 0.1 | 0.5 ± 0.6 | 0.1 ± 0.1 |
| SEQ ID NO: 135) | | | | |
| Vehicle | BLLQ | BLLQ | BLLQ | BLLQ |

TABLE 15
Vector Genome Distribution in Mouse after Intravenous Injection

| | VG Distribution (VG/DC) | | | | |
|---|---|---|---|---|---|
| AAV Serotype | | Thoracic | Thoracic | | |
| (Protein SEQ ID NO; | Dentate | Spinal | Dorsal Root | | |
| Nucleotide SEQ ID NO) | nucleus | Cord | Ganglia | Heart | Liver |
| VOY101 (SEQ ID NO: 1; | 34.0 ± 11.6 | 20.8 ± 2.4 | 2.1 ± 3.0 | 1.1 ± 0.6 | 17.7 ± 7.2 |
| SEQ ID NO: 1800) | | | | | |
| AAV9 | 0.2 ± 0.1 | 0.2 ± 0.1 | 0.1 ± 0.02 | 1.0 ± 0.2 | 95.8 ± 19.7 |
| (SEQ ID NO: 136; | | | | | |
| SEQ ID NO: 135) | | | | | |
| Vehicle | BLLQ | BLLQ | BLLQ | BLLQ | BLLQ |

[0911] In mouse striatum, 28 days after intravenous injection of 2.0×10¹³ VG/kg, VOY101-GFP resulted in GFP levels 61-fold higher and vector genome levels 93-fold higher than AAV9-GFP. In mouse spinal cord, 28 days after intravenous injection of 2.0×10¹³ VG/kg, VOY101-GFP resulted in GFP levels 74-fold higher and vector genome levels 104-fold higher than AAV9-GFP. In mouse cortex, brainstem, cerebellum cortex and dentate nucleus, 28 days after intravenous injection of 2.0×10¹³ VG/kg, VOY101-GFP resulted in vector genome levels 159-fold, 67-fold, 40-fold and 170-fold, higher than AAV9-GFP, respectively. In mouse dorsal root ganglia, 28 days after intravenous injection of 2.0×10¹³ VG/kg, VOY101-GFP resulted in GFP levels 3.4-fold lower and vector genome levels 21-fold higher than AAV9-GFP. In mouse liver, 28 days after intravenous injection of 2.0×10¹³ VG/kg, VOY101-GFP resulted in GFP levels 4.9-fold lower and vector genome levels 5.4-fold lower than AAV9-GFP. In mouse heart, 28 days after intravenous injection of 2.0×10¹³ VG/kg, VOY101-GFP resulted in GFP levels 1.7-fold lower and vector genome levels 1.1-fold higher than AAV9-GFP.

### Example 4. In Vivo Biodistribution and Transgene Expression Levels Following Intravenous Administration of VOY101-FXN AAV Particles

[0912] A. Mouse In Vivo Biodistribution and Transgene Expression Levels Following Intravenous Treatment with VOY101-FXN AAV Particles

[0913] Widespread gene transfer into the central nervous system, peripheral nervous system and heart was also observed when using a viral genome with Macaca fascicularis (cynomolgus monkey) frataxin transgene with and HA-tag (cFXN-HA). A viral genome comprising AAV2 wild-type ITRs, a synthetic promoter composed of CMV enhancer and chicken beta-actin promoter (CBA), Macaca fascicularis frataxin-HA (cFXN-HA) and a human growth hormone polyadenylation sequence was used to generate AAV particles, having a capsid serotype of either VOY101 or AAV9, by triple transfection into HEK293T cells. The ITR-to-ITR sequence of the viral genome is provided as SEQ ID NO: 1801.

[0914] The single-stranded AAV particles were purified and formulated in phosphate buffered saline (PBS) with 0.001% F-68, and then administered to adult C57Bl/6J mice at 9 weeks of age via lateral tail vein injection ˜4 ml/kg, with a vector concentration of 1.0×10¹² vg/mL. The total dose was 4.2×10¹² VG/kg. A control group was treated with vehicle (PBS with 0.001% F-68).

[0915] Seven days following AAV particle or vehicle administration, several tissue samples were collected. Tissue samples were flash-frozen in liquid nitrogen. Vector genome digital PCR quantification was performed using a probe set against the CMV enhancer region of the CBA promoter, normalized to host TFRC, and expressed in vector genome per diploid cell (VG/DC). cFXN-HA protein levels were measured by ELISA and reported in ng cFXN-HA/mg of total protein. cFXN-HA protein levels and vector genome distribution are shown in Tables 16 and 17, respectively. In Tables 16 and 17, “BLLQ” means below lower limit of quantification. For cFXN-HA protein levels, the LLOQ was approximately 0.123 ng/mg protein. For VG levels, the LLOQ was approximately 0.03 VG/dc.

TABLE 16
cFXN Expression in Mouse after Intravenous Injection

| AAV Serotype | FXN Expression (ng FXN/mg of total protein) | | | | | |
|---|---|---|---|---|---|---|
| (Protein SEQ ID | | Lumbar | Lumbar | | | |
| NO; Nucleotide | | Spinal | Dorsal Root | Trigeminal | | |
| SEQ ID NO) | Cortex | Cord | Ganglia | ganglion | Heart | Liver |
| VOY101 | 23.4 ± | 64.1 ± | 11.2 ± | 6.0 ± | 17.8 ± | 69.2 ± |
| (SEQ ID NO: 1; | 13.8 | 10.2 | 2.4 | 3.1 | 17.1 | 51.1 |
| SEQ ID NO: 1800) | | | | | | |
| AAV9 | BLLQ | BLLQ | BLLQ | 0.4 ± | 1.9 ± | 327.8 ± |
| (SEQ ID NO: 136; | | | | 0.5 | 3.1 | 171.5 |
| SEQ ID NO: 135) | | | | | | |
| Vehicle | BLLQ | BLLQ | BLLQ | BLLQ | BLLQ | BLLQ |

TABLE 17
Vector Genome Distribution in Mouse after Intravenous Injection

| AAV Serotype | VG Distribution (VG/DC) | | | | | |
|---|---|---|---|---|---|---|
| (Protein SEQ ID | | Lumbar | Thoracic | | | |
| NO; Nucleotide | | Spinal | Dorsal Root | Trigeminal | | |
| SEQ ID NO) | Cortex | Cord | Ganglia | ganglion | Heart | Liver |
| VOY101 | 14.85 ± | 23.51 ± | 6.49 ± | 2.45 ± | 0.46 ± | 8.74 ± |
| (SEQ ID NO: 1; | 3.58 | 1.96 | 3.19 | 1.27 | 0.13 | 5.98 |
| SEQ ID NO: 1800) | | | | | | |
| AAV9 | 0.09 ± | 0.07 ± | 0.55 ± | 0.04 ± | 0.17 ± | 56.74 ± |
| (SEQ ID NO: 136; | 0.01 | 0.02 | 0.40 | 0.02 | 0.05 | 30.60 |
| SEQ ID NO: 135) | | | | | | |
| Vehicle | BLLQ | BLLQ | BLLQ | BLLQ | BLLQ | BLLQ |

[0916] In mouse cortex, seven days after intravenous injection of 4.2×10¹² vg/kg, VOY101-cFXN-HA resulted in 165-fold higher vector genome levels and substantially higher cFXN-HA expression than AAV9-cFXN-HA. (AAV9 cFXN-HA expression was below the lower limit of quantitation.) In mouse lumbar spinal cord, seven days after intravenous injection of 4.2×10¹² vg/kg, VOY101-cFXN-HA resulted in 336-fold higher vector genome levels and substantially higher cFXN-HA protein expression than AAV9-cFXN-HA.

[0917] In dorsal root ganglia, seven days after intravenous injection of 4.2×10¹² vg/kg, VOY101-cFXN-HA resulted in 12-fold higher vector genome levels and substantially higher cFXN-HA protein expression than AAV9-cFXN-HA. (AAV9 cFXN-HA expression was below the lower limit of quantitation.) In trigeminal ganglion, seven days after intravenous injection of 4.2×10¹² vg/kg, VOY101-cFXN-HA resulted in 61-fold higher vector genome and 15-fold higher cFXN-HA protein expression than AAV9-cFXN-HA.

[0918] In heart, seven days after intravenous injection of 4.2×10¹² VG/kg, VOY101-cFXN-HA resulted in 2.7-fold higher vector genome and 9.4-fold higher cFXN-HA protein expression than AAV9-cFXN-HA. In liver, seven days after intravenous injection of 4.2×10¹² VG/kg, VOY101-cFXN-HA resulted in 6.5-fold lower vector genome and 4.7-fold lower cFXN-HA protein expression than AAV9-cFXN-HA.

B. In Vivo Study in Non-Human Primate on Biodistribution and Levels of cFXN-HA Expression after IV Treatment with VOY101-FXN-HA AAV Particles

[0919] A study in cynomolgus monkeys (Macaca fascicularis) was conducted to evaluate cFXN-HA expression within the CNS after IV dosing of VOY101-cFXN-HA.

[0920] A viral genome comprising HA-tagged cynomolgus frataxin (cFXN-HA) was engineered into a single stranded expression vector. A viral genome comprising AAV2 wild-type ITRs, a synthetic promoter composed of CMV enhancer and chicken beta-actin promoter (CBA), Macaca fascicularis frataxin (cFXN) with a 3′ HA-tag and a human growth hormone polyadenylation sequence was used to generate AAV particles, having a capsid serotype of VOY101 or AAV9, by triple transfection into HEK293T cells. The ITR-to-ITR sequence of the viral genome is provided as SEQ ID NO: 1801.

[0921] The single-stranded AAV particles (VOY101-cFXN-HA, AAV9-cFXN-HA) were purified and formulated in phosphate buffered saline (PBS) with 0.001% F-68, and then administered to non-human primate (Macaca fascicularis) via saphenous vein injection at 5 mL/kg. For VOY101-cFXN-HA, the vector concentration was 1.34×10¹² vg/mL and the total dose was 6.7×10¹² VG/kg. For AAV9-cFXN-HA, the total dose was 2×10¹³ VG/kg.

[0922] Approximately 28 days following AAV particle administration, several tissue samples were collected. Tissue samples allocated for cFXN-HA protein quantification or vector genome quantification were snap-frozen. Tissue samples allocated for anti-HA immunohistochemistry were post-fixed in 4% paraformaldehyde for 12 to 72 hours at 2-8° C. Tissue sections (20 μm thickness) were stained with a rabbit monoclonal antibody to HA tag (1:1000 or 1:2000), followed by a goat-anti-rabbit IgG biotinylated secondary antibody (1:1000), and then developed with DAB plus nickel.

[0923] cFXN-HA staining was observed in multiple CNS regions after IV dosing of VOY101-cFXN. These regions include but are not limited to, the spinal cord (cervical, thoracic and lumbar segments), brainstem nuclei, cerebellum (including cerebellar dentate nucleus), thalamus, caudate nucleus, and cerebral cortex. Homogeneous HA staining was observed along the entire rostral-caudal extent of the spinal cord, particularly in ventral horn motor neurons, after IV dosing of VOY101-cFXN-HA at 6.7×10¹² VG/kg. The spinal cord and especially ventral horn motor neurons were labeled to a greater degree with VOY101-cFXN-HA than with AAV9-cFXN-HA, despite the 3-fold lower dose of VOY101-cFXN-HA. Vehicle-treated control non-human primates exhibited essentially no detectable background staining for HA.

[0924] HA staining in the lumbar ventral horn, including motor neurons, was similar after IV VOY101-cFXN-HA (6.7×10¹² VG/kg) compared with IT administration of a similar dose of AAVrh10-FXN-HA.

[0925] Vector genome digital PCR quantification was performed using a probe set against the CMV enhancer region of the CBA promoter, normalized to host RnaseP and expressed in vector genome per diploid cell (VG/DC). cFXN-HA protein levels were measured by ELISA. cFXN-HA protein levels (in ng cFXN-HA/mg of total protein) and vector genome distribution (VG/DC) are shown in Table 18. In Table 18, “BLLQ” means below lower limit of quantification and “NA” means not analyzed. The LLOQ was approximately 0.123 ng/mg protein.

TABLE 18
cFXN-HA Expression in NHP after Intravenous Injection

| | NHP2001 | |
|---|---|---|
| | cFXN-HA | VG |
| Tissue | (ng/mg protein) | (VG/DC) |
| Frontal Cortex | BLLQ | 0.24 |
| Striatum | BLLQ | 0.04 |
| Brainstem | 112.9 | 0.50 |
| Cerebellum | BLLQ | 0.02 |
| Cervical Spinal Cord | 49.2 | 0.14 |
| Thoracic Spinal Cord | 14.1 | 0.15 |
| Lumbar Spinal Cord | 32.4 | NA |
| Cervical Dorsal Root Ganglia | 195.4 | 0.71 |
| Thoracic Dorsal Root Ganglia | 88.2 | 1.18 |
| Lumbar/Sacral Dorsal Root Ganglia | 87.4 | 1.86 |
| Heart Ventricle | 212.4 | 9.1 |
| Heart Atrium | 358.0 | 7.23 |
| Liver | 4.48 | 224.83 |
| Kidney | BLLQ | 0.93 |
| Lung | BLLQ | 0.58 |
| Soleus | 1.1 | 0.44 |
| Jejunum | 2.0 | 1.86 |
| Spleen | BLLQ | 14.65 |

[0926] These results show that in non-human primates (NHPs) 28 days after intravenous injection of 6.7×10¹² VG/kg, VOY101-cFXN-HA resulted in brain transduction. Significant levels of cFXN-HA protein were detected in many CNS regions including the spinal cord (cervical, thoracic and lumbar segments) and brainstem. Significant levels of vector genomes were detected in many CNS regions including the spinal cord (cervical and thoracic segments), brainstem, and cortex, after IV dosing.

C. Non-Human Primate In Vivo Biodistribution and Transgene Expression Levels after IV Administration of VOY201-FXN-HA AAV Particles

[0927] A dose-response study in cynomolgus monkeys (Macaca fascicularis) was conducted to evaluate cFXN expression within the CNS after IV dosing of VOY201-cFXN-HA.

[0928] A viral genome comprising HA-tagged cynomolgus frataxin (cFXN-HA) was engineered into a single stranded expression vector. A viral genome comprising AAV2 wild-type ITRs, a synthetic promoter composed of CMV enhancer and chicken beta-actin promoter (CBA), Macaca fascicularis frataxin (cFXN) with a HA-tag, triple repeat of a miR-122 target sequence (to reduce transgene liver expression), and a human growth hormone polyadenylation sequence was used to generate AAV particles, having a capsid serotype of VOY201, by triple transfection into HEK293T cells. The ITR-to-ITR sequence of the viral genome is provided as SEQ ID NO: 1802.

[0929] The single-stranded AAV particles were purified and formulated in phosphate buffered saline (PBS) with 0.001% F-68, and then administered to non-human primate (Macaca fascicularis) via saphenous vein injection at 5 mL/kg, with a vector concentration of 1.54×10¹¹ to 4.75×10² vg/mL. Animals were dosed at 6.32×10¹¹, 2.0×10¹², or 2.0×10¹³ VG/kg.

[0930] Approximately 28 days following AAV particle administration, several tissue samples were collected. Tissue samples allocated for cFXN-HA protein quantification or vector genome quantification were snap frozen. Tissue samples allocated for anti-HA immunohistochemistry were post-fixed in 4% paraformaldehyde for 12 to 72 hours at 2-8° C. For single labeling, tissue sections (20 μm thickness) were stained with a rabbit monoclonal antibody to HA tag (1:1000 or 1:2000), followed by a goat-anti-rabbit IgG biotinylated secondary antibody (1:1000), and then developed with DAB plus nickel.

[0931] HA staining was observed in multiple CNS regions after IV dosing of VOY201-cFXN-HA at 2×10¹³ vg/kg. These regions include but are not limited to, the spinal cord (cervical, thoracic and lumbar segments), cerebellum (including dentate nucleus), thalamus, striatum, substantia nigra, and sensory and motor cortex. Furthermore, HA staining showed transduction of large numbers of neurons in multiple CNS regions, including those of neuronal morphology in the substantia nigra, dentate nucleus and thalamus. In addition, cells of neuronal morphology in the spinal cord, motor and sensory cortices, and striatum were HA-immunoreactive.

[0932] Double labeling for the HA tag and the neuronal marker NeuN was carried out using a chromogenic method. Tissue sections (20 μm thickness) were stained with a rabbit monoclonal antibody to HA tag (1:1000), followed by a goat-anti-rabbit IgG biotinylated secondary antibody (1:1000), and then developed with DAB (without nickel). The sections were then stained with a mouse monoclonal to NeuN second primary antibody, followed by a goat-anti-mouse IgG biotinylated secondary antibody. The NeuN signal was then detected with a green chromogen.

[0933] Multiple HA+ cells were double-labeled with the neuronal marker NeuN. These results demonstrate that neurons of the cerebellar dentate nucleus were labeled for the HA tag after intravenous injection of VOY201-cFXN-HA at 2×10¹³ VG/kg. Therefore, after an intravenous dose of 2×10¹³ vg/kg in cynomolgus monkeys, neurons of the cerebellar dentate nucleus are transduced and express the transgene.

[0934] Expression of the HA tag in lumbar dorsal root ganglia was present in both large (>40 um) and small sensory neurons, with the labeling increasing in a dose-dependent manner with IV injection of VOY201-cFXN-HA at 6.32×10¹¹, 2.0×10¹², or 2.0×10¹³ VG/kg.

[0935] Vector genome digital PCR quantification was performed using a probe set against the CMV enhancer region of the CBA promoter, normalized to host RnaseP and expressed in vector genome per diploid cell (VG/DC). cFXN-HA protein levels were measured by ELISA. cFXN-HA protein levels (in ng cFXN-HA/mg of total protein) and vector genome distribution (VG/DC) for the VOY201 capsid serotype are shown in Table 19. In Table 19, “BLLQ” means below lower limit of quantification and “NA” means not analyzed. The LLOQ for cFXN-HA protein was approximately 0.123 ng/mg. The LLOQ for the vector genome assay was approximately 0.2 VG/DC.

TABLE 19
cFXN-HA Expression in NHP after Intravenous Injection of VOY201-cFXN-HA

| | 6.3 × 10¹¹ VG/kg | | 2 × 10¹² VG/kg | | 2 × 10¹³ VG/kg | |
|---|---|---|---|---|---|---|
| | NHP003 | | NHP005 | | NHP007 | |
| | NHP004 | | NHP009 | | NHP008 | |
| | cFXN-HA | | cFXN-HA | | cFXN-HA | |
| | (ng/mg | VG | (ng/mg | VG | (ng/mg | VG |
| Tissue | prot.) | (VG/DC) | prot.) | (VG/DC) | prot.) | (VG/DC) |
| Frontal Cortex | NA | BLLQ | NA | BLLQ | NA | 0.27 |
| | NA | BLLQ | NA | BLLQ | NA | 0.54 |
| Striatum | BLLQ | BLLQ | BLLQ | BLLQ | BLLQ | 0.27 |
| | BLLQ | BLLQ | BLLQ | BLLQ | BLLQ | 0.81 |
| Brainstem | BLLQ | BLLQ | BLLQ | BLLQ | 29.4 | 0.73 |
| | BLLQ | BLLQ | BLLQ | BLLQ | BLLQ | 0.96 |
| Cerebellum | BLLQ | BLLQ | BLLQ | BLLQ | BLLQ | 0.03 |
| | BLLQ | BLLQ | BLLQ | BLLQ | 5.1 | 0.22 |
| Cervical Spinal | BLLQ | BLLQ | BLLQ | BLLQ | 63.7 | 0.36 |
| Cord | BLLQ | BLLQ | BLLQ | BLLQ | 85.0 | 0.12 |
| Thoracic | BLLQ | BLLQ | BLLQ | BLLQ | 41.2 | 0.32 |
| Spinal Cord | BLLQ | BLLQ | BLLQ | BLLQ | 44.5 | 0.32 |
| Lumbar Spinal | BLLQ | BLLQ | BLLQ | BLLQ | 43.9 | 0.37 |
| Cord | BLLQ | BLLQ | BLLQ | BLLQ | 49.2 | 0.53 |
| Cervical DRG | BLLQ | BLLQ | 9.29 | BLLQ | 421.5 | 2.41 |
| | 2.8 | BLLQ | BLLQ | BLLQ | 509.9 | 1.87 |
| Thoracic DRG | BLLQ | BLLQ | 6.1 | BLLQ | 227.2 | 2.92 |
| | BLLQ | BLLQ | BLLQ | BLLQ | 866.4 | 2.52 |
| Lumbar/Sacral | BLLQ | BLLQ | 4.9 | BLLQ | 122.2 | 3.68 |
| DRG | BLLQ | BLLQ | BLLQ | BLLQ | 138.1 | 1.63 |
| Heart Ventricle | BLLQ | BLLQ | 22.9 | 0.5 | 1034.5 | 15.3 |
| | 6.0 | 0.2 | BLLQ | 0.4 | 185.6 | 7.7 |
| Heart Atrium | 7.3 | BLLQ | 60.5 | 0.97 | 650.5 | 26.3 |
| | 5.2 | BLLQ | BLLQ | 0.13 | 810.0 | 26.6 |
| Liver | BLLQ | 0.4 | BLLQ | 30.4 | BLLQ | 444.1 |
| | BLLQ | 7.9 | BLLQ | 74.8 | BLLQ | 284.4 |
| Kidney | BLLQ | BLLQ | BLLQ | 0.3 | 6.4 | 6.3 |
| | BLLQ | BLLQ | BLLQ | BLLQ | 2.8 | 2.5 |
| Lung | BLLQ | NA | BLLQ | NA | 0.9 | 3.3 |
| | BLLQ | NA | BLLQ | NA | BLLQ | 3.6 |
| Soleus | BLLQ | NA | BLLQ | NA | 69.9 | 13.4 |
| | BLLQ | NA | BLLQ | NA | 12.6 | 6.7 |
| Jejunum | BLLQ | NA | BLLQ | NA | BLLQ | 0.6 |
| | BLLQ | NA | BLLQ | NA | BLLQ | 0.3 |
| Spleen | BLLQ | 1.3 | BLLQ | 4.3 | BLLQ | 4.4 |
| | BLLQ | 1.2 | BLLQ | 4.6 | 2.1 | 2.3 |

[0936] In summary, in non-human primates (NHPs) 28 days after intravenous injection of VOY201-cFXN-HA, significant levels of cFXN-HA protein were detected in many CNS regions including the spinal cord (cervical, thoracic and lumbar segments), brainstem, and cerebellum. Significant levels of vector genomes were detected in many CNS regions including the spinal cord (cervical, thoracic and lumbar segments), striatum, brainstem, cerebellum and frontal cortex after IV dosing. Substantial gene transfer to the NHP CNS was observed, including, for example, regions such as spinal cord, brain stem, sensory cortex, motor cortex, cerebellum, cerebellar dentate nucleus, thalamus, striatum, and substantia nigra, with cells of neuronal morphology in these regions exhibiting transgene expression. In addition, the dorsal root ganglia and the heart showed dose-dependent transgene expression, with sensory neurons of the dorsal root ganglia exhibiting transduction.

D. Non-Human Primate Dose-Dependency of Biodistribution and Transgene Expression Levels after IV Administration of VOY101-FXN-HA AAV Particles

[0937] A study in cynomolgus monkeys (Macaca fascicularis) was conducted to evaluate cFXN expression within the CNS after IV administration of two different dose levels of single stranded VOY101-cFXN-HA or control AAV9-cFXN-HA at a single dose level.

[0938] A viral genome comprising HA-tagged cynomolgus frataxin (cFXN-HA) was engineered into a single stranded expression vector. A viral genome comprising AAV2 wild-type ITRs, a synthetic promoter composed of CMV enhancer and chicken beta-actin promoter (CBA), Macaca fascicularis frataxin (cFXN) with an HA-tag and a human growth hormone polyadenylation sequence was used to generate AAV particles, having a capsid serotype of VOY101 or AAV9. The ITR-to-ITR sequence of the viral genome is provided as SEQ ID NO: 1801.

[0939] The single-stranded AAV particles were purified and formulated in phosphate buffered saline (PBS) with 0.001% F-68, and then administered to non-human primate (Macaca fascicularis) via saphenous vein injection at 5 ml/kg, with a total dose of 6.7×10¹² VG/kg or 4.89×10¹³ VG/kg VOY101-cFXN-HA. A vehicle negative control group was also evaluated.

[0940] Approximately 28 days following AAV particle administration, several tissue samples were collected. Tissue samples allocated for cFXN-HA protein quantification or vector genome quantification were snap-frozen. Tissue samples allocated for anti-HA immunohistochemistry were post-fixed in 4% paraformaldehyde for 12 to 72 hours at 2-8° C. Tissue sections (20 μm thickness) were stained with a rabbit monoclonal antibody to HA tag (1:1000 or 1:2000), followed by a goat-anti-rabbit IgG biotinylated secondary antibody (1:1000), and then developed with DAB plus nickel.

[0941] Frataxin protein levels were measured by ELISA and reported in ng FXN/mg of total protein; the results are shown in Table 20. Vector genome digital PCR quantification was performed using a probe set against the CMV enhancer region of the CBA promoter, normalized to host RNaseP, and expressed in vector genome per diploid cell (VG/DC); the results are shown in Table 20.

TABLE 20
Vector Genome Distribution and cFXN-HA Expression
in NHP after Intravenous Injection of AAV Particles

| | 6.7 × 10¹² VG/kg VOY101 | | 4.89 × 10¹³ VG/kg VOY101 | |
|---|---|---|---|---|
| | NHP2001 | | NHP3001 | |
| | NHP2002 | | NHP3002 | |
| | NHP2003 | | NHP3003 | |
| | cFXN-HA | VG | cFXN-HA | VG |
| Tissue | (ng/mg prot.) | (VG/DC) | (ng/mg prot.) | (VG/DC) |
| Motor Cortex | BLLQ | 0.29 | BLLQ | 1.51 |
| | BLLQ | 0.10 | BLLQ | 1.79 |
| | BLLQ | 0.03 | BLLQ | 2.32 |
| Sensorimotor Cortex | BLLQ | 0.17 | BLLQ | 0.67 |
| | BLLQ | 0.07 | BLLQ | 1.46 |
| | BLLQ | 0.06 | BLLQ | 0.75 |
| Striatum | BLLQ | 0.09 | BLLQ | 0.61 |
| | BLLQ | 0.03 | BLLQ | 1.01 |
| | BLLQ | 0.04 | BLLQ | 0.65 |
| Brainstem | 1.80 | 0.21 | 211.85 | 0.58 |
| | BLLQ | 0.06 | 18.05 | 2.33 |
| | BLLQ | 0.07 | 76.27 | 1.10 |
| Cerebellum cortex | BLLQ | 0.02 | BLLQ | 0.08 |
| | BLLQ | BLLQ | 1.67 | 0.08 |
| | BLLQ | BLLQ | 4.28 | 0.07 |
| Cervical Spinal Cord | 15.25 | 0.30 | 172.72 | 1.12 |
| | 15.45 | 0.06 | 87.42 | 1.36 |
| | 4.31 | 0.07 | 97.47 | 1.84 |
| Thoracic Spinal Cord | NA | NA | NA | 1.09 |
| | NA | NA | NA | 0.76 |
| | NA | NA | NA | 1.77 |
| Lumbar Spinal Cord | 13.25 | 0.28 | 162.89 | 1.68 |
| | 17.06 | 0.13 | 59.19 | 0.83 |
| | 8.85 | 0.06 | 90.71 | 0.94 |
| Cervical Dorsal | 90.27 | 0.1 | 1256.69 | 0.69 |
| Root Ganglia | 110.87 | 0.09 | 1319.74 | 0.29 |
| | 56.73 | 0.05 | 1472.33 | 0.59 |
| Thoracic Dorsal | 30.90 | 0.11 | 1432.87 | 2.35 |
| Root Ganglia | 49.38 | 0.10 | 341.00 | 1.11 |
| | 18.86 | BLLQ | 367.13 | 0.77 |
| Lumbar/Sacral | 37.93 | 0.25 | 1808.81 | 1.70 |
| Dorsal Root Ganglia | 59.02 | 0.19 | 224.99 | 1.73 |
| | 29.31 | 0.07 | 534.13 | 1.31 |
| Heart Ventricle | 57.64 | 1.10 | 555.55 | 8.59 |
| | 90.78 | 0.94 | 394.04 | 6.76 |
| | 54.47 | 0.77 | 353.98 | 12.84 |
| Heart Atrium | 196.06 | 1.34 | 754.14 | 8.76 |
| | 81.59 | 4.81 | 271.92 | 10.02 |
| | 30.25 | 0.91 | 112.91 | 10.10 |
| Liver | 2.25 | 204.98 | 16.70 | 1094.89 |
| | 2.99 | 49.37 | 65.53 | 1638.33 |
| | 3.10 | 99.07 | 51.40 | 685.10 |
| Kidney | BLLQ | 0.56 | 1.36 | 6.44 |
| | BLLQ | 0.95 | 7.91 | 3.84 |
| | BLLQ | 1.01 | 3.34 | 2.78 |
| Soleus | 12.56 | 0.85 | 203.70 | 5.86 |
| | 1.10 | 0.34 | 262.47 | 4.24 |
| | 2.46 | 0.26 | 347.42 | 3.71 |
| Jejunum | BLLQ | 0.03 | BLLQ | 0.99 |
| | BLLQ | 0.24 | BLLQ | 0.78 |
| | BLLQ | 0.18 | BLLQ | 2.10 |
| Spleen | BLLQ | 6.62 | BLLQ | 15.44 |
| | BLLQ | 7.60 | BLLQ | 8.03 |
| | BLLQ | 10.10 | BLLQ | 48.11 |
| Sympathetic | 161.75 | 0.65 | 996.59 | 8.08 |
| thoracic Chain | 108.70 | 0.63 | 115.45 | 0.62 |
| Ganglia | 101.23 | 0.52 | 215.32 | 2.51 |
| Adrenal | 5.93 | 0.58 | 53.25 | 7.14 |
| | 56.26 | 0.88 | 84.33 | 3.34 |
| | 22.20 | 0.32 | 29.95 | 11.39 |

[0942] These results show that in non-human primates (NHPs) 28 days after intravenous injection of 6.7×10¹² VG/kg or 4.89×10¹³ VG/kg VOY101-cFXN-HA resulted in brain transduction. Significant levels of cFXN-HA protein were detected in many CNS regions including but not limited to the spinal cord (cervical and lumbar segments), cerebellum and brainstem. Significant levels of vector genomes were detected in many CNS regions including, for example, the spinal cord (cervical and thoracic segments), brainstem, striatum, cerebellum and cortex, after IV dosing. Substantially more cFXN-HA was observed in brain regions including but not limited to cerebellum, brainstem and spinal cord in VOY101-cFXN-HA-treated NHPs compared to AAV9-cFXN-HA, both IV at 4.89×10¹³ VG/kg. In the DRGs, VOY101-cFXN-HA-treated NHPs displayed substantially higher cFXN-HA compared to AAV9-cFXN-HA-treated animals, both IV at 4.89×10¹³ VG/kg. In general, VOY101-cFXN-HA-treated NHPs showed dose-dependency of brain and DRG cFXN-HA levels comparing 6.7×10¹² VG/kg to 4.89×10¹³ VG/kg dosed animals.

[0943] NHPs treated with IV VOY101-cFXN-HA displayed substantial vector genome transfer to the brain and DRGs at both doses and in a dose-dependent manner. High vector genome levels were found in many brain regions, including but not limited to cortex, striatum, brainstem, cerebellum, and spinal cord. In an exemplar study, one L6 lumbar DRG of an NHP treated with 6.7×10¹² VG/kg of VOY101-cFXN-HA was assessed by HA-immunohistochemistry with eosin counterstain. The tissue was extracted as noted previously, at 28 days after IV administration of VOY101-cFXN-HA. Analysis of the neurons of the DRG indicated that all (100%) large neurons (≥40 μm diameter) were also HA+, though intensity varied across the 165 neurons quantified. Approximately 74% of the counted neurons showed high intensity HA staining (i.e., frataxin expression).

[0944] RT-qPCR quantification of frataxin transgene mRNA in motor cortex and spinal cord was performed using an assay against exonic sequences of the human beta globin (hBG) intron/exon boundaries, normalized to the geometric mean of alanyl-tRNA synthetase (AARS), TATA-box binding protein (TBP) and X-prolyl aminopeptidase (XPNPEP1), and expressed in fold expression over the AAV9 group. The results are shown in Table 21. These results demonstrate 5-fold higher FXN mRNA in motor cortex with VOY101 vs AAV9 at this dose. These results also demonstrate 3.8-fold higher FXN mRNA in spinal cord with VOY101 vs AAV9 at this dose.

TABLE 21
cFXN mRNA Fold Expression Over AAV9 in NHP after
Intravenous Injection of AAV particles

| | 4.89 × 10¹³ VG/kg | 4.89 × 10¹³ VG/kg |
|---|---|---|
| | VOY101-cFXN-HA | AAV9-cFXN-HA |
| | NHP3001 | NHP1001 |
| | NHP3002 | NHP1002 |
| Tissue | NHP3003 | NHP1003 |
| Motor Cortex | 3.46 | 0.38 |
| Punch | 4.43 | 1.62 |
| | 10.18 | 1.62 |
| Thoracic T7 | 5.19 | 0.39 |
| Spinal Cord | 1.63 | 0.89 |
| Cross-section | 8.95 | 2.84 |

[0945] Significant HA staining was observed in cells along the entire rostral-caudal extent of the spinal cord, particularly in ventral horn motor neurons after IV dosing of 4.89×10¹³ VG/kg of VOY101-cFXN-HA or AAV9-cFXN-HA. At both doses of VOY101-cFXN-HA, abundant HA staining was observed in segment T12 of the spinal cord, including within the dorsal nucleus or Clark's column. Numerous HA+ cells including those with neuronal morphology were observed in brain regions of animals receiving a dose of 4.89×10¹³ VG/kg of VOY101-cFXN-HA. These regions include, for example, the motor and sensory cortices, the brainstem including the olivary nucleus, hippocampus, the substantia nigra, thalamus, the lateral geniculate nucleus, and the deep cerebellar nuclei including the dentate nucleus. Vehicle-treated controls exhibited essentially no detectable or very low background staining.

[0946] In the brain of NHPs treated intravenously with AAV9-cFXN-HA at 4.89×10¹³ VG/kg, HA− labeling was less pronounced compared to NHPs treated with VOY101-cFXN-HA at 4.89×10¹³ VG/kg.

[0947] Robust HA staining was observed in the cervical, thoracic, and lumbar dorsal root ganglia for NHP treated intravenously with VOY101-cFXN-HA orAAV9-cFXN-HA at 4.89×10¹³ VG/kg. Vehicle-treated control exhibited essentially no detectable or very low background staining.

[0948] The distribution of vector genomes to motor neurons was assessed using a Basescope singleplex in situ hybridization (ISH) assay in spinal cord tissue from NHPs treated intravenously with VOY101-cFXN-HA or AAV9-cFXN-HA at 4.89×10¹³ VG/kg. The fixed spinal cord samples were paraffin-embedded and sectioned (5 μm thickness). In situ hybridization was conducted on cross sections of the cervical spinal cord to label vector genome DNA. All ventral horn motor neurons (identified by morphology) with identifiable nuclei were scored to evaluate vector genome levels based on the number of dots per nucleus. Scores for vector genome levels were defined as below:

[0949] Score (Dots counted per nucleus)
[0950] 1: 1 dot/nucleus
[0951] 2: 2-3 dots/nucleus
[0952] 3: 4-10 dots/nucleus
[0953] 4: >10 dots/nucleus

[0954] Scores were obtained for all processed samples. The number of motor neurons per score was determined for AAV9 and VOY101 groups and is shown in Table 22. These data observe pronounced (Scores 3 and 4) nuclear VG labeling in 3.2-fold more motor neurons with VOY101 vs AAV9 at this dose.

TABLE 22
Vector Genome Distribution to Spinal Cord Motor Neurons
Assessed by ISH After Intravenous Injection of VOY101-cFXN-HA
or AAV9-cFXN-HA at 4.9 × 10¹³ VG/kg

| | | Average Number of Motor Neurons | | | |
|---|---|---|---|---|---|
| Group | Animal ID | Score 1 | Score 2 | Score 3 | Score 4 |
| AAV9 | NHP1001 | 6 | 4 | 0 | 0 |
| | NHP1002 | 9 | 2.5 | 0 | 1.5 |
| | NHP1003 | 7 | 5.5 | 0.5 | 1 |
| | AVERAGE | 7.33 | 4 | 0.17 | 0.83 |
| VOY101 | NHP3001 | 9.5 | 6.5 | 1 | 1 |
| | NHP3002 | 10 | 5 | 2 | 0.5 |
| | NHP3003 | 8 | 3.5 | 1.5 | 3.5 |
| | AVERAGE | 9.17 | 5 | 1.50 | 1.67 |

[0955] For all scores, VOY101 treated animals showed higher vector genome distribution to cervical spinal cord motor neurons compared to AAV9 treated animals.

E. Non-Human Primate Tolerability Assessment of Treatment with AAV9, VOY101 and VOY201 AAV Particles

[0956] A series of studies in cynomolgus monkeys (Macaca fascicularis) was conducted to evaluate tolerability of AAV9, VOY101 or VOY201 AAV particles carrying different payload transgenes after IV administration of single doses varying from 2×10¹² VG/kg to 1.2×10¹⁴ VG/kg. See Table 23. All animals were pre-screened to display low neutralizing anti-capsid antibody serum titer. Male and female NHP were used according to Table 23.

[0957] A viral genome comprising HA-tagged cynomolgus frataxin (cFXN-HA) was engineered into a single stranded expression vector. A viral genome comprising AAV2 wild-type ITRs, a synthetic promoter composed of CMV enhancer and chicken beta-actin promoter (CBA), Macaca fascicularis frataxin (cFXN) with an HA-tag and a human growth hormone polyadenylation sequence was used to generate AAV particles, having a capsid serotype of VOY101 or VOY201. The ITR-to-ITR sequence of the viral genome is provided as SEQ ID NO: 1801.

[0958] A viral genome comprising HA-tagged cynomolgus frataxin (cFXN-HA) was engineered into a single stranded expression vector. A viral genome comprising AAV2 wild-type ITRs, a synthetic promoter composed of CMV enhancer and chicken beta-actin promoter (CBA), Macaca fascicularis frataxin (cFXN) with a HA-tag, triple repeat of a miR-122 target sequence (to reduce transgene liver expression), and a human growth hormone polyadenylation sequence was used to generate AAV particles, having a capsid serotype of VOY201, by triple transfection into BTEK293T cells. The ITR-to-ITR sequence of the viral genome is provided as SEQ ID NO: 1802.

[0959] A viral genome comprising a micro-RNA targeting human superoxide dismutase 1 (miRSOD1) was engineered into a self-complementary expression vector. A viral genome comprising AAV2 wild-type ITRs, a synthetic H1 promoter, a micro-RNA targeting hSOD1, and a rabbit beta globin polyadenylation sequence was used to generate AAV particles, having a capsid serotype of VOY101, by triple transfection into BTEK293T cells. The ITR-to-ITR sequence of the viral genome is provided as SEQ ID NO: 1822.

[0960] The AAV particles were purified and formulated in phosphate buffered saline (PBS) with 0.001% F-68, and then administered to non-human primates (Macaca fascicularis) via saphenous vein injection as described in Table 23.

TABLE 23
Study design

| | Capsid | | | In-life |
|---|---|---|---|---|
| | Transgene | | | Duration |
| | Dose | | Dose | (weeks)/ |
| Group | (vg/kg) | Transgene | (vg/kg) | Gender |
| 1 (n = 2) | VOY201 | cFXN-HA | 2 × 10¹³ | 4/F |
| | | (ITR to ITR: SEQ ID NO: 1801) | | |
| 2 (n = 2) | AAV9 | cFXN-HA | 2 × 10¹³ | 4/F |
| | | (ITR to ITR: SEQ ID NO: 1801) | | |
| 3 (n = 2) | VOY201 | cFXN-HA | 6.65 × 10¹² | 4/M |
| | | plus miR122 | | |
| | | (ITR to ITR: SEQ ID NO: 1802) | | |
| 4 (n = 2) | VOY101 | cFXN-HA | 6.65 × 10¹² | 4/M |
| | | (ITR to ITR: SEQ ID NO: 1801) | | |
| 5 (n = 2) | Vehicle Control | | | 4/F |
| 6 (n = 2) | VOY201 | cFXN-HA | 6.3 × 10¹¹ | 4/F |
| | | plus miR122 | | |
| | | (ITR to ITR: SEQ ID NO: 1802) | | |
| 7 (n = 2) | VOY201 | cFXN-HA | 2 × 10¹³ | 4/F |
| | | plus miR122 | | |
| | | (ITR to ITR: SEQ ID NO: 1802) | | |
| 8 (n = 2) | VOY201 | cFXN-HA | 2 × 10¹² | 4/F |
| | | plus miR122 | | |
| | | (ITR to ITR: SEQ ID NO: 1802) | | |
| 9 (n = 2) | VOY201 | cFXN-HA | 2 × 10¹² | 12/F |
| | | plus miR122 | | |
| | | (ITR to ITR: SEQ ID NO: 1802) | | |
| 10 (n = 2) | Vehicle Control | | | 4/F |
| 11 (n = 3) | VOY101 | miRSOD1 | 3.3 × 10¹³ | 4/2F, 1M |
| | | (ITR to ITR: SEQ ID NO: 1822) | | |
| 12 (n = 3) | VOY101 | miRSOD1 | 1.2 × 10¹⁴ | 4/2F, 1M |
| | | (ITR to ITR: SEQ ID NO: 1822) | | |
| 13 ( n= 2) | Vehicle Control | | | 4/2M |
| 14 (n = 3) | VOY101 | cFXN-HA | 6.7 × 10¹² | 4/3M |
| | | (ITR to ITR: SEQ ID NO: 1801) | | |
| 15 (n = 3) | VOY101 | cFXN-HA | 4.9 × 10¹³ | 4/3M |
| | | (ITR to ITR: SEQ ID NO: 1801) | | |
| 16 (n = 3) | AAV9 | cFXN-HA | 4.9 × 10¹³ | 4/3M |
| | | (ITR to ITR: SEQ ID NO: 1801) | | |

[0961] In a series of studies outlined herein, no moribund non-human primates were observed after IV dosing of AAV9, VOY101 or VOY201 particles carrying different transgenes.

[0962] Clinical observations were obtained daily. No AAV-related clinical observation abnormalities were found up to 12 weeks of study duration. In one study, pre-dosing and post-dosing tremors were recorded, but were not dose-related. Based on clinical observations, the treatments were well tolerated by all NHP. See Table 24.

[0963] Body weights were assessed at day of dosing, then once weekly, and on the day of necropsy. No significant changes in body weight were observed, indicating that treatments were well tolerated. See Table 24.

TABLE 24
Body weight

| | Capsid Transgene/ | | % Change BW | |
|---|---|---|---|---|
| | Dose | % Change BW | D 1 to Day of | Clinical |
| Group | (vg/kg) | D 1 to D 5-8 | Necroscopy | Observations |
| 1-1 | VOY201 cFXN-HA | 0.0 | 2.4 | none |
| 1-2 | 2 × 10¹³ | 3.4 | 2.4 | none |
| 2-1 | AAV9 cFXN-HA | −0.7 | −1.4 | none |
| 2-2 | 2 × 10¹³ | −2.2 | 6.9 | none |
| 3-1 | VOY201 cFXN-HA plus miR122 | 0.0 | −4 | none |
| 3-2 | 6.65 × 10¹² | 0.0 | −7.1 | none |
| 4-1 | VOY101 cFXN-HA | 3.1 | 3.2 | none |
| 4-2 | 6.65 × 10¹² | 3.1 | 3.2 | none |
| 5-1 | Vehicle Control | 2.4 | −5 | none |
| 5-2 | | −1.3 | −1.6 | none |
| 6-1 | VOY201 cFXN-HA plus miR122 | −1.7 | 1 | tremor wk 1-4 |
| 6-2 | 6.3 × 10¹¹ | −0.8 | 2.5 | none |
| 7-1 | VOY201 cFXN-HA plus miR122 | 10.7 | −4.9 | none |
| 7-2 | 2 × 10¹³ | 8.6 | −6.4 | tremor wk 2-4 |
| 8-1 | VOY201 cFXN-HA plus miR122 | 2.8 | −1.4 | none |
| 8-2 | 2 × 10¹² | 0.0 | −1.5 | tremor predose-wk 2 |
| 9-1 | VOY201 cFXN-HA plus miR122 | −0.8 | 2.7 | tremor wk 2-12 |
| 9-2 | 2 × 10¹² | 0.3 | 8.9 | none |
| 10-1 | Vehicle Control | 0.3 | 0 | none |
| 10-2 | | 0.9 | −0.5 | none |
| 11-1 | VOY101 miRSOD1 | −0.3 | −4.3 | none |
| 11-2 | 3.3 × 10¹³ | 1.0 | −2 | none |
| 11-3 | | −2.4 | 2 | none |
| 12-1 | VOY101 miRSOD1 | 4.7 | −8.5 | none |
| 12-2 | 1.2 × 10¹⁴ | 4.2 | −9.1 | none |
| 12-3 | | 0.0 | 0.7 | none |
| 13-1 | Vehicle Control | −4.5 | 0 | none |
| 13-2 | | −4.5 | 0 | none |
| 14-1 | VOY101 cFXN-HA | 0.0 | 0 | none |
| 14-2 | 6.7 × 10¹² | 0.0 | 0 | none |
| 14-3 | | 0.0 | 3.8 | none |
| 15-1 | VOY101 cFXN-HA | 3.7 | −3.7 | none |
| 15-2 | 4.9 × 10¹³ | 3.6 | 0 | none |
| 15-3 | | 6.9 | −6.9 | none |
| 16-1 | AAV9 cFXN-HA | 0 | 0 | none |
| 16-2 | 4.9 × 10¹³ | 4.2 | 4.2 | none |
| 16-3 | | 0 | 0 | none |

Legend:
BW = Body Weight
D 1, D 5-D 8 = Days of dosing
None = no findings reported

[0964] To further assess tolerability of treatments, blood and serum samples for clinical chemistry analysis were collected pre-dosing and post-dosing and analyzed for a complete blood cell count and serum clinical chemistry. See Tables 25-26. No physiologically significant changes in clinical chemistry measurement (serum chemistry, hematology, coagulation) were observed after IV dosing of AAV9, VOY101 or VOY201 particles carrying different transgenes. In NHP treated with VOY201-cFXN-HA at 2×10¹² VG/kg, 2 of 4 animals had 3-fold to 4-fold elevated ALTs (with no concomitant TBIL, change) on Day 15, which returned to baseline by Day 28. However, at 2×10¹³ VG/kg (10-fold higher dose), no significant changes in ALT were observed. NHP treated IV with AAV9-cFXN-HA at 4.9×10¹³ VG/kg had ALT and AST elevations (average ˜7-fold) on Day 5 (with no concomitant TBIL change) that essentially resolved by Day 15. These 3 animals had elevated PT and PTT that also resolved by Day 15.

TABLE 25
Blood/serum analysis

| | | ALT | | | | AST | | | | Creatine | | | | | |
|---|---|---|---|---|---|---|---|---|---|---|---|---|---|---|---|
| | Capsid Transgene | U/L | U/L | U/L | U/L | U/L | U/L | U/L | U/L | (mg/dL) | | TBIL | | | |
| Grp | Dose (vg/kg) | pre | D 5 | D 15 | Nx | pre | D 5 | 15 | Nx | pre | Nx | Pre | D 5 | D 15 | Nx |
| 1-1 | VOY201 | 78 | NA | 154 | 74 | 31 | NA | 38 | 30 | 0.8 | 0.7 | 0.4 | NA | 0.2 | 0.2 |
| 1-2 | cFXN-HA | 53 | NA | 134 | 51 | 25 | NA | 36 | 24 | 1.0 | 0.8 | 0.3 | NA | 0.2 | 0.2 |
| | 2 × 10¹³ | | | | | | | | | | | | | | |
| 2-1 | AAV9 | 42 | NA | 34 | 42 | 27 | NA | 26 | 25 | 0.8 | 0.7 | 0.2 | NA | 0.1 | 0.1 |
| 2-2 | cFXN-HA | 47 | NA | 53 | 78 | 23 | NA | 29 | 30 | 0.9 | 0.6 | 0.3 | NA | 0.2 | 0.2 |
| | 2 × 10¹³ | | | | | | | | | | | | | | |
| 3-1 | VOY201 | 61 | NA | 44 | 58 | 106 | NA | 52 | 83 | 0.6 | 0.5 | 0.2 | NA | 0.1 | 0.2 |
| 3-2 | cFXN-HA | 46 | NA | 56 | 58 | 65 | NA | 50 | 67 | 0.4 | 0.4 | 0.4 | NA | 0.1 | 0.3 |
| | plus miR122 | | | | | | | | | | | | | | |
| | 6.65 × 10¹² | | | | | | | | | | | | | | |
| 4-1 | VOY101 | 10 | NA | 11 | 19 | 43 | NA | 42 | 52 | 0.7 | 0.6 | 0.1 | NA | 0.1 | 0.2 |
| 4-2 | cFXN-HA | 23 | NA | 40 | NA | 70 | NA | 43 | NA | 0.5 | NA | 1.0 | NA | 0.1 | NA |
| | 6.65 × 10¹² | | | | | | | | | | | | | | |
| 5-1 | Vehicle | 44 | NA | 35 | 35 | 26 | NA | 26 | 28 | 0.8 | 0.8 | 0.1 | NA | 0.2 | 0.2 |
| 5-2 | Control | 31 | NA | 28 | 56 | 22 | NA | 32 | 28 | 0.8 | 0.7 | 0.2 | NA | 0.2 | 0.3 |
| 6-1 | VOY201 | 24 | NA | 33 | 25 | 58 | NA | 29 | 22 | 1.1 | 0.8 | 0.2 | NA | 0.2 | 0.2 |
| 6-2 | cFXN-HA | 24 | NA | 31 | 28 | 21 | NA | 29 | 27 | 0.7 | 0.6 | 0.2 | NA | 0.2 | 0.2 |
| | plus miR122 | | | | | | | | | | | | | | |
| | 6.3 × 10¹¹ | | | | | | | | | | | | | | |
| 7-1 | VOY201 | 23 | NA | 187 | 29 | 29 | NA | 49 | 30 | 1.0 | 0.8 | 0.3 | NA | 0.4 | 0.3 |
| 7-2 | cFXN-HA | 23 | NA | 189 | 27 | 20 | NA | 47 | 22 | 0.6 | 0.5 | 0.2 | NA | 0.3 | 0.2 |
| | plus miR122 | | | | | | | | | | | | | | |
| | 2 × 10¹³ | | | | | | | | | | | | | | |
| 8-1 | VOY201 | 56 | NA | 33 | 47 | 22 | NA | 32 | 26 | 0.7 | 0.6 | 0.2 | NA | 0.2 | 0.2 |
| 8-2 | cFXN-HA | 49 | NA | 24 | 58 | 36 | NA | 27 | 29 | 0.7 | 0.7 | 0.2 | NA | 0.3 | 0.2 |
| | plus miR122 | | | | | | | | | | | | | | |
| | 2 × 10¹² | | | | | | | | | | | | | | |
| 9-1 | VOY201 | 41 | NA | 56 | 54 | 43 | NA | 49 | 46 | 0.7 | 0.6 | 0.4 | NA | 0.4 | 0.6 |
| 9-2 | cFXN-HA | 31 | NA | 37 | 39 | 40 | NA | 32 | 28 | 0.6 | 0.7 | 0.1 | NA | 0.2 | 0.1 |
| | plus miR122 | | | | | | | | | | | | | | |
| | 2 × 10¹² | | | | | | | | | | | | | | |
| 10-1 | Vehicle | 45 | NA | 43 | 37 | 29 | NA | 26 | 25 | 0.8 | 0.7 | 0.2 | NA | 0.2 | 0.1 |
| 10-2 | Control | 41 | NA | 24 | 24 | 36 | NA | 28 | 32 | 0.9 | 0.8 | 0.2 | NA | 0.2 | 0.1 |
| 11-1 | VOY101 | 35 | NA | 61 | 36 | 27 | NA | 36 | 38 | 0.7 | 0.7 | 0.1 | NA | 0.1 | 0.1 |
| 11-2 | miRSOD1 | 31 | NA | 40 | 40 | 29 | NA | 28 | 41 | 0.7 | 0.7 | 0.2 | NA | 0.1 | 0.1 |
| 11-3 | 3.3 × 10¹³ | 45 | NA | 53 | 44 | 32 | NA | 30 | 31 | 0.8 | 0.7 | 0.2 | NA | 0.2 | 0.2 |
| 12-1 | VOY101 | 34 | NA | 42 | 31 | 24 | NA | 30 | 33 | 0.8 | 0.7 | 0.2 | NA | 0.2 | 0.2 |
| 12-2 | miRSOD1 | 24 | NA | 53 | 20 | 30 | NA | 45 | 36 | 0.7 | 0.5 | 0.1 | NA | 0.2 | 0.1 |
| 12-3 | 1.2 × 10¹⁴ | 36 | NA | 59 | 37 | 35 | NA | 60 | 57 | 0.7 | 0.7 | 0.2 | NA | 0.2 | 0.2 |
| 13-1 | Vehicle | 36 | NA | 73 | 59 | 39 | NA | 42 | 48 | 0.4 | 0.3 | 0.1 | NA | 0.1 | 0.2 |
| 13-2 | Control | 33 | NA | 42 | 52 | 50 | NA | 43 | 87 | 0.5 | 0.4 | 0.2 | NA | 0.4 | 0.7 |
| 14-1 | VOY101 | 62 | NA | 34 | 46 | 48 | NA | 41 | 48 | 0.9 | 0.6 | 0.1 | NA | 0.1 | 0.3 |
| 14-2 | cFXN-HA | 46 | NA | 90 | 67 | 49 | NA | 35 | 42 | 0.6 | 0.5 | 0.3 | NA | 0.3 | 0.3 |
| 14-3 | 6.7 × 10¹² | 59 | NA | 41 | 41 | 36 | NA | 56 | 53 | 0.7 | 0.6 | 0.1 | NA | 0.2 | 0.3 |
| 15-1 | VOY101 | 17 | NA | 59 | 34 | NA | NA | 71 | NA | 0.8 | 0.7 | 0.2 | NA | 0.4 | 0.3 |
| 15-2 | cFXN-HA | 60 | NA | 49 | NA | NA | NA | NA | NA | 0.9 | NA | 0.2 | NA | 0.1 | NA |
| 15-3 | 4.9 × 10¹³ | 53 | NA | 133 | 68 | NA | NA | 108 | 157 | 0.8 | 0.6 | 0.4 | NA | 0.3 | 0.7 |
| 16-1 | AAV9 | 71 | 116 | 93 | 78 | 77 | 96 | 91 | 96 | 0.5 | 0.4 | 0.5 | 0.4 | 0.2 | 0.7 |
| 16-2 | cFXN-HA | 26 | 285 | 60 | 55 | 63 | 298 | 54 | 159 | 0.6 | 0.7 | 0.6 | 0.4 | 0.2 | 0.4 |
| 16-3 | 4.9 × 10¹³ | 66 | 788 | 83 | 40 | 57 | 581 | 78 | 52 | 0.7 | 0.5 | 0.2 | 0.4 | 0.1 | 0.1 |

Legend
ALT = Alanine Aminotransferase
AST = Aspartate Aminotransferase
TBIL = Total bilirubin
NA = not assessed

TABLE 26
Blood/serum analysis

| | Capsid | | | | | | | | |
|---|---|---|---|---|---|---|---|---|---|
| | Transgene | PT | | | | PTT | | | |
| Group | Dose (vg/kg) | D 1 | D 5 | D 15 | Nx | D 1 | D 5 | D 15 | Nx |
| 1-1 | VOY201 | 10.4 | NA | 11.5 | 11.4 | 19.6 | NA | 21.0 | 20.2 |
| 1-2 | cFXN-HA | 11.5 | NA | 11.9 | 12.4 | 21.3 | NA | 24.3 | 23.5 |
| | 2 × 10¹³ | | | | | | | | |
| 2-1 | AAV9 | 10.7 | NA | 12.2 | 11.9 | 19.7 | NA | 21.1 | 20.5 |
| 2-2 | cFXN-HA | 10.6 | NA | 9.7 | 9.8 | 21.3 | NA | 21.1 | 21.2 |
| | 2 × 10¹³ | | | | | | | | |
| 3-1 | VOY201 | 11.2 | NA | 9.9 | 11.3 | 27.9 | NA | 28.8 | 29.1 |
| 3-2 | cFXN-HA | 12.8 | NA | 9.8 | 10.8 | 23.3 | NA | 21.7 | 22.7 |
| | plus miR122 | | | | | | | | |
| | 6.65 × 10¹² | | | | | | | | |
| 4-1 | VOY101 | 10.7 | NA | 9.6 | 10.4 | 24.2 | NA | 23.8 | 22.2 |
| 4-2 | cFXN-HA | 11.3 | NA | 11.0 | 11.1 | 22.6 | NA | 24.1 | 22.9 |
| | 6.65 × 10¹² | | | | | | | | |
| 5-1 | Vehicle | 10.5 | NA | 11.0 | 10.1 | 21.1 | NA | 23.6 | 21.0 |
| 5-2 | Control | 10.8 | NA | >100.0 | 9.7 | 21.7 | NA | 28.6 | 22.7 |
| 6-1 | VOY201 | 11.2 | NA | 10.0 | 11.1 | 22.4 | NA | 24.0 | 23.9 |
| 6-2 | cFXN-HA | 10.1 | NA | 10.3 | 10.3 | 21.1 | NA | 24.7 | 22.7 |
| | plus miR122 | | | | | | | | |
| | 6.3 × 10¹¹ | | | | | | | | |
| 7-1 | VOY201 | 10.2 | NA | 11.2 | 11.6 | 22.3 | NA | 25.1 | 23.9 |
| 7-2 | cFXN-HA | 10.3 | NA | 10.2 | 10.3 | 23.9 | NA | 25.9 | 24.9 |
| | plus miR122 | | | | | | | | |
| | 2 × 10¹³ | | | | | | | | |
| 8-1 | VOY201 | 11.0 | NA | 11.0 | 10.7 | 23.2 | NA | 22.5 | 22.0 |
| 8-2 | cFXN-HA | 10.3 | NA | 13.4 | 11.0 | 22.5 | NA | 21.5 | 22.7 |
| | plus miR122 | | | | | | | | |
| | 2 × 10¹² | | | | | | | | |
| 9-1 | VOY201 | 10.7 | NA | 10.8 | 12.9 | 24.9 | NA | 25.1 | 23.5 |
| 9-2 | cFXN-HA | 10.3 | NA | 15.4 | 11.0 | 22.3 | NA | 24.3 | 22.6 |
| | plus miR122 | | | | | | | | |
| | 2 × 10¹² | | | | | | | | |
| 10-1 | Vehicle | NA | NA | NA | NA | NA | NA | NA | NA |
| 10-2 | Control | NA | NA | NA | NA | NA | NA | NA | NA |
| 11-1 | VOY101 | NA | NA | NA | NA | NA | NA | NA | NA |
| 11-2 | miRSOD1 | NA | NA | NA | NA | NA | NA | NA | NA |
| 11-3 | 3.3 × 10¹³ | NA | NA | NA | NA | NA | NA | NA | NA |
| 12-1 | VOY101 | NA | NA | NA | NA | NA | NA | NA | NA |
| 12-2 | miRSOD1 | NA | NA | NA | NA | NA | NA | NA | NA |
| 12-3 | 1.2 × 10¹⁴ | NA | NA | NA | NA | NA | NA | NA | NA |
| 13-1 | Vehicle | NA | NA | NA | NA | NA | NA | NA | NA |
| 13-2 | Control | NA | NA | NA | NA | NA | NA | NA | NA |
| 14-1 | VOY101 | NA | NA | NA | NA | NA | NA | NA | NA |
| 14-2 | cFXN-HA | NA | NA | NA | NA | NA | NA | NA | NA |
| 14-3 | 6.7 × 10¹² | NA | NA | NA | NA | NA | NA | NA | NA |
| 15-1 | VOY101 | NA | NA | NA | NA | NA | NA | NA | NA |
| 15-2 | cFXN-HA | NA | NA | NA | NA | NA | NA | NA | NA |
| 15-3 | 4.9 × 10¹³ | NA | NA | NA | NA | NA | NA | NA | NA |
| 16-1 | AAV9 | 12.8 | 16 | 12.1 | 12.3 | 23.5 | 39.5 | 21.9 | 22.5 |
| 16-2 | cFXN-HA | 14.3 | 16.4 | 11.6 | 12.5 | 24.6 | 46.6 | 25.7 | 25.4 |
| 16-3 | 4.9 × 10¹³ | 12.9 | 21.6 | 13.3 | 12.9 | 27.7 | 50.8 | 22.7 | 20.4 |

Legend
PT = Prothrombin time
PTT = Partial thromboplastin time
NA = Not assessed

[0965] At the end of each study time point, several tissue samples were collected for histological processing. Tissues were post-fixed in 400 paraformaldehyde for 12 to 72 hours at 2-8° C. Tissues were embedded in paraffin, sectioned 5 micrometer thick, and stained with hematoxylin and eosin (H&E). Histopathological assessment was performed by light-microscopy by certified pathologists.

[0966] Histopathological evaluation of hematoxylin and eosin stained sections was performed by certified pathologists on selected tissues from a subset of animals as shown in Table 27. In the liver, no pathological findings were observed in the vast majority of NHPs Mild fibrosis was detected in one NHP treated with VOY101-cFXN-HA at 4.9×10¹³ VG/kg. Mild portal hyperplasia was detected in one animal dosed IV with VOY201-cFXN-HA at 2×10¹³ VG/kg.

[0967] In the DRGs, the majority of NHPs did not display histopathological findings. Mononuclear infiltrates with sporadic neuronal necrosis were observed in animals treated with VOY101-cFXN-HA, 4.9×10^{1I} VG/kg (n=1) or VOY201-cFXN-HA, 2×10¹³ VG/kg (n=2). See Table 27.

TABLE 27
Histopathological analysis

| | Capsid Transgene | Histopathology | Histopathology | Histopathology | Histopathology |
|---|---|---|---|---|---|
| Grp | Dose (vg/kg) | DRG-cervical | DRG-thoracic | DRG-lumbar | DRG-sacral |
| 1-1 | VOY201 cFXN-HA | none | none | none | NA |
| 1-2 | 2 × 10¹³ | pronounced | pronounced | pronounced | NA |
| | | mononuclear cell | mononuclear cell | mononuclear cell | |
| | | infiltrates and | infiltrates and | infiltrates and | |
| | | sporadic neuronal | sporadic neuronal | sporadic neuronal | |
| | | necrosis | necrosis | necrosis | |
| 2-1 | AAV9 cFXN-HA | none | none | none | NA |
| 2-1 | 2 × 10¹³ | none | none | none | NA |
| 3-1 | VOY201 cFXN-HA plus miR122 | none | none | none | NA |
| 3-2 | 6.65 × 10¹² | none | none | none | NA |
| 4-1 | VOY101 cFXN-HA | none | none | none | NA |
| 4-2 | 6.65 × 10¹² | NA | NA | NA | NA |
| 5-1 | Vehicle Control | minimal infiltrate | none | minimal infiltrate | minimal infiltrate |
| 5-2 | | none | none | none | none |
| 6-1 | VOY201 cFXN-HA plus miR122 | NA | NA | NA | NA |
| 6-2 | 6.3 × 10¹¹ | NA | NA | NA | NA |
| 7-1 | VOY201 cFXN-HA plus miR122 | moderate | infiltrates | marked infiltrates | moderate |
| | 2 × 10¹³ | infiltrates, minimal | | | infiltrates |
| | | degeneration | | | |
| 7-2 | | none | minimal infiltrates | minimal infiltrate | none |
| 8-1 | VOY201 cFXN-HA plus miR122 | minimal infiltrate | none | minimal infiltrate | none |
| 8-2 | 2 × 10¹² | none | none | none | none |
| 9-1 | VOY201 cFXN-HA plus miR122 | none | none | none | none |
| 9-2 | 2 × 10¹² | none | none | none | none |
| 10-1 | Vehicle Control | NA | NA | NA | NA |
| 10-2 | | NA | NA | NA | NA |
| 11-1 | VOY101 miRSOD1 | none | none | grade 1 infiltrates | NA |
| 11-2 | 3.3 × 10¹³ | none | none | none | NA |
| 11-3 | | none | grade 1 infiltrates | none | NA |
| 12-1 | VOY101 miRSOD1 | grade 1 axonal | none | none | NA |
| | 1.2 × 10¹⁴ | degeneration | | | |
| 12-2 | | grade 1 axonal | none | grade 1 infiltrates | NA |
| | | degeneration and | | | |
| | | infiltrates | | | |
| 12-3 | | none | none | none | NA |
| 13-1 | Vehicle Control | none | none | none | NA |
| 13-2 | | none | none | grade 1 infiltrates | NA |
| 14-1 | VOY101 cFXN-HA | none | grade 1 infiltrates | grade 1 infiltrates | NA |
| 14-2 | 6.7 × 10¹² | none | none | grade 1 infiltrates | NA |
| 14-3 | | none | none | none | NA |
| 15-1 | VOY101 cFXN-HA | grade 2 infiltrates, | grade 1 infiltrates | grade 2 infiltrates, | NA |
| | 4.9 × 10¹³ | grade 1 necrosis | | grade 1 necrosis | |
| 15-2 | | none | none | none | NA |
| 15-3 | | none | none | none | NA |
| 16-1 | AAV9 cFXN-HA | none | none | none | NA |
| 16-2 | 4.9 × 10¹³ | none | none | none | NA |
| 16-3 | | none | none | none | NA |

Legend
NA = not assessed
None = no findings reported

[0968] In the examined CNS regions (cerebral cortex, striatum, hippocampus, thalamus) no significant histopathological findings were detected in NHPs treated with VOY201-cFXN-HA, up to 2×10¹³ VG/kg (n=4). See Table 28.

TABLE 28
Histopathological analysis

| | Capsid | Histopathology | Histopathology | | | |
|---|---|---|---|---|---|---|
| | Transgene | Striatum/ | Cerebral | Histopathology | Histopathology | Histopathology |
| Grp | Dose (vg/kg) | Basal Nuclei | cortex | Hippocampus | Thalamus | Liver |
| 1-1 | VOY201 | NA | NA | NA | NA | None |
| 1-2 | cFXN-HA | NA | NA | NA | NA | None |
| | 2 × 10¹³ | | | | | |
| 2-1 | AAV9 | NA | NA | NA | NA | NA |
| 2-1 | cFXN-HA | NA | NA | NA | NA | NA |
| | 2 × 10¹³ | | | | | |
| 3-1 | VOY201 | NA | NA | NA | NA | None |
| 3-2 | cFXN-HA | NA | NA | NA | NA | NA |
| | plus miR122 | | | | | |
| | 6.65 × 10¹² | | | | | |
| 4-1 | VOY101 | NA | NA | NA | NA | None |
| 4-2 | cFXN-HA | NA | NA | NA | NA | NA |
| | 6.65 × 10¹² | | | | | |
| 5-1 | Vehicle | none | none | none | none | Minimal |
| | Control | | | | | infiltrate |
| 5-2 | | none | none | none | none | Minimal |
| | | | | | | infiltrate |
| 6-1 | VOY201 | NA | NA | NA | NA | NA |
| 6-2 | cFXN-HA | NA | NA | NA | NA | NA |
| | plus miR122 | | | | | |
| | 6.3 × 10¹¹ | | | | | |
| 7-1 | VOY201 | none | none | none | minimal | Mild |
| | cFXN-HA | | | | infiltrates | hyperplasia |
| 7-2 | plus miR122 | none | none | none | none | Minimal |
| | 2 × 10¹³ | | | | | infiltrate |
| 8-1 | VOY201 | none | minimal | none | none | Minimal |
| | cFXN-HA | | infiltrate | | | infiltrate |
| 8-2 | plus miR122 | none | none | none | none | none |
| | 2 × 10¹² | | | | | |
| 9-1 | VOY201 | NA | NA | NA | NA | none |
| 9-2 | cFXN-HA | NA | NA | NA | NA | Mild |
| | plus miR122 | | | | | infiltrates |
| | 2 × 10¹² | | | | | |
| 10-1 | Vehicle | NA | NA | NA | NA | NA |
| 10-2 | Control | NA | NA | NA | NA | NA |
| 11-1 | VOY101 | NA | NA | NA | NA | NA |
| 11-2 | miRSOD1 | NA | NA | NA | NA | NA |
| 11-3 | 3.3 × 10¹³ | NA | NA | NA | NA | NA |
| 12-1 | VOY101 | NA | NA | NA | NA | NA |
| 12-2 | miRSOD1 | NA | NA | NA | NA | NA |
| 12-3 | 1.2 × 10¹⁴ | NA | NA | NA | NA | NA |
| 13-1 | Vehicle | NA | NA | NA | NA | Grade 1 |
| | Control | | | | | infiltrates |
| 13-2 | | NA | NA | NA | NA | NA |
| 14-1 | VOY101 | NA | NA | NA | NA | NA |
| 14-2 | cFXN-HA | NA | NA | NA | NA | NA |
| 14-3 | 6.7 × 10¹² | NA | NA | NA | NA | NA |
| 15-1 | VOY101 | NA | NA | NA | NA | Grade 2 |
| | cFXN-HA | | | | | fibrosis |
| 15-2 | 4.9 × 10¹³ | NA | NA | NA | NA | None |
| 15-3 | | NA | NA | NA | NA | none |
| 16-1 | AAV9 | NA | NA | NA | NA | NA |
| 16-2 | cFXN-HA | NA | NA | NA | NA | NA |
| 16-3 | 4.9 × 10¹³ | NA | NA | NA | NA | NA |

Legend
NA = not assessed
None = no findings reported

[0969] In summary, this Example demonstrates that IV AAV vectors comprising novel capsids VOY101 and VOY201 and encoding different transgenes (cFXN-HA, miR-hSOD1) were well-tolerated in adult NHPs at doses up to 1.2×10¹⁴ VG/kg based on clinical signs, body weight, clinical chemistry and histopathology.

### Example 5. VOY101-FXN for the Treatment of Friedreich's Ataxia

[0970] A. In Vivo Distribution, Expression and Efficacy Study with Intravenous Dosing of VOY101-FXN in a Mouse Model of Friedreich's Ataxia

[0971] Selected viral genomes comprising a nucleic acid encoding human frataxin are designed and packaged into a single stranded VOY101 capsid.

[0972] The viral genome from ITR to ITR, recited 5′ to 3′, comprises a wild type ITR, a promoter (which includes a CMVie enhancer, a CBA, or a CMV, or a frataxin promoter, or a truncated CBA or a truncated CMV promoter, and a human beta globin intron), hFXN cDNA sequence, a human growth hormone polyA sequence, a fragment of human albumin as a stuffer sequence, and wild type ITR. The viral genomes are packaged into VOY101 capsids, purified and formulated in phosphate buffered saline (PBS) with 0.001% F-68.

[0973] Six groups of approximately 10 mice/group, at 7 weeks of age, and balanced for gender and litter, receive vehicle (PBS with 0.001% F-68; two groups), or VOY101-FXN vector at either low (2 groups) or high dose (2 groups) levels (approximately 6.3×10¹² vg/kg-2×10¹³ vg/kg body weight) via intravenous injection.

[0974] To test the efficacy, distribution and expression of VOY101-FXN in mice, any test known in the art may be utilized. Non-limiting examples include limb electromyography, notched bar walking test, string hanging test, rotarod test, body weight, and/or survival. Other readouts include FXN protein and mRNA expression in tissues (e.g. dorsal root ganglia, heart, cerebellum, spinal cord) by ELISA, PCR, immunohistochemistry and in situ hybridization, and in situ assessment of mitochondrial enzyme function in tissue (dorsal root ganglia) sections. Vector genome levels in different tissues are determined by PCR and ISH.

[0975] Three groups of animals (vehicle, low dose, high dose) are euthanized by 18 weeks. Three remaining groups of animals (vehicle, low dose, high dose) are maintained for 6 months or longer to assess effect on survival. Control groups (n=10/group) include wild type mice and disease model mice dosed with a reference vector.

[0976] The distribution and expression of human frataxin (hFXN) and vector genome distribution in target tissues such as, but not limited to, DRGs, cerebellum, spinal cord and heart in animals receiving the hFXN vector, is measured by ELISA, PCR, ISH, IHC for hFXN expression and PCR and ISH for vector genome analysis. Human frataxin analysis (by ELISA, PCR, ISH, IHC) demonstrate that upon the delivery of the hFXN vector, expression in target tissues e.g., DRGs, cerebellum, spinal cord and heart occurs with distribution to target tissues. In situ assessment of mitochondrial enzyme activity shows that upon delivery of the hFXN vector, increased activity in slices of DRG occurs. Electromyography, notched bar, string hanging and rotarod tests demonstrate improved performance over vehicle control animals.

B. In Vivo Distribution and Expression Study with Intravenous Dosing of VOY101-FXN in Non-Human Primates

[0977] Selected viral genomes comprising a nucleic acid sequence encoding human frataxin are designed and packaged in a single stranded (ss) VOY101 capsid.

[0978] The single stranded viral genome from ITR to ITR, recited 5′ to 3′, comprises a wild type ITR, a promoter (which includes a CMVie enhancer, a CBA, or a CMV, or a frataxin promoter, or a truncated CBA or a truncated CMV promoter, and a human beta globin intron), hFXN cDNA sequence, a human growth hormone polyA sequence, a fragment of human albumin as a stuffer sequence, and wild type ITR. The viral genomes are packaged into VOY101 capsids, purified and formulated in phosphate buffered saline (PBS) with 0.001% F-68.

[0979] Eight groups of approximately 3 cynomolgus monkeys/group, approximately 3 years of age or older, with at least one animal of each gender per group, receive vehicle (PBS with 0.001% F-68; two groups), or VOY101-FXN vector at either low (2 groups) or high dose (2 groups) levels (approximately 6.7×10¹² vg/kg-6×10¹³ vg/kg body weight) via intravenous injection.

[0980] To test the efficacy, distribution and expression of VOY101-FXN in NHP, any test known in the art may be utilized. Non-limiting examples include measurement of body weight over time, clinical monitoring, histopathology and blood safety panel testing. Other readouts include FXN protein and mRNA expression in tissues (e.g. dorsal root ganglia, heart, cerebellum, spinal cord) as assessed by ELISA, PCR, immunohistochemistry and in situ hybridization. Vector genome levels in different tissues are determined by PCR and ISH.

[0981] Three groups of animals (vehicle, low dose, high dose) are euthanized by 4 weeks. Three remaining groups of animals (vehicle, low dose, high dose) are maintained for 12 weeks to assess long term gene expression.

[0982] The distribution and expression of human frataxin (hFXN) and vector genome distribution in target tissues such as, but not limited to, DRGs, cerebellum, spinal cord and heart in animals receiving the hFXN vector, is measured by ELISA, PCR, ISH, IHC for hFXN expression and PCR and ISH for vector genome analysis. The primate frataxin expression data are compared to the frataxin expression level which resulted in rescue of the FA disease phenotype in a genetic mouse model of Friedreich's Ataxia. Based on this, efficacious doses for human trials are calculated.

### Example 6. VOY101-APOE miRNA for the Treatment of Alzheimer's Disease

[0983] A. In Vivo Distribution, Expression, and Efficacy Study of Intravenous Dosing of scVOY101-APOE miRNA in Mouse Model of Alzheimer's Disease

[0984] Selected viral genomes comprising pri-miRNA cassettes containing guide strands targeting APOE and passenger strands are engineered into self-complementary (sc) VOY101-miRNA expression vectors.

[0985] The scAAV-miRNA viral genome from ITR to ITR, recited 5′ to 3′, comprises a wild type ITR, a promoter, the pri-miRNA cassette containing guide sequence targeting ApoE and passenger sequence, a polyA sequence, a stuffer sequence, and wild type ITR.

[0986] The viral genomes are packaged into VOY101 capsids, purified and formulated in phosphate buffered saline (PBS) with 0.001% F-68.

[0987] Three groups of P301S mutant tau mice, approximately 20 mice/group, at 2 months of age, are administered vehicle (PBS with 0.001% F-68), or VOY101-APOE miRNA at either high or low dose levels (approximately 4×10¹² vg/kg-4×10¹³ vg/kg) via intravenous tail vein injection.

[0988] Any test known in the art may be utilized to test the efficacy, distribution and expression of VOY101-APOE in mice. Non-limiting examples include the measurement of body weight, expression of APOE mRNA as measured by qRT-PCR, expression of APOE protein as assessed by immunohistochemistry and enzyme-linked immunosorbent assay, levels of amyloid-beta pathology as assessed by immunohistochemistry and enzyme-linked immunosorbent assay, levels of neurodegeneration as assessed by immunohistochemistry, and vector genome levels as measured by digital droplet PCR.

[0989] All animals are evaluated for body weight and survival. Animals are euthanized at approximately 11 months of age for evaluation of brain, spinal cord, and liver samples for APOE mRNA expression, tau and/or amyloid pathology, and neurodegeneration.

[0990] PCR data will demonstrate the delivery of vector genome throughout the brain in animals receiving intravenous VOY101-APOE miRNA vector. Expression data should indicate widespread reduction of APOE protein and mRNA throughout the brain in animals receiving vector. Brain regions demonstrating significant APOE reduction should be those important for tauopathy related disease, including the entorhinal cortex, hippocampus, and cortex. Groups receiving the vector would likely show strong reductions in pathological amyloid-beta and neurodegeneration.

B. In Vivo Distribution and Expression Study of APOE in Non-Human Primates Following Intravenous Dosing of scVOY101-APOE miRNA

[0991] Selected viral genomes comprising pri-miRNA cassettes containing guide strands targeting APOE and passenger strands are engineered into self-complementary (sc) VOY101-miRNA expression vectors.

[0992] The scAAV-miRNA viral genome from ITR to ITR, recited 5′ to 3′, comprises a wild type ITR, a promoter, the pri-miRNA cassette containing guide sequence targeting ApoE and passenger sequence, a polyA sequence, a stuffer sequence, and wild type ITR.

[0993] The viral genomes are packaged in into VOY101 capsid, purified and formulated in phosphate buffered saline (PBS) with 0.001% F-68.

[0994] Non-human primates (NHPs) (Cynomolgus macaques, adult male, prescreened for AAV neutralizing antibodies) in three groups are administered scVOY101-ApoE miRNA vector with one group a vehicle only control. The NHPs are administered either high or low dose levels (approximately 4×10¹² vg/kg-4×10¹³ vg/kg) using intravenous delivery. 4 weeks post-administration, a saline perfusion is performed and the brain sectioned into 3 mm coronal blocks and snap-frozen.

[0995] To test the efficacy, distribution and expression of VOY101-APOE miRNA in NHP, any test known in the art may be utilized. Non-limiting examples include measurement of expression of APOE mRNA by qRT-PCR, expression of tau protein as assessed by immunohistochemistry and enzyme-linked immunosorbent assay, and vector genome levels as assessed by digital droplet PCR.

[0996] Brain regions demonstrating significant APOE reduction would be expected to cover areas important for tauopathy related disease, including the entorhinal cortex, hippocampus, and cortex. Consistent with the expression data, PCR would likely demonstrate widespread distribution of vector genome through the brain.

### Example 7. VOY101-APOE2 for the Treatment of Alzheimer Disease and Other Tauopathies

[0997] A. In Vivo Distribution, Expression, and Efficacy Study of Intravenous Dosing of VOY101-APOE2 in Mouse Model of Alzheimer's Disease and other Tauopathies

[0998] A nucleic acid encoding human APOE2 (apolipoprotein E2 allele) is engineered into an AAV viral genome and packaged in the VOY101 capsid.

[0999] The AAV-APOE2 viral genome, recited 5′ to 3′ from ITR to ITR, comprises a wild type ITR, a promoter, the nucleic acid encoding human APOE2, a polyA sequence, and wild type ITR. The viral genomes are packaged into VOY101 capsids, purified and formulated. The VOY101-APOE2 particles are formulated in phosphate buffered saline (PBS) with 0.001% F-68.

[1000] Three groups of APP.PS1-21/TRE4 mice, approximately 20 mice/group, at 9 months of age, are administered vehicle (PBS with 0.001% F-68), or VOY101-APOE2 at either high or low dose levels (approximately 4×10¹² vg/kg-4×10¹³ vg/kg) via intravenous tail vein injection.

[1001] To test the efficacy, distribution and expression of VOY101-APOE2 in mice, any test known in the art may be utilized. Non-limiting examples include measurements of body weight, expression of APOE2 as assessed by immunohistochemistry and enzyme-linked immunosorbent assay, levels of amyloid-beta pathology as assessed by immunohistochemistry and enzyme-linked immunosorbent assay, levels of neurodegeneration as assessed by immunohistochemistry, and vector genome levels as measured by digital droplet PCR.

[1002] All animals are evaluated for body weight and survival. Animals are euthanized at approximately 11 months of age for evaluation of brain, spinal cord, and liver samples APOE2 expression, amyloid and/or tau pathology, and neurodegeneration.

[1003] Distribution of the vector genome through the brain in animals receiving intravenous VOY101-APOE2 is analyzed by PCR. Expression data will likely show widespread expression of APOE2 throughout the brain in animals receiving VOY101-APOE2 vector. Brain regions demonstrating significant APOE2 expression would likely cover areas important for tauopathy related disease, including the entorhinal cortex, hippocampus, and cortex. Groups receiving VOY101-APOE2 vector should show strong reductions in pathological amyloid-beta and/or tau and neurodegeneration.

### B. In Vivo Distribution and Expression Study of Intravenous Dosing of VOY101-APOE2 in Non-Human Primates

[1004] A nucleic acid sequence encoding human APOE2 (apolipoprotein E 2 allele) is engineered into an AAV viral genome and packaged in the VOY101 capsid.

[1005] The AAV-APOE2 viral genome, recited 5′ to 3′ from ITR to ITR, comprises a wild type ITR, a promoter, the nucleic acid encoding human APOE2, a polyA sequence, and wild type ITR. The viral genomes are packaged into VOY101 capsids, purified and formulated. The VOY101-APOE2 particles are formulated in phosphate buffered saline (PBS) with 0.001% F-68.

[1006] Non-human primates (NHPs) (Cynomolgus macaques, adult male, prescreened for AAV neutralizing antibodies) in three groups are administered, by intravenous injection, the VOY101-APOE2 vector with one group a vehicle only control (PBS with 0.001% F-68). The NHPs are administered either high or low dose levels (approximately 4×10¹² vg/kg-4×10¹³ vg/kg) using intravenous delivery. 4 weeks post-administration, a saline perfusion is performed and the brain sectioned into 3 mm coronal blocks and snap-frozen.

[1007] Any test known in the art may be utilized to test the efficacy, distribution and expression of VOY101-APOE2 in NHP. Non-limiting examples include measurement of expression of APOE2 as assessed by immunohistochemistry and enzyme-linked immunosorbent assay and vector genome levels as assessed by digital droplet PCR.

[1008] Expression data will likely show widespread expression of APOE2 throughout the brain in animals receiving VOY101-APOE2 vector. Brain regions demonstrating significant APOE2 levels would likely cover areas important for tauopathy related disease, including the entorhinal cortex, hippocampus, and cortex. Consistent with the expression data, PCR would likely demonstrate widespread distribution of vector genome through the brain.

### Example 8. VOY101-HTT miRNA for the Treatment of Huntington's Disease

### A. In Vivo Efficacy Study of VOY101-miRNA in Mouse Model of Huntington's Disease

[1009] Selected pri-miRNA cassettes containing guide strands targeting HTT and passenger strands are engineered into scAAV-miRNA viral genomes and packaged into VOY101 capsid.

[1010] The viral genome from ITR to ITR, recited 5′ to 3′, comprises a wild type ITR, a CBA promoter (which includes a CMVie enhancer, a CBA promoter and an SV40 intron), the pri-miRNA cassette containing guide sequence targeting HTT and passenger sequence, a rabbit globin polyA sequence, a fragment of human alpha-1 antitrypsin as a stuffer sequence, and wild type ITR. The viral genomes are packaged into VOY101 capsids, purified and formulated. The VOY101-HTT miRNA particles are formulated in phosphate buffered saline (PBS) with 0.001% F-68.

[1011] Bilateral intrastriatal dosing will be used. Three groups of approximately 12 mice/group, approximately 2 months of age and balanced for sex, will receive vehicle (PBS and 0.001% F-68), or VOY101-HTT miRNA vector at either high or low dose levels (approximately 3×10⁹ vg-5×10¹⁰ vg per striatum).

[1012] To test the efficacy of VOY101-HTT miRNA in mice, any test known in the art may be utilized. Non-limiting examples include measurement of body weight, rotarod, Porsolt swim test, as well as measurement of HTT protein aggregates as assessed by immunohistochemistry.

[1013] All animals will be evaluated for body weight, rotarod, Porsolt swim test and survival. Some animals will be euthanized at 5 months of age (3 months after dosing) for evaluation of striatum tissue samples for HTT mRNA suppression (by RT-qPCR) and HTT protein level by western blot or MSD assay, whereas others will be euthanized at approximately 8 months of age (6 months after dosing) for evaluation of aggregates (by immunohistochemistry).

[1014] HTT measurement data should show widespread reduction of human HTT protein and mRNA throughout the brain in animals receiving HTT miRNA vectors including in primary target areas (striatum and cortex). Groups receiving HTT miRNA vectors would also show reductions in pathological HTT aggregates, and demonstrate significant improvements in lifespan and motor activities.

B. In Vivo Pharmacology and Distribution Study in Non-Human Primates Following Intravenous Dosing of scVOY101-HTT miRNA

[1015] Selected pri-miRNA cassettes containing guide strands targeting HTT and passenger strands are engineered into scAAV-miRNA viral genomes and packaged into VOY101 capsid.

[1016] The scAAV-miRNA viral genome from ITR to ITR, recited 5′ to 3′, comprises a wild type ITR, a promoter, the pri-miRNA cassette containing guide sequence targeting HTT and passenger sequence, a polyA sequence, a stuffer sequence, and wild type ITR. The viral genomes are packaged into VOY101 capsids, purified and formulated. The VOY101-HTT miRNA particles are formulated in phosphate buffered saline (PBS) with 0.001% F-68.

[1017] Non-human primates (NHPs) (rhesus macaque, adult male, prescreened for AAV neutralizing antibodies) in three groups are administered scVOY101-HTT miRNA vector. The NHPs are administered either high, middle or low dose levels (approximately 5×10² vg/kg, 1.5×10¹³ vg/kg and 4.5×10¹³ vg/kg) using intravenous or intracarotid arterial delivery. 4 weeks post-administration, a saline perfusion is performed and part of spinal cord, brain sections and selected peripheral tissues will be harvested. A subset of tissue will be snap-frozen in liquid nitrogen and a subset will be post-fixed in 4% PFA.

[1018] To test the efficacy of VOY101-HTT miRNA in NHP, any test known in the art may be utilized. Non-limiting examples include measurement of expression of HTT mRNA as measured by bDNA assay and/or qRT-PCR, expression of HTT protein as assessed by western blot and by immunohistochemistry, and vector genome levels as assessed by digital droplet PCR. In addition, clinical observation, serum and CSF clinical pathology, CSF biomarkers and histopathology of CNS and peripheral tissues will be analyzed.

### Example 9. VOY101-SOD1 miRNA for Treatment of Amyotrophic Lateral Sclerosis

[1019] A. In Vivo pharmacology Study of VOY101-SOD1 miRNA in a Mouse Model of ALS

[1020] Selected pri-miRNA cassettes containing guide strands targeting SOD1 and passenger strands are engineered into scAAV-miRNA viral genomes and packaged into a VOY101 capsid.

[1021] The viral genome from ITR to ITR, recited 5′ to 3′, comprises a wild type ITR, a H1 promoter, the pri-miRNA cassette containing guide sequence targeting SOD1 and passenger sequence, a rabbit globin polyA sequence, and wild type ITR. The viral genomes are packaged into VOY101 capsids, purified, and formulated. The VOY101-SOD1 miRNA particles are formulated in phosphate buffered saline (PBS) with 0.001% F-68.

[1022] Three groups of approximately 10 mice/group, approximately 40-50 days of age and balanced for sex, age and littermates, will receive vehicle (PBS with 0.001% F-68), or VOY101-SOD1 miRNA vector at either high or low dose levels (approximately 5×10¹¹ vg/mouse or 2×10¹² vg/mouse). All the animals will be dosed intravenously. All the animals will be euthanized at approximately 4 weeks after intravenous administration.

[1023] Analytical methods known in the art may be used to assess pharmacological profile, primary readouts will include hSOD1 mRNA and protein expression and vector genome biodistribution in multiple CNS regions and selected peripheral tissues. Secondary readouts will include body weights, immunohistochemistry and cage side observations.

B. In Vivo Efficacy Study of VOY101-SOD1 miRNA in a Mouse Model of ALS

[1024] Selected pri-miRNA cassettes containing guide strands targeting SOD1 and passenger strands are engineered into scAAV-miRNA viral genomes and packaged into a VOY101 capsid.

[1025] The scAAV-miRNA viral genome from ITR to ITR, recited 5′ to 3′, comprises a wild type ITR, a H1 promoter, the pri-miRNA cassette containing guide sequence targeting SOD1 and passenger sequence, a rabbit globin polyA, and wild type ITR. The viral genomes are packaged into VOY101 capsids, purified and formulated. The VOY101-SOD1 miRNA particles are formulated in phosphate buffered saline (PBS) with 0.001% F-68

[1026] Three groups of approximately 36 mice/group, approximately 40-50 days of age and balanced for sex, age and littermates, will receive vehicle, or the vector at either high or low dose levels (approximately 5×10¹¹ vg/mouse or 2×10¹² vg/mouse). All the animals will be dosed intravenously.

[1027] To assess efficacy of VOY101-SOD1 miRNA in mice, analytical methods known in the art may be used to obtain primary readouts will include body weight, behavioral NeuroScore, survival and disease onset and duration. Neurological score will be measured daily. Animals will be euthanized when the NeuroScore for that animal reaches 4. Secondary readouts include hSOD1 mRNA/protein expression, vector genome biodistribution and IHC (skeletal muscle and NMJ imaging, spinal cord).

[1028] The data demonstrate that upon delivery of the intravenous VOY101-SOD1 miRNA vector to the motor neurons, brainstem and motor cortex widespread reduction of SOD1 protein and mRNA occurs.

C. In Vivo Efficacy Study of VOY101-SOD1 miRNA in Canine Degenerative Myelopathy as a Disease Model for ALS

[1029] Selected pri-miRNA cassettes containing guide strands targeting SOD1 and passenger strands are engineered into scAAV-miRNA viral genomes designed and packaged in a VOY101 capsid.

[1030] The scAAV-miRNA viral genome from ITR to ITR, recited 5′ to 3′, comprises a wild type ITR, a H1 promoter, the pri-miRNA cassette containing guide sequence targeting SOD1 and passenger sequence, a rabbit globin polyA sequence, a stuffer sequence, and wild type ITR. The viral genomes are packaged into VOY101 capsids, purified, and formulated. The VOY101-SOD1 miRNA particles are formulated in phosphate buffered saline (PBS) with 0.001% F-68.

[1031] Companion DM dogs will be screened for pre-existing immunity to the VOY101 capsid by evaluating serum samples in an in vitro neutralizing antibody assay. Dogs with negative nAb will be candidates for the study. Dogs will be divided into two treatment groups and administered either VOY101-SOD1 miRNA or vehicle (PBS with 0.001% F-68) using intravenous dosing.

[1032] To assess efficacy of VOY101-SOD1 miRNA in dog, any test known in the art may be utilized. Non-limiting examples include longitudinal monitoring of gait and neurologic outcome, DTI and MRS, electrodiagnostic testing, MUNE and electrical Impedance Myography (EIM) at the specified time points.

[1033] Serum and CSF samples will be collected at designated times and at the time of euthanasia for evaluating pNF-H and NFL level in dogs. At the time of euthanasia, CNS and peripheral tissues will be collected for SOD1 mRNA quantification and vector genome biodistribution analysis.

[1034] The data demonstrate that upon delivery of the intravenous VOY101-SOD1 miRNA vector to the motor neurons, brainstem and motor cortex reduction of SOD1 protein and mRNA occurs.

D. In Vivo pharmacology and Distribution Study in Non-Human Primates following Intravenous Dosing of scVOY101-SOD1 miRNA

[1035] Selected pri-miRNA cassettes containing guide strands targeting SOD1 and passenger strands are engineered into scAAV-miRNA viral genomes and packaged into a VOY101 capsid.

[1036] The scAAV-miRNA viral genomes from ITR to ITR, recited 5′ to 3′, comprise a wild type ITR, a promoter, the pri-miRNA cassette containing guide sequence targeting SOD1 and passenger sequence, a polyA sequence, a stuffer sequence, and wild type ITR. The viral genomes are packaged into VOY101 capsids, purified, and formulated. The VOY101-SOD1 miRNA particles are formulated in phosphate buffered saline (PBS) with 0.001% F-68.

[1037] Non-human primates (NHPs) (Cynomolgus macaques, adult male, prescreened for AAV neutralizing antibodies) in three groups are administered sc VOY101-SOD1 miRNA vector. The NHPs are administered either high, middle or low dose levels (approximately 5×10¹² vg/kg, 1.5×10¹³ vg/kg and 4.5×10¹³ vg/kg) using intravenous delivery. 4 weeks post-administration, a saline perfusion is performed and part of spinal cord, brain sections and selected peripheral tissues will be harvested. A subset of the collected tissues will be snap-frozen in liquid nitrogen and another subset will be post-fixed in 4% PFA.

[1038] To determine efficacy and distribution in NHP, any test known in the art may be utilized. Non-limiting examples include measurement of expression of SOD1 mRNA by qRT-PCR, expression of SOD1 protein as assessed by WB and by immunohistochemistry, and vector genome levels as assessed by digital droplet PCR. In addition, clinical observation, serum and CSF clinical pathology, CSF biomarkers and histopathology of CNS and peripheral tissues will be analyzed.

[1039] The data demonstrate that upon intravenous delivery of the VOY101-SOD1 miRNA vector to the spinal cord motor neurons, brainstem and motor cortex, reduction of SOD1 protein and mRNA occurs.

### Example 10. Anti-Tau Antibody Delivery for the Treatment of Alzheimer's Disease and Other Tauopathies

### A. In Vivo Distribution, Expression and Efficacy Study of Intravenous Dosing of VOY101-Anti-Tau Antibody in a Mouse Model of Alzheimer's Disease and Other Tauopathies

[1040] A nucleic acid encoding a monoclonal antibody targeting tau is engineered into an AAV viral genome and produced in the VOY101 capsid.

[1041] The viral genome, recited 5′ to 3′ from ITR to ITR, comprises a wild type ITR, a promoter, the nucleic acid encoding a monoclonal antibody targeting tau, a polyA sequence, and wild type ITR. The viral genomes are packaged into VOY101 capsids, purified and formulated. The VOY101-anti Tau antibody particles are formulated in phosphate buffered saline (PBS) with 0.001% F-68.

[1042] Three groups of P301S mice, approximately 20 mice/group, at 2 months of age, are administered vehicle (PBS with 0.001% F-68), or VOY101-anti Tau antibody vector at either high or low dose levels (approximately 4×10¹² vg/kg-4×10¹³ vg/kg) via intravenous tail vein injection.

[1043] To test the efficacy, distribution and expression of VOY101-anti Tau antibody in mice, any test known in the art may be utilized. Non-limiting examples include measurement of body weight, rotarod, expression of anti-Tau antibody as assessed by immunohistochemistry and enzyme-linked immunosorbent assay, levels of pathogenic tau as assessed by immunohistochemistry and enzyme-linked immunosorbent assay, levels of neurodegeneration as assessed by immunohistochemistry, and vector genome levels as measured by digital droplet PCR. All animals are evaluated for body weight and survival. Animals are euthanized at approximately 5 months of age for evaluation of brain, spinal cord, and liver samples for antibody expression, tau pathology, and neurodegeneration.

[1044] In the case that VOY101-anti Tau antibody delivery for the treatment of Alzheimer Disease and tauopathy is successful, one might anticipate PCR data to demonstrate delivery of vector genome throughout the brain in animals receiving intravenous VOY101-anti-Tau antibody vector. Expression data will also likely show widespread expression of anti-Tau antibody throughout the brain in animals receiving vector, at levels equal to or exceeding that following passive immunization. Brain regions expected to demonstrate significant antibody levels include areas important for tauopathy related disease, including the entorhinal cortex, hippocampus, and cortex. Groups receiving VOY101-anti Tau antibody vector are expected to show strong reductions in pathological tau and neurodegeneration, and demonstrate significant improvements in lifespan and rotarod performance.

### B. In Vivo Distribution and Expression Study of Intravenous Dosing of VOY101-Anti-Tau Antibody in Non-Human Primates

[1045] A nucleic acid encoding a monoclonal antibody targeting tau is engineered into an AAV viral genome and produced in the VOY101 capsid.

[1046] The viral genome, recited 5′ to 3′ from ITR to ITR, comprises a wild type ITR, a promoter, the nucleic acid encoding a monoclonal antibody targeting tau, a polyA sequence, and wild type ITR. The viral genomes are packaged into VOY101 capsids, purified and formulated. The VOY101-anti Tau particles are formulated in phosphate buffered saline (PBS) with 0.001% F-68.

[1047] Non-human primates (NHPs) (Cynomolgus macaques, adult male, prescreened for AAV neutralizing antibodies) in three groups are administered the VOY101-anti-Tau vector with one group a vehicle only control (PBS with 0.001% F-68). The NHPs are administered either high or low dose levels (approximately 4×10¹² vg/kg-4×10¹³ vg/kg) using intravenous delivery. 4 weeks post-administration, a saline perfusion is performed and the brain sectioned into 3 mm coronal blocks and snap-frozen.

[1048] To test the efficacy, distribution and expression of VOY101-anti Tau antibody in NHP, any test known in the art may be utilized. Non-limiting examples include measurement of expression of anti-Tau antibody as assessed by immunohistochemistry and enzyme-linked immunosorbent assay and vector genome levels as assessed by digital droplet PCR.

[1049] One might anticipate expression data to show that anti-Tau antibody is expressed widely in the NHP brain at levels exceeding that following passive immunization. Brain regions expected to demonstrate significant antibody levels include areas important for tauopathy related disease, including the entorhinal cortex, hippocampus, and cortex. Consistent with the expression data, PCR would likely demonstrate widespread distribution of vector genome through the brain.

### Example 11. VOY101-Tau miRNA for Treatment of Tauopathy

[1050] A. In Vivo Distribution, Expression, and Efficacy Study of Intravenous Dosing of scVOY101-Tau miRNA in a Mouse Model of Tauopathy

[1051] Selected pri-miRNA cassettes containing guide strands targeting Tau and passenger strands are engineered into scAAV-miRNA viral genomes and packaged into a VOY101 capsid.

[1052] The scAAV-miRNA viral genome from ITR to ITR, recited 5′ to 3′, comprises a wild type ITR, a promoter, the pri-miRNA cassette containing guide sequence targeting Tau and passenger sequence, a polyA sequence, a stuffer sequence, and wild type ITR. The viral genomes are packaged into VOY101 capsids, purified and formulated. The VOY101-Tau miRNA particles are formulated in phosphate buffered saline (PBS) with 0.001% F-68.

[1053] Three groups of P301S mice, approximately 20 mice/group, at 2 months of age, are administered vehicle (PBS with 0.001% F-68), or VOY101-Tau miRNA vector at either high or low dose levels (approximately 4×10¹² vg/kg-4×10¹³ vg/kg) via intravenous tail vein injection.

[1054] To test the efficacy, distribution and expression of VOY101-Tau miRNA in mice, any test known in the art may be utilized. Non-limiting examples include measurement of body weight, rotarod, expression of tau mRNA as measured by qRT-PCR, expression of total human tau as assessed by immunohistochemistry and enzyme-linked immunosorbent assay, levels of pathogenic tau as assessed by immunohistochemistry and enzyme-linked immunosorbent assay, levels of neurodegeneration as assessed by immunohistochemistry, and vector genome levels as measured by digital droplet PCR.

[1055] All animals are evaluated for body weight and survival. Animals are euthanized at approximately 5 months of age for evaluation of brain, spinal cord, and liver samples for Tau mRNA expression, tau pathology, and neurodegeneration.

[1056] In the case that VOY101-Tau miRNA delivery for the treatment of tauopathy is successful, one might anticipate PCR data to demonstrate delivery of vector genome throughout the brain in animals receiving intravenous VOY101-Tau miRNA vector. Expression data would also be expected to show widespread reduction of human tau protein and mRNA throughout the brain in animals receiving VOY101-Tau miRNA vector. Brain regions likely to demonstrate significant tau reduction include areas important for tauopathy related disease, including the entorhinal cortex, hippocampus, and cortex. Groups receiving VOY101-Tau miRNA vector would likely show strong reductions in pathological tau and neurodegeneration, and demonstrate significant improvements in lifespan and rotarod performance.

B. In Vivo Distribution and Expression Study of Tau in Non-Human Primates Following Intravenous Dosing of scVOY101-Tau miRNA

[1057] Selected pri-miRNA cassettes containing guide strands targeting Tau and passenger strands are engineered into scAAV-miRNA viral genomes and packaged into a VOY101 capsid.

[1058] The viral genome from ITR to ITR, recited 5′ to 3′, comprises a wild type ITR, a promoter, the pri-miRNA cassette containing guide sequence targeting Tau and passenger sequence, a polyA sequence, a stuffer sequence, and wild type ITR. The viral genomes are packaged into VOY101 capsids, purified and formulated. The VOY101-Tau miRNA particles are formulated in phosphate buffered saline (PBS) with 0.001% F-68.

[1059] Non-human primates (NHPs) (Cynomolgus macaques, adult male, prescreened for AAV neutralizing antibodies) in three groups are administered the scVOY101-Tau miRNA with one group a vehicle only control (PBS with 0.001% F-68). The NHPs are administered either high or low dose levels of VOY101-Tau miRNA (approximately 4×10¹² vg/kg-4×10¹³ vg/kg) using intravenous delivery. 4 weeks post-administration, a saline perfusion is performed and the brain sectioned into 3 mm coronal blocks and snap-frozen.

[1060] To test the distribution and expression of VOY101-Tau miRNA in NHP, any test known in the art may be utilized. Non-limiting examples include measurement of expression of tau mRNA by qRT-PCR, expression of tau protein as assessed by immunohistochemistry and enzyme-linked immunosorbent assay, and vector genome levels as assessed by digital droplet PCR.

[1061] One might expect expression data to show that tau protein and mRNA is reduced widely in the brain. Brain regions likely to demonstrate significant tau reduction include areas important for tauopathy related disease, including the entorhinal cortex, hippocampus, and cortex. Consistent with the expression data, PCR would likely demonstrate widespread distribution of vector genome through the brain.

### Example 12. Anti-Tau Antibody Delivery for the Treatment of Alzheimer's Disease and Other Tauopathies

### A. In Vivo Distribution, Expression and Efficacy Study of Intravenous Dosing of VOY101 or VOY201-Anti-Tau Antibody

[1062] A nucleic acid encoding the monoclonal antibody PHF-1 targeting tau was engineered into an AAV viral genome and produced in the VOY101 capsid (capsid sequence provided as SEQ ID NO: 1809) or VOY201 capsid (capsid sequence provided as SEQ ID NO: 1810).

[1063] The viral genome, recited 5′ to 3′ from ITR to ITR, comprised a wild type ITR, a promoter, the nucleic acid encoding the monoclonal antibody PHF-1 targeting tau (Kozak, heavy chain, linker region, light chain and stop codon provided as SEQ ID NO: 1816), a polyA sequence, and wild type ITR. The viral genomes were packaged into VOY101 or VOY201 capsids, purified and formulated. The VOY101 or VOY201-anti Tau antibody particles were formulated in phosphate buffered saline (PBS) with 0.001% F-68.

[1064] Three groups of wild type (WT) mice, approximately 5 mice/group, at 2 months of age, were administered vehicle (PBS with 0.001% F-68), VOY101-anti Tau antibody vector at 1.4×10¹³ vg/kg, or VOY201-anti Tau antibody vector at 1.4×10¹³ vg/kg via intravenous tail vein injection.

[1065] Approximately 28 days following AAV particle administration, several tissue samples were collected. Vector genome digital PCR quantification was performed using a probe set against the CMV enhancer region of the CBA promoter, normalized to host TFRC, and expressed in vector genome per cell (VG/Cell). Vector genome distribution is shown in Table 29 for VOY101.PHF-1 and VOY201.PHF-1. In Table 29, Hp is the hippocampus, SC-C is the cervical spinal cord, SC-T is the thoracic spinal cord, and SC-L is the lumbar spinal cord.

TABLE 29
Vector Genome Distribution in WT Mice after Intravenous Injection

| Vector | VG/Cell Distribution (Standard Dev. in Parenthesis) | | | | |
|---|---|---|---|---|---|
| (Dose: 1.4 × 10¹³ VG/kg) | Hp | SC-C | SC-T | SC-L | Brainstem |
| Vehicle | 0.06 (0.54) | 0.01 (0.13) | 0.01 (0.14) | 0.003 (0.002) | 0.02 (0.19) |
| VOY101.PHF-1 | 11.01 (6.22) | 15.45 (8.20) | 17.82(9.67) | 18.59 (9.49) | 29.80 (14.68) |
| VOY201.PHF-1 | 4.68 (1.48) | 9.30 (2.42) | 7.42 (2.6) | 9.52 (2.2) | 16.16(4.76) |

[1066] The expression levels of PHF1, present in the soluble fraction of tissue lysates, were also measured in collected tissues by detecting the interaction with paired helical filamentous tau coated on an ELISA plate. The antibody-antigen complex was visualized and quantified using HRP labeled anti-mouse IgG and its substrate TMB, followed by reading at OD450 on a plate reader and normalized to input tissue protein quantity. PHF1 expression from AAV transduced cells is shown in Table 30 for VOY101.PHF1 and VOY201.PHF1. In Table 30, Hp is the hippocampus and SC spinal cord.

TABLE 30
PHF-1 Expression Distribution in WT Mice after Intravenous Injection

| Vector | PHF1 Expression (ng/mg protein, Standard Dev. in Parenthesis) | | | |
|---|---|---|---|---|
| (Dose: 1.4 × 10¹³ VG/kg) | Hp | Cortex | SC | Brainstem |
| Vehicle | 0 (0) | 0 (0) | 0 (0) | 0 (0) |
| VOY101.PHF-1 | 82 (36.4) | 94 (35.6) | 718 (440.8) | 394.0 (301.3) |
| VOY201.PHF-1 | 96 (35.1) | 66 (19.6) | 361 (147.4) | 207.0 (116.3) |

[1067] IV dosing of PHF-1 in VOY201 resulted in up to 15-fold higher anti-tau antibody levels in mouse CNS as compared to passive immunization. The passive immunization level of antibody in brain is 20-40 ng/mg of protein, and VOY201 provided 2-5× fold above passive in the hippocampus, 5-10× fold above passive in the brain stem, and 8-16× fold above passive in the spinal cord. IV dosing of VOY101 and VOY201 resulted in widespread CNS biodistribution and transduction of vectorized antibodies.

[1068] Mouse brains were hemisected and tissue samples allocated for antibody immunohistochemistry were post-fixed in 4% paraformaldehyde overnight. PHIF-1 antibody was detected by immunohistochemistry using anti-mouse IgG1 antibody (PIF-1 is a mouse IgG1 antibody). In animals dosed with 1.4×10¹³ vg/kg via intravenous tail vein injection of VOY101.PHF1 or VOY201.PHF1, staining was observed throughout the brain, including in the hippocampus, cortex, striatum, and thalamus. Numerous PHF1+ cells were observed, including those with neuronal and astroglial morphology. Vehicle-treated control exhibited essentially no detectable background staining

[1069] PHIF-1 expression within the CNS after administration of 1.4×10¹³ vg/kg via intravenous tail vein injection of VOY101.PHF-1 or VOY201.PHF1 was evaluated by mouse anti-IgG1 and anti-NeuN double labeling immunofluorescent staining. PHF1 is a mouse IgG1 antibody, and is therefore detected by anti-IgG1 antibody staining. Colocalization studies showed multiple PHF1+ cells including those double-labeled with the neuronal marker (NeuN).

[1070] PHIF-1 expression within the CNS after administration of 1.4×10¹³ vg/kg via intravenous tail vein injection of VOY101.PHF-1 was evaluated by mouse anti-IgG1 and anti-GFAP (glial fibrillary acidic protein) double labeling immunofluorescent staining. PHF1 is a mouse IgG1 antibody, and is therefore detected by anti-IgG1 antibody staining. Colocalization studies showed multiple PHF-1+ cells including those double-labeled with the astrocytic marker (GFAP).

### B. In Vivo Distribution, Expression and Efficacy Study of Intravenous Dosing of VOY101 or VOY201-Anti-Tau Antibody in a Mouse Model

[1071] Three groups of P301S mice, approximately 20 mice/group, at 2 months of age, were administered vehicle (PBS with 0.001% F-68), VOY101-anti Tau antibody vector (VOY101.PHF-1) at 1.4×10¹³ vg/kg, or VOY201-anti Tau antibody vector (VOY201.PHF-1) at 5.0×10¹³ vg/kg via intravenous tail vein injection.

[1072] Approximately 3 months following AAV particle administration, several tissue samples were collected. Vector genome digital PCR quantification was performed using a probe set against the CMV enhancer region of the CBA promoter, normalized to host TFRC, and expressed in vector genome per cell (VG/Cell). Vector genome distribution is shown in Table 31 for VOY101.PHF-1 and VOY201.PHF-1. In Table 301 Hp is the hippocampus and SC is the spinal cord.

TABLE 31
Vector Genome Distribution in P301S Mice after Intravenous Injection

| | VG/Cell Distribution (Standard Dev. in Parenthesis) | | | | |
|---|---|---|---|---|---|
| Vector | Hp | Cortex | Thalamus | SC | Brainstem |
| Vehicle | 0.09 (0.17) | 0.06 (0.07) | 0.03 (0.04) | 0.07 (0.11) | 0.06 (0.06) |
| VOY101.PHF-1 | 26.17 (10.01) | 32.13 (11.8) | 55.16 (20.75) | 49.82 (29.57) | 59.9 (24.85) |
| (Dose: 1.4 × 10¹³ | | | | | |
| VG/kg) | | | | | |
| VOY201.PHF-1 | 16.2 (8.28) | 22.29 (11.1) | 30.92 (17.9) | 27.46 (20.51) | 45.86 (30.53) |
| (Dose: 5.0 × 10¹³ | | | | | |
| VG/kg) | | | | | |

[1073] The expression levels of PHF1, present in the soluble fraction of tissue lysates, were also measured in collected tissues by detecting the interaction with paired helical filamentous tau coated on an ELISA plate. The antibody-antigen complex was visualized and quantified using HRP labeled anti-mouse IgG and its substrate TMB, followed by reading at OD450 on a plate reader and normalized to input tissue protein quantity. PHF-1 expression from AAV transduced cells is shown in Table 32 for VOY101.PHF-1 and VOY201.PHF-1. In Table 32, Hp is the hippocampus and SC spinal cord.

TABLE 32
PHF1 Expression in P301S Mice after Intravenous Injection

| | PHF1 Expression (ng/mg protein, Standard Dev. in Parenthesis) | | | | |
|---|---|---|---|---|---|
| Vector | Hp | Cortex | Thalamus | SC | Brainstem |
| Vehicle | 0.96 (4.07) | 0 (0) | 0.79 (3.33) | 0 (0) | 0 (0) |
| VOY101.PHF-1 | 193.8 (115.3) | 338.1 (176.9) | 220.3 (100.9) | 1103 (404.8) | 1152 (630.3) |
| (Dose: 1.4 × 10¹³ VG/kg) | | | | | |
| VOY201.PHF-1 | 140.8 (87.45) | 238.6 (120.5) | 210.6 (103.8) | 902.5 (317) | 619.3 (386.8) |
| (Dose: 5.0 × 10¹³ VG/kg) | | | | | |

[1074] IV dosing of VOY101 and VOY201 resulted in high levels of antibody to the CNS of P301 tauopathy mice. AT8 immunoreactivity (IR) is significantly reduced in the PH1F1-treated mice. IV dosing using VOY101 and VOY201 resulted in widespread CNS biodistribution and transduction of vectorized antibodies in P301S tauopathy mice.

### Example 13. Anti-Tau Antibody Delivery for Treatment of Tauopathies Including Alzheimer's Disease

### A. In Vivo Distribution, Expression and Efficacy Study of Intravenous Dosing of VOY101 or VOY201-Anti-Tau Antibody

[1075] A nucleic acid encoding the monoclonal antibody PHF-1 targeting tau is engineered into an AAV viral genome and produced in the VOY101 capsid (capsid sequence provided as SEQ ID NO: 1809) or VOY201 capsid (capsid sequence provided as SEQ ID NO: 1810).

[1076] The viral genome, recited 5′ to 3′ from ITR to ITR, comprised a wild type ITR, a promoter, the nucleic acid encoding the monoclonal antibody PHF-1 targeting tau (light chain (SEQ ID NO: 1819), linker region, heavy chain (SEQ ID NO: 1814) and stop codon), a polyA sequence, and wild type ITR. The viral genomes are packaged into VOY101 or VOY201 capsids, purified and formulated. The VOY101 or VOY201-anti Tau antibody particles are formulated in phosphate buffered saline (PBS) with 0.001% F-68.

[1077] Three groups of wild type (WT) mice, approximately 5 mice/group, at 2 months of age, are administered vehicle (PBS with 0.001% F-68), VOY101-anti Tau antibody vector at 1.4×10¹³ vg/kg, or VOY201-anti Tau antibody vector at 1.4×10¹³ vg/kg via intravenous tail vein injection.

[1078] Approximately 28 days following AAV particle administration, several tissue samples are collected. Vector genome digital PCR quantification is performed using a probe set against the CMV enhancer region of the CBA promoter, normalized to host TFRC, and expressed in vector genome per cell (VG/Cell).

[1079] The expression levels of PHF-1, present in the soluble fraction of tissue lysates, are also measured in collected tissues by detecting the interaction with paired helical filamentous tau coated on an ELISA plate. The antibody-antigen complex is visualized and quantified using HRP labeled anti-mouse IgG and its substrate TMB, followed by reading at OD450 on a plate reader and normalized to input tissue protein quantity.

[1080] Mouse brains are hemisected and tissue samples allocated for antibody immunohistochemistry. The samples are post-fixed in 4% paraformaldehyde overnight. PHF-1 antibody is detected by immunohistochemistry using anti-mouse IgG1 antibody (PHF-1 is a mouse IgG1 antibody).

[1081] PHF-1 expression within the CNS after administration of 1.4×10¹³ vg/kg via intravenous tail vein injection of VOY101.PHF-1 or VOY201.PHF-1 is evaluated by mouse anti-IgG1 and anti-NeuN or GFAP (glial fibrillary acidic protein double labeling immunofluorescent staining. PHF-1 is a mouse IgG1 antibody, and is therefore detected by anti-IgG1 antibody staining.

### B. In Vivo Distribution, Expression and Efficacy Study of Intravenous Dosing of VOY101 or VOY201-Anti-Tau Antibody in a Mouse Model

[1082] Three groups of P301S mice, approximately 20 mice/group, at 2 months of age, are administered vehicle (PBS with 0.001% F-68), VOY101-anti Tau antibody vector (VOY101.PHF-1) at 1.4×10¹³ vg/kg, or VOY201-anti Tau antibody vector (VOY201.PHF-1) at 5.0×10¹³ vg/kg via intravenous tail vein injection.

[1083] Approximately 3 months following AAV particle administration, several tissue samples are collected. Vector genome digital PCR quantification is performed using a probe set against the promoter, normalized to host TFRC, and expressed in vector genome per cell (VG/Cell).

[1084] The expression levels of PHF-1, present in the soluble fraction of tissue lysates, are also measured in collected tissues by detecting the interaction with paired helical filamentous tau coated on an ELISA plate. The antibody-antigen complex is visualized and quantified using HRP labeled anti-mouse IgG and its substrate TMB, followed by reading at OD450 on a plate reader and normalized to input tissue protein quantity.

### Example 14. In Vivo Biodistribution and Transgene Expression Levels Following Intravenous Administration of AAV Particles

[1085] A. In Vivo Biodistribution and Transgene Expression Levels Following Intravenous Treatment with VOY101-FXN or VOY801-FXN AAV Particles

[1086] Widespread gene transfer into the central nervous system, peripheral nervous system, and heart was observed in mice after intravenous administration of AAV vectors with capsid serotypes VOY101, VOY801, or VOY1101, encapsidating a vector genome comprising a synthetic promoter composed of CMV enhancer sequence and chicken beta-actin (CBA) promoter sequence, Cynomolgus frataxin-HA (cFXN-HA) and a human growth hormone polyadenylation sequence, flanked by AAV packaging signal inverted terminal repeats (ITRs) derived from AAV2 wild-type virus. The AAV particles were produced by triple transfection in HEK293T cells. The ITR to ITR sequence of the vector genome is provided as SEQ ID NO. 1826, or as SEQ ID NO. 1827. Results for the transfection of the vector genome comprising SEQ ID NO. 1826 are illustrated in Tables 33 and 34.

[1087] The single-stranded AAV particles having the serotype VOY1101, VOY801, or VOY101 were purified and formulated in phosphate buffered saline (PBS) with 0.001% F-68. The formulated AAV particles were administered to adult C57Bl/6J mice at 8 weeks of age via lateral tail vein injection at a concentration of 5 ml/kg, with a vector concentration of 4.0×10¹² vg/mL. The total dose was 2.0×10¹³ VG/kg. A control group treated with vehicle (PBS with 0.001% F-68) was dosed in parallel. VOY101 was used as a comparator for VOY1101 and VOY801.

[1088] Twenty-eight days following AAV particle or vehicle administration, several tissue samples were collected and flash-frozen in liquid nitrogen. Droplet digital PCR quantification of vector genome copies was performed using a probe set against the CMV enhancer region of the CBA promoter, normalized to host (mouse) TFRC, and expressed as vector genome per diploid cell (VG/DC). cFXN-HA protein levels were measured by ELISA and reported in ng cFXN-HA/mg of total protein. cFXN-HA protein levels and vector genome levels are shown in Tables 33 and 34, respectively. In Tables 33 and 34, “BLLQ” means below lower limit of quantification. For cFXN-HA protein levels, the LLOQ was approximately 0.89 ng/mg protein. For VG levels, the LLOQ was approximately 0.005 VG/DC. Experiments were conducted in quadruplicate.

TABLE 33
cFXN-HA Expression (ng/mg protein) in Mouse after Intravenous Injection

| AAV Serotype | | | | | Thoracic | Thoracic | | |
|---|---|---|---|---|---|---|---|---|
| (Nucleotide | | | | | Spinal | Dorsal Root | | |
| SEQ ID NO) | Cortex | Striatum | Hippocampus | Brainstem | Cord | Ganglia | Heart | Liver |
| VOY1101 | 979.01 ± | 932.1 ± | n.d. | n.d. | 1398.9 ± | n.d. | n.d. | 23.2 ± |
| (SEQ ID | 68.4 | 156.05 | | | 147.4 | | | 6.4 |
| NO: 1825) | | | | | | | | |
| VOY801 | 325.2 ± | 185.4 ± | n.d. | n.d. | 357.9 ± | n.d. | n.d. | 59.8 ± |
| (SEQ ID | 152.2 | 76.8 | | | 132.5 | | | 13.9 |
| NO: 1824) | | | | | | | | |
| VOY101 | 259.1 ± | 221.04 ± | n.d. | n.d. | 342.2 ± | n.d. | n.d. | 11.3 ± |
| (SEQ ID | 129.8 | 153.3 | | | 220.3 | | | 5.1 |
| NO: 1809) | | | | | | | | |
| Vehicle | BLLQ | BLLQ | n.d. | n.d. | BLLQ | n.d. | n.d. | BLLQ |

TABLE 34
Vector Genome Distribution in Mouse after Intravenous Injection (vector genome/diploid cell)

| AAV Serotype | | | | | Thoracic | Thoracic | | |
|---|---|---|---|---|---|---|---|---|
| (Nucleotide | | | | | Spinal | Dorsal Root | | |
| SEQ ID NO) | Cortex | Striatum | Hippocampus | Brainstem | Cord | Ganglia | Heart | Liver |
| VOY1101 | 41.88 ± | 45.12 ± | 35.27 ± | 77.39 ± | 59.32 ± | 5.87 ± | 2.48 ± | 20.78 ± |
| (SEQ ID | 8.96 | 3.03 | 10.66 | 8.96 | 7.37 | 5.21 | 1.16 | 5.26 |
| NO: 1825) | | | | | | | | |
| VOY801 | 21.58 ± | 22.09 ± | 16.71 ± | 31.65 ± | 21.86 ± | 1.44 ± | 3.51 ± | 91.2 ± |
| (SEQ ID | 4.31 | 6.06 | 3.04 | 8.61 | 5.83 | 0.57 | 2.96 | 46.06 |
| NO: 1824) | | | | | | | | |
| VOY101 | 18.36 ± | 22.36 ± | 15.46 ± | 28.97 ± | 20.22 ± | 0.56 ± | 1.23 ± | 2.48 ± |
| (SEQ ID | 12.16 | 13.49 | 9.82 | 15.98 | 10.82 | 0.34 | 1.22 | 1.17 |
| NO: 1809) | | | | | | | | |
| Vehicle | BLLQ | | | | BLLQ | BLLQ | BLLQ | BLLQ |

[1089] In mouse cortex, twenty-eight days after intravenous injection of 2.0×10¹³ vg/kg, VOY1101-cFXN-HA resulted in 2.3-fold higher vector genome levels and 3.8-fold higher cFXN-HA expression than VOY101-cFXN-HA, and injection of VOY801-cFXN-HA resulted in levels of vector genome and cFXN-HA expression similar to that of VOY101-cFXN-HA. In mouse striatum, twenty-eight days after intravenous injection of 2.0×10¹³ vg/kg, VOY1101-cFXN-HA resulted in 2.02-fold higher vector genome levels and 4.2-fold higher cFXN-HA expression than VOY101-cFXN-HA, and injection of VOY801-cFXN-HA resulted in levels of vector genome and cFXN-HA expression similar to that of VOY101-cFXN-HA.

[1090] In mouse hippocampus, twenty-eight days after intravenous injection of 2.0×10¹³ vg/kg, VOY1101-cFXN-HA resulted in 2.3-fold higher vector genome levels than VOY101-cFXN-HA, and injection of VOY801-cFXN-HA resulted in levels of vector genome similar to that of VOY101-cFXN-HA. In mouse brainstem, twenty-eight days after intravenous injection of 2.0×10¹³ vg/kg, VOY1101-cFXN-HA resulted in 2.67-fold higher vector genome levels than VOY101-cFXN-HA, and injection of VOY801-cFXN-HA resulted in levels of vector genome similar to that of VOY101-cFXN-HA.

[1091] In mouse thoracic spinal cord, twenty-eight days after intravenous injection of 2.0×10¹³ vg/kg, VOY1101-cFXN-HA resulted in 2.93-fold higher vector genome levels and 4.1-fold higher cFXN-HA protein expression than VOY101-cFXN-HA, and injection of VOY801-cFXN-HA resulted in levels of vector genome and cFXN-HA expression similar to that of VOY101-cFXN-HA. In dorsal root ganglia, twenty-eight days after intravenous injection of 2.0×10¹³ vg/kg, VOY1101-cFXN-HA administration resulted in levels of vector genome 10.48 higher than that of VOY101-cFXN-HA, and injection of VOY801-cFXN-HA resulted in 2.57-fold higher vector genome levels than VOY101-cFXN-HA.

[1092] In heart, twenty-eight days after intravenous injection of 2.0×10¹³ vg/kg, VOY1101-cFXN-HA resulted in 2.02-fold higher vector genome levels than VOY101-cFXN-HA, and injection of VOY801-cFXN-HA resulted in 2.85-fold higher vector genome levels than VOY101-cFXN-HA.

[1093] Correlation plots of the biodistribution (VG/DC) and AAV transduction (FXN protein, ng per mg total protein) of VOY1101-cFXN-HA and VOY101-cFXN-HA in the cortex, striatum and spinal cord indicated that VOY1101-cFXN-HA consistently showed greater biodistribution and transduction than VOY101-cFXN-HA.

B. In Vivo Biodistribution and Transgene Expression Levels Following Intravenous Treatment with VOY701-FXN AAV Particles

[1094] As described above for capsids VOY1101 and VOY801, gene transfer into the central nervous system, peripheral nervous system, and heart was tested in mice after intravenous administration of AAV particles with capsid serotypes VOY101 or VOY701, encapsidating a vector genome comprising a synthetic promoter composed of a CMV enhancer sequence and a chicken beta-actin (CBA) promoter sequence, Cynomolgus frataxin-HA (cFXN-HA) and a human growth hormone polyadenylation sequence, flanked by AAV ITRs derived from AAV2. The AAV particles were produced by triple transfection in HEK293T cells. The ITR to ITR sequence of the vector genome is provided as SEQ ID NO. 1826. Results for the transfection of the vector genome comprising SEQ ID NO. 1826 are illustrated in Tables 35 and 36.

[1095] The single-stranded AAV particles having the serotype VOY701 or VOY101 were purified and formulated in phosphate buffered saline (PBS) with 0.001% F-68. The formulated AAV particles were administered to adult C57Bl/6J mice at 8 weeks of age via lateral tail vein injection at a concentration of 5 ml/kg, with a vector concentration of 4.0×10¹² vg/mL. The total dose was 2.0×10¹³ VG/kg. A control group treated with vehicle (PBS with 0.001% F-68) was dosed in parallel. VOY101 was used as a comparator for VOY701.

[1096] Twenty-eight days following AAV particle or vehicle administration, several tissue samples were collected and flash-frozen in liquid nitrogen. Droplet digital PCR quantification of vector genome copies was performed using a probe set against the CMV enhancer region of the CBA promoter, normalized to host (mouse) TFRC, and expressed as vector genome per diploid cell (VG/DC). cFXN-HA protein levels were measured by ELISA and reported in ng cFXN-HA/mg of total protein. cFXN-HA protein levels and vector genome levels are shown in Tables 35 and 36, respectively. In Tables 35 and 36, “BLLQ” means below lower limit of quantification. For cFXN-HA protein levels, the LLOQ was approximately 0.71 ng/mg protein. For VG levels, the LLOQ was approximately 0.005 VG/DC. Experiments were conducted in quadruplicate. PP8T

TABLE 35
cFXN-HA Expression (ng/mg protein) in Mouse after Intravenous Injection

| AAV Serotype | | | | | Thoracic | Thoracic | | |
|---|---|---|---|---|---|---|---|---|
| (Nucleotide | | | | | Spinal | Dorsal Root | | |
| SEQ ID NO) | Cortex | Striatum | Hippocampus | Brainstem | Cord | Ganglia | Heart | Liver |
| VOY701 | 371.73 ± | 180.90 ± | 295.28 ± | 1134.68 ± | 961.05 ± | n.d. | n.d. | 11.60 ± |
| (SEQ ID NO: | 132.13 | 72.41 | 106.42 | 319.90 | 332.67 | | | 3.12 |
| 1828, 1829) | | | | | | | | |
| VOY101 | 231.11 ± | 102.30 ± | 190.66 ± | 643.75 ± | 573.69 ± | n.d. | n.d. | 15.06 ± |
| (SEQ ID | 79.55 | 48.18 | 33.37 | 130.73 | 211.25 | | | 6.63 |
| NO: 1809) | | | | | | | | |
| Vehicle | BLLQ | BLLQ | BLLQ | BLLQ | BLLQ | n.d. | n.d. | BLLQ |

TABLE 36
Vector Genome Distribution in Mouse after Intravenous Injection (vector genome/diploid cell)

| AAV Serotype | | | | | Thoracic | Thoracic | | |
|---|---|---|---|---|---|---|---|---|
| (Nucleotide | | | | | Spinal | Dorsal Root | | |
| SEQ ID NO) | Cortex | Striatum | Hippocampus | Brainstem | Cord | Ganglia | Heart | Liver |
| VOY701 | 11.29 ± | 15.77 ± | 9.39 ± | 30.58 ± | 22.39 ± | n.d. | n.d. | 2.88 ± |
| (SEQ ID NO: | 5.06 | 6.92 | 3.83 | 12.93 | 8.15 | | | 1.29 |
| 1828, 1829) | | | | | | | | |
| VOY101 | 18.59 ± | 16.17 ± | 16.45 ± | 33.43 ± | 21.33 ± | n.d. | n.d. | 3.26 ± |
| (SEQ ID | 5.05 | 3.89 | 2.98 | 18.84 | 5.94 | | | 2.60 |
| NO: 1809) | | | | | | | | |
| Vehicle | BLLQ | BLLQ | BLLQ | BLLQ | BLLQ | n.d. | n.d. | BLLQ |

[1097] In mouse cortex, twenty-eight days after intravenous injection of 2.0×10¹³ vg/kg, delivery of VOY701-cFXN-HA resulted in decreased vector genome levels, and yet, 1.6-fold higher cFXN-HA expression than following delivery of VOY101-cFXN-HA.

[1098] In mouse striatum, twenty-eight days after intravenous injection of 2.0×10¹³ vg/kg, VOY701-cFXN-HA vector genome levels were similar to those observed from Voy101-cFXN-HA treatments, while cFXN-HA expression was 1.8-fold higher as compared to VOY101-cFXN-HA.

[1099] In mouse hippocampus, twenty-eight days after intravenous injection of 2.0×10¹³ vg/kg, vector genome biodistribution of VOY701-cFXN-HA was decreased as compared to VOY101-cFXN-HA, and yet, 1.5-fold higher cFXN-HA expression than following delivery of VOY101-cFXN-HA.

[1100] In mouse brainstem and thoracic spinal cord, twenty-eight days after intravenous injection of 2.0×10¹³ vg/kg, delivery of VOY701-cFXN-HA resulted in vector genome biodistribution similar to that seen after delivery of VOY101-cFXN-HA, while cFXN-HA expression was 1.8 and 1.7 fold higher, respectively.

[1101] Correlation plots of the biodistribution (VG/DC) and AAV transduction (FXN protein, ng per mg total protein) of VOY701-cFXN-HA and VOY101-cFXN-HA in the cortex, striatum and spinal cord showed a lack of consistent change in biodistribution and/or transduction of VOY701-cFXN-HA as compared to VOY101-cFXN-HA. In summary, VOY701-cFXN-HA biodistribution and transduction in mouse CNS subsequent to intravenous administration may be considered substantially equivalent to the biodistribution and transduction in mouse CNS following intravenous delivery of VOY101-cFXN-HA.

### Example 15: In Vivo Assessment of Rationally Designed Barcoded AAV Capsids for CNS Transduction

[1102] The CREATE method for generating libraries of targeting peptides has previously been described in Deverman et al (Nature Biotechnology 34(2):204-209 (2016) and Chan et al., (Nature Neuroscience 20(8):1172-1179 (2017)), the contents of each of which are herein incorporated in their entirety. This method was used to identify targeting peptides for enhancing AAV tropism to desired tissues (e.g., CNS). In short, random 7-amino acid peptides were inserted between amino acids 588 and 589 of K449R AAV9 (SEQ ID NO: 9), by inserting, at the DNA level, the nucleotides coding for random 7 amino acids into the corresponding region of the K449R AAV9 nucleotide sequence, to generate a DNA library. The K449R variant of AAV9 has the same function as wild-type AAV9. The DNA library was then used to create an AAV particle library which was intravenously administered to adult GFAP-Cre mice. DNAs packaged in AAV particles transducing the Cre-expressing cells were recovered in a Cre-dependent manner a week after administration. The recovered DNAs were cloned into the K449R AAV9 backbone to create a 2nd round DNA library. A second round of in-vivo selection yielded a series of AAV variants comprising targeting peptides that enhanced tropism for CNS tissues. Examples of targeting peptides isolated in such a manner include targeting peptides PHP.B (TLAVPFK; SEQ ID NO: 1260), PHP.A (YTLSQGW; SEQ ID NO: 1275), PHP.B2 (SVSKPFL; SEQ ID NO: 1268), PHP.B3 (FTLTTPK; SEQ ID NO: 1269), PHP.S (QAVRTSL; SEQ ID NO: 1319), G2B-A7 (MNSTKNV; SEQ ID NO: 1321), and G2B5-G9 (VSGGHHS; SEQ ID NO: 1322) shown in Table 37 below.

TABLE 37
Exemplar Targeting Peptides

| Targeting | | | SEQ ID |
|---|---|---|---|
| Peptide | Sequence | Reference Information | NO: |
| PHP.B | TLAVPFK | WO2015038958 SEQ ID NO: 1 | 1260 |
| PHP.A | YTLSQGW | WO2015038958 SEQ ID NO: 60 | 1275 |
| PHP.B2 | SVSKPFL | WO2015038958 SEQ ID NO: 28 | 1268 |
| PHP.B3 | FTLTTPK | WO2015038958 SEQ ID NO: 29 | 1269 |
| PHP.S | QAVRTSL | WO2017100671 SEQ ID NO: 37 | 1319 |
| PHP.N | DGTLAVPFKAQ | WO2017100671 SEQ ID NO: 4 | 1289 |
| G2B4 (G2B-A7) | MNSTKNV | WO2017100671 SEQ ID NO: 43 | 1321 |
| G2B5 (G2B5-G9) | VSGGHHS | WO2017100671 SEQ ID NO: 44 | 1322 |
| PHP.B-EST | ESTLAVPFKAQ | WO2017100671 SEQ ID NO: 5 | 1290 |
| PHP.B-GGT | GGTLAVPFKAQ | WO2017100671 SEQ ID NO: 6 | 1291 |
| PHP.B-ATP | AQTLATPFKAQ | WO2017100671 SEQ ID NO: 7 | 1292 |
| PHP.B-ATT-T | ATTLATPFKAQ | WO2017100671 SEQ ID NO: 8 | 1293 |
| PHP.B-DGT-T | DGTLATPFKAQ | WO2017100671 SEQ ID NO: 9 | 1294 |
| PHP.B-GGT-T | GGTLATPFKAQ | WO2017100671 SEQ ID NO: 10 | 1295 |
| PHP.B-SGS | SGSLAVPFKAQ | WO2017100671 SEQ ID NO: 11 | 1296 |
| PHP.B-AQP | AQTLAQPFKAQ | WO2017100671 SEQ ID NO: 12 | 1297 |
| PHP.B-QQP | AQTLQQPFKAQ | WO2017100671 SEQ ID NO: 13 | 1298 |
| PHP.B-SNP(3) | AQTLSNPFKAQ | WO2017100671 SEQ ID NO: 14 | 1299 |
| PHP.B-SNP | AQTLAVPFSNP | WO2017100671 SEQ ID NO: 15 | 1300 |

[1103] The PHP.B 7-mer and flanking sequences were further evolved through site saturation mutagenesis of sets of three consecutive amino acids, using NNK codons, wherein N=any base and K is a G or T. DNA libraries of these site saturation mutagenesis sequences were generated to then create AAV particle libraries. CREATE was used for AAV particle selection in three different CNS cell populations, 1) astrocytes (GFAP-Cre), 2) GABA-ergic (inhibitory) neurons (VGAT-IRES-Cre), and 3) a subset of glutamatergic (excitatory) neurons (Vglut2-IRES-CRE). AAV particles transducing Cre-expressing cells were subjected to two rounds of selection and were then recovered and assessed by clonal and/or next generation sequencing (NGS). Examples of targeting peptides isolated in such a manner include PHP.N (DGTLAVPFKAQ; SEQ ID NO: 1289), PHP.B-EST (ESTLAVPFKAQ; SEQ ID NO: 1290), PHP.B-GGT (GGTLAVPFKAQ; SEQ ID NO: 1291), PHP.B-ATP (AQTLATPFKAQ; SEQ ID NO: 1292), PHP.B-ATT-T (ATTLATPFKAQ; SEQ ID NO: 1293), PHP.B-DGT-T (DGTLATPFKAQ; SEQ ID NO: 1294), PHP.B-GGT-T (GGTLATPFKAQ; SEQ ID NO: 1295), PHP.B-SGS (SGSLAVPFKAQ; SEQ ID NO: 1296), PHP.B-AQP (AQTLAQPFKAQ; SEQ ID NO: 1297), PHP.B-QQP (AQTLQQPFKAQ; SEQ ID NO: 1298), PHP.B-SNP(3) (AQTLSNPFKAQ; SEQ ID NO: 1299), and PHP.B-SNP (AQTLAVPFSNP; SEQ ID NO: 1300) as shown in Table 37 above.

[1104] The targeting peptides listed in Table 37 (PHP.B, PHP.A, PHP.B2, PHP.B3, PUPS, PHP.N, G2B-A7, G2B5-G9, PHP.B-EST, PHP.B-GGT, PHP.B-ATP, PHP.B-ATT-T, PHP.B-DGT-T, PHP.B-GGT-T, PHP.B-SGS, PHP.B-AQP, PHP.B-QQP, PHP.B-SNP(3), and PHP.B-SNP) were each inserted into an AAV9 K449R (SEQ ID NO: 9) parent amino acid sequence between amino acids at positions 588 and 589 to create an AAV capsid library. In generating the AAV capsid library, each of the targeting polynucleotide sequences encoding the targeting peptides listed above was inserted into a viral genome along with 6 barcoding sequences and sequences necessary for AAV particle packaging. Exemplar capsids use included VOY101, VOY201, VOY801, VOY1101, and VOY701. AAV9 and AAV9 K449R were used as controls.

[1105] Barcoded AAV particles were then administered to 3 adult C57/BL6 mice via a tail vein bolus injection (intravenous) with 2×1013 vg/kg (5×109 vg/AAV variant). At six-weeks after injection, animals were sacrificed, and tissues of the cortex, brainstem, cerebellum, upper spinal cord, lower spinal cord, liver, heart and lung were collected. Remaining brain tissues were pooled to a “rest of brain” sample. DNA and/or RNA was extracted and PCR-amplified using AAV-clone specific virus barcodes and sample-specific barcode attached PCR primers. Illumina sequencing was used to determine the prevalence of the various capsids within the tissue samples. Data for a representative subset showing enrichment at DNA and RNA levels within CNS tissues over the parental AAV9 are shown below in Tables 38 and 39. Average fold-enrichments within the CNS and peripheral tissues are shown. Experiments were conducted in triplicate (n=3).

TABLE 38
RNA Barcoding results

| | | | Rest of | | | | | Upper | Lower |
|---|---|---|---|---|---|---|---|---|---|
| AAV Variant | Liver | Cortex | Brain | Heart | Lung | Brainstem | Cerebellum | Spinal Cord | Spinal Cord |
| AAV9 | 1.0 | 1.0 | 1.0 | 1.0 | 1.0 | 1.0 | 1.0 | 1.0 | 1.0 |
| AAV9 K449R | 1.4 | 0.5 | 1.5 | 0.9 | 1.1 | 2.2 | 5.4 | 1.0 | 4.0 |
| VOY101 | 0.1 | 149.7 | 122.4 | 0.7 | 4.2 | 253.8 | 319.0 | 74.3 | 1189.4 |
| VOY201 | 0.5 | 115.6 | 158.9 | 1.5 | 1.2 | 334.6 | 299.2 | 80.1 | 915.8 |
| VOY1101 | 0.4 | 241.8 | 346.9 | 1.1 | 4.7 | 578.3 | 457.5 | 153.5 | 1334.0 |
| VOY801 | 0.9 | 159.4 | 192.8 | 1.2 | 4.6 | 336.5 | 391.8 | 82.1 | 1072.3 |
| VOY701 | 0.1 | 94.5 | 106.2 | 0.2 | 1.2 | 192.1 | 150.1 | 52.9 | 530.7 |
| VOY501 | 0.7 | 0.8 | 1.2 | 0.7 | 21.1 | 0.9 | 3.5 | 0.6 | 3.9 |
| VOY601 | 2.4 | 0.2 | 0.3 | 1.4 | 1.0 | 0.3 | 0.8 | 0.4 | 0.4 |
| VOY1801 | 0.5 | 10.8 | 34.1 | 0.0 | 0.2 | 133.3 | 73.3 | 14.7 | 281.9 |
| VOY1401 | 1.5 | 60.4 | 116.7 | 0.9 | 1.6 | 230.4 | 176.9 | 46.7 | 429.9 |
| VOY901 | 0.6 | 92.1 | 216.7 | 0.8 | 2.0 | 377.6 | 272.4 | 101.4 | 473.6 |
| VOY1001 | 0.6 | 39.4 | 104.8 | 0.7 | 0.2 | 145.9 | 93.9 | 37.8 | 87.2 |
| VOY1201 | 1.8 | 43.4 | 75.0 | 0.8 | 0.6 | 127.2 | 138.0 | 22.6 | 280.2 |
| VOY1501 | 1.9 | 66.5 | 102.4 | 1.1 | 1.9 | 168.1 | 161.6 | 42.0 | 320.1 |
| VOY1301 | 0.6 | 155.1 | 190.1 | 0.9 | 7.9 | 314.1 | 361.3 | 82.7 | 1052.4 |
| VOY1701 | 0.0 | 28.3 | 18.7 | 0.0 | 1.0 | 38.0 | 30.8 | 9.5 | 128.8 |
| VOY1601 | 0.8 | 51.3 | 148.1 | 0.7 | 0.6 | 225.0 | 160.5 | 49.5 | 142.5 |
| VOY301 | 1.3 | 79.8 | 100.6 | 2.1 | 20.4 | 153.8 | 280.2 | 42.7 | 519.7 |
| VOY401 | 0.9 | 12.5 | 31.2 | 1.0 | 0.7 | 53.9 | 35.8 | 13.8 | 58.9 |
| VOY1901 | 3.9 | 0.5 | 0.4 | 1.6 | 1.2 | 0.7 | 0.4 | 0.4 | 0.8 |

TABLE 39
DNA Barcoding results

| AAV Variant | Liver | Cortex | Brain | Heart |
|---|---|---|---|---|
| AAV9 | 1.0 | 1.0 | 1.0 | 1.0 |
| AAV9 K449R | 1.1 | 1.7 | 1.5 | 0.8 |
| VOY101 | 0.1 | 303.7 | 302.9 | 0.7 |
| VOY201 | 0.5 | 160.9 | 179.2 | 0.8 |
| VOY1101 | 0.3 | 281.7 | 381.8 | 1.1 |
| VOY801 | 0.7 | 487.3 | 458.7 | 1.1 |
| VOY701 | 0.1 | 96.6 | 117.0 | 0.3 |
| VOY501 | 0.5 | 18.7 | 14.5 | 0.1 |
| VOY601 | 1.9 | 1.2 | 1.0 | 0.7 |
| VOY1801 | 0.4 | 74.0 | 86.0 | 0.3 |
| VOY1401 | 1.1 | 85.2 | 116.4 | 0.8 |
| VOY901 | 0.7 | 156.3 | 239.3 | 0.9 |
| VOY1001 | 0.5 | 63.1 | 97.4 | 0.4 |
| VOY1201 | 1.5 | 121.6 | 132.3 | 0.5 |
| VOY1501 | 1.7 | 101.0 | 111.0 | 1.4 |
| VOY1301 | 0.6 | 405.4 | 427.8 | 1.1 |
| VOY1701 | 0.0 | 27.8 | 22.8 | 0.2 |
| VOY1601 | 0.8 | 120.3 | 162.2 | 0.5 |
| VOY301 | 1.2 | 713.1 | 698.1 | 1.4 |
| VOY401 | 1.1 | 18.2 | 29.8 | 0.5 |
| VOY1901 | 3.2 | 1.0 | 1.0 | 0.8 |

[1106] Many of the AAV particles tested showed enhanced (>100×) targeting to CNS tissues in mice after IV dosing, as compared to AAV9 (SEQ ID NO: 136) and AAV9 K449R (SEQ ID NO: 9) parent AAV particles as measured by DNA and RNA barcoding methods.

[1107] These results demonstrate AAV capsids with significant enrichment at both DNA and RNA levels within CNS tissues, over the parental AAV9 after IV dosing. For example, VOY1101 demonstrated significantly improved CNS biodistribution and transduction when tested in mice. Based on immunofluorescence analysis of immuno-staining for a component of the viral genome and relevant cellular markers for neurons (NeuN) and astrocytes (GFAP), VOY1101 showed transduction of both neurons and astrocytes across multiple brain regions (e.g., cortex and hippocampus). This capsid variant demonstrated low peripheral exposure in other organs after intravenous administration in mice. These results show that AAV capsids such as VOY1101 have strong blood-brain barrier penetrant properties subsequent to intravenous administration.

### Example 16. Targeting of AAVPHP.B and AAVPHP.A to the CNS and DRG

[1108] To determine the tropism of AAV particles comprising the PHP.B or PHP.A targeting peptide to CNS and to the dorsal root ganglia after intravenous administration, the following study design was executed in adult (6-7 weeks) male C57BL/6 mice.

TABLE 40
Study design for PHP.B/PHP.A targeting to DRG

| Test | Dose | Route | Volume | N | End of |
|---|---|---|---|---|---|
| Article | (vg) | (Tail vein) | (uL) | (IHC) | Study |
| Vehicle | 0 | IV | 160 | 2 | D 28 |
| AAV9-ssGFP | 5 × 10¹¹ | IV | 160 | 4 | D 28 |
| PHP.B-ssGFP | 5 × 10¹¹ | IV | 160 | 4 | D 28 |
| PHP.A-ssGFP | 5 × 10¹¹ | IV | 160 | 4 | D 28 |

[1109] Targeting peptides PHP.B (TLAVPFK; SEQ ID NO: 1260) or PHP.A (YTLSQGW; SEQ ID NO: 1275) were inserted into an AAV9 (SEQ ID NO: 136) capsid sequence between amino acid positions 588 and 589. AAV9 without a targeting insert was used as a comparison vector, and PBS used as a control. A single stranded viral genome encoding GFP was used, yielding AAV particles AAV9-ssGFP, PHP.B-ssGFP and PHP.A-ssGFP. AAV particles (or PBS) were administered intravenously via the tail vein at a dose of 5×1011 and volume of 160 μL.

[1110] Twenty eight days after intravenous delivery of the AAV particles, the animals were sacrificed and tissues collected for immunohistochemical and immunofluorescent analyses. Tissues from the dorsal root ganglia, brain (striatum, cortex, hippocampus, thalamus, brainstem, cerebellum), spinal cord (ventral horn, lumbar, thoracic and cervical), liver, heart, kidney, spleen and muscle were collected for processing by standard methods known in the art.

[1111] Analysis of tissue sections of brain, striatum, cortex, hippocampus and ventral horn showed that vectors comprising PHP.B or PHP.A targeting peptides mediate greater gene delivery throughout the CNS than AAV9 following intravenous injection in adult mice.

[1112] Similar analysis of tissue sections of the DRG demonstrated that after intravenous administration of the AAV particles, the greatest transduction of sensory neurons (most GFP signal) was seen with the use of targeting peptide PHP.B. Both AAV9 and PHP.A yielded transduced sensory neurons in the DRG following intravenous delivery, though to a lesser extent to that seen with PHP.B. As expected, intravenous delivery of PBS showed no transduction of sensory neurons of the DRG. Quantification of AAV9 vs AAVPHP.B vector genomes per diploid cell using digital PCR yielded the results shown in Table 41 below.

TABLE 41
Vector genome quantification (VG/DC)

| Tissue | AAV9 | PHP.B |
|---|---|---|
| Lumbar spinal cord | 0.3 | 7.7 |
| Thoracic spinal cord | 0.4 | 9.4 |
| Cervical spinal cord | 0.3 | 10.5 |
| DRG (Pooled) | 0.4 | 2.1 |
| Striatum | 0.2 | 8.9 |
| Thalamus | 0.3 | 13.2 |
| Hippocampus | 0.2 | 7.4 |
| Cortex | 0.4 | 12.8 |
| Brainstem | 0.3 | 11.7 |
| Cerebellum | 0.0 | 1.2 |
| Liver | 113 | 47.6 |
| Heart | 2.2 | 2.3 |
| Kidney | 2.0 | 1.2 |
| Muscle | 5.9 | 1.7 |
| Spleen | 4.7 | 1.7 |

[1113] These results indicate 30-50× higher vector genome per diploid cell using targeting peptide PHP.B and demonstrate that targeting peptide PHP.B can be used for enhanced targeting to the CNS and of the sensory neurons of the dorsal root ganglia.

### VIII. Equivalents and Scope

[1114] Those skilled in the art will recognize, or be able to ascertain using no more than routine experimentation, many equivalents to the specific embodiments in accordance with the disclosure. The scope of the present disclosure is not intended to be limited to the above Description, but rather is as set forth in the appended claims.

[1115] In the claims, articles such as “a,” “an,” and “the” may mean one or more than one unless indicated to the contrary or otherwise evident from the context. Claims or descriptions that include “or” between one or more members of a group are considered satisfied if one, more than one, or all of the group members are present in, employed in, or otherwise relevant to a given product or process unless indicated to the contrary or otherwise evident from the context. The disclosure includes embodiments in which exactly one member of the group is present in, employed in, or otherwise relevant to a given product or process. The disclosure includes embodiments in which more than one, or the entire group members are present in, employed in, or otherwise relevant to a given product or process.

[1116] It is also noted that the term “comprising” is intended to be open and permits but does not require the inclusion of additional elements or steps. When the term “comprising” is used herein, the term “consisting of” is thus also encompassed and disclosed.

[1117] Where ranges are given, endpoints are included. Furthermore, it is to be understood that unless otherwise indicated or otherwise evident from the context and understanding of one of ordinary skill in the art, values that are expressed as ranges can assume any specific value or subrange within the stated ranges in different embodiments of the disclosure, to the tenth of the unit of the lower limit of the range, unless the context clearly dictates otherwise.

[1118] In addition, it is to be understood that any particular embodiment of the present disclosure that falls within the prior art may be explicitly excluded from any one or more of the claims. Since such embodiments are deemed to be known to one of ordinary skill in the art, they may be excluded even if the exclusion is not set forth explicitly herein. Any particular embodiment of the compositions of the disclosure (e.g., any antibiotic, therapeutic or active ingredient; any method of production; any method of use; etc.) can be excluded from any one or more claims, for any reason, whether or not related to the existence of prior art.

[1119] It is to be understood that the words which have been used are words of description rather than limitation, and that changes may be made within the purview of the appended claims without departing from the true scope and spirit of the disclosure in its broader aspects.

[1120] While the present disclosure has been described at some length and with some particularity with respect to the several described embodiments, it is not intended that it should be limited to any such particulars or embodiments or any particular embodiment, but it is to be construed with references to the appended claims so as to provide the broadest possible interpretation of such claims in view of the prior art and, therefore, to effectively encompass the intended scope of the disclosure.

[1121] All publications, patent applications, patents, and other references mentioned herein are incorporated by reference in their entirety. In case of conflict, the present specification, including definitions, will control. In addition, section headings, the materials, methods, and examples are illustrative only and not intended to be limiting.

The application's sequence listing, which the Patent Office published only in electronic form, follows.

SEQUENCE LISTING (1829 sequences)

SEQ ID NO: 1 - protein, 743 aa, Artificial Sequence
  Description of Artificial Sequence: Synthetic polypeptide
MAADGYLPDWLEDNLSEGIREWWALKPGAPQPKANQQHQDNARGLVLPGYKYLGPGNGLDKGEPVNAADAAALEHDKAYDQQLKAGDNPYLKYNHADAEFQERLKEDTSFGGNLGRAVFQAKKRLLEPLGLVEEAAKTAPGKKRPVEQSPQEPDSSAGIGKSGAQPAKKRLNFGQTGDTESVPDPQPIGEPPAAPSGVGSLTMASGGGAPVADNNEGADGVGSSSGNWHCDSQWLGDRVITTSTRTWALPTYNNHLYKQISNSTSGGSSNDNAYFGYSTPWGYFDFNRFHCHFSPRDWQRLINNNWGFRPKRLNFKLFNIQVKEVTDNNGVKTIANNLTSTVQVFTDSDYQLPYVLGSAHEGCLPPFPADVFMIPQYGYLTLNDGSQAVGRSSFYCLEYFPSQMLRTGNNFQFSYEFENVPFHSSYAHSQSLDRLMNPLIDQYLYYLSKTINGSGQNQQTLKFSVAGPSNMAVQGRNYIPGPSYRQQRVSTTVTQNNNSEFAWPGASSWALNGRNSLMNPGPAMASHKEGEDRFFPLSGSLIFGKQGTGRDNVDADKVMITNEEEIKTTNPVATESYGQVATNHQSDGTLAVPFKAQAQTGWVQNQGILPGMVWQDRDVYLQGPIWAKIPHTDGNFHPSPLMGGFGMKHPPPQILIKNTPVPADPPTAFNKDKLNSFITQYSTGQVSVEIEWELQKENSKRWNPEIQYTSNYYKSNNVEFAVNTEGVYSEPRPIGTRYLTRNL

SEQ ID NO: 2 - protein, 743 aa, Artificial Sequence
  Description of Artificial Sequence: Synthetic polypeptide
MAADGYLPDWLEDNLSEGIREWWALKPGAPQPKANQQHQDNARGLVLPGYKYLGPGNGLDKGEPVNAADAAALEHDKAYDQQLKAGDNPYLKYNHADAEFQERLKEDTSFGGNLGRAVFQAKKRLLEPLGLVEEAAKTAPGKKRPVEQSPQEPDSSAGIGKSGAQPAKKRLNFGQTGDTESVPDPQPIGEPPAAPSGVGSLTMASGGGAPVADNNEGADGVGSSSGNWHCDSQWLGDRVITTSTRTWALPTYNNHLYKQISNSTSGGSSNDNAYFGYSTPWGYFDFNRFHCHFSPRDWQRLINNNWGFRPKRLNFKLFNIQVKEVTDNNGVKTIANNLTSTVQVFTDSDYQLPYVLGSAHEGCLPPFPADVFMIPQYGYLTLNDGSQAVGRSSFYCLEYFPSQMLRTGNNFQFSYEFENVPFHSSYAHSQSLDRLMNPLIDQYLYYLSRTINGSGQNQQTLKFSVAGPSNMAVQGRNYIPGPSYRQQRVSTTVTQNNNSEFAWPGASSWALNGRNSLMNPGPAMASHKEGEDRFFPLSGSLIFGKQGTGRDNVDADKVMITNEEEIKTTNPVATESYGQVATNHQSDGTLAVPFKAQAQTGWVQNQGILPGMVWQDRDVYLQGPIWAKIPHTDGNFHPSPLMGGFGMKHPPPQILIKNTPVPADPPTAFNKDKLNSFITQYSTGQVSVEIEWELQKENSKRWNPEIQYTSNYYKSNNVEFAVNTEGVYSEPRPIGTRYLTRNL

SEQ ID NO: 3 - protein, 743 aa, Artificial Sequence
  Description of Artificial Sequence: Synthetic polypeptide
MAADGYLPDWLEDNLSEGIREWWALKPGAPQPKANQQHQDNARGLVLPGYKYLGPGNGLDKGEPVNAADAAALEHDKAYDQQLKAGDNPYLKYNHADAEFQERLKEDTSFGGNLGRAVFQAKKRLLEPLGLVEEAAKTAPGKKRPVEQSPQEPDSSAGIGKSGAQPAKKRLNFGQTGDTESVPDPQPIGEPPAAPSGVGSLTMASGGGAPVADNNEGADGVGSSSGNWHCDSQWLGDRVITTSTRTWALPTYNNHLYKQISNSTSGGSSNDNAYFGYSTPWGYFDFNRFHCHFSPRDWQRLINNNWGFRPKRLNFKLFNIQVKEVTDNNGVKTIANNLTSTVQVFTDSDYQLPYVLGSAHEGCLPPFPADVFMIPQYGYLTLNDGSQAVGRSSFYCLEYFPSQMLRTGNNFQFSYEFENVPFHSSYAHSQSLDRLMNPLIDQYLYYLSRTINGSGQNQQTLKFSVAGPSNMAVQGRNYIPGPSYRQQRVSTTVTQNNNSEFAWPGASSWALNGRNSLMNPGPAMASHKEGEDRFFPLSGSLIFGKQGTGRDNVDADKVMITNEEEIKTTNPVATESYGQVATNHQSAQTLAVPFKAQAQTGWVQNQGILPGMVWQDRDVYLQGPIWAKIPHTDGNFHPSPLMGGFGMKHPPPQILIKNTPVPADPPTAFNKDKLNSFITQYSTGQVSVEIEWELQKENSKRWNPEIQYTSNYYKSNNVEFAVNTEGVYSEPRPIGTRYLTRNL

SEQ ID NO: 4 - DNA, 2232 bp, Artificial Sequence
  Description of Artificial Sequence: Synthetic polynucleotide
atggctgccgatggttatcttccagattggctcgaggacaaccttagtgaaggaattcgcgagtggtgggctttgaaacctggagcccctcaacccaaggcaaatcaacaacatcaagacaacgctcgaggtcttgtgcttccgggttacaaataccttggacccggcaacggactcgacaagggggagccggtcaacgcagcagacgcggcggccctcgagcacgacaaggcctacgaccagcagctcaaggccggagacaacccgtacctcaagtacaaccacgccgacgccgagttccaggagcggctcaaagaagatacgtcttttgggggcaacctcgggcgagcagtcttccaggccaaaaagaggcttcttgaacctcttggtctggttgaggaagcggctaagacggctcctggaaagaagaggcctgtagagcagtctcctcaggaaccggactcctccgcgggtattggcaaatcgggtgcacagcccgctaaaaagagactcaatttcggtcagactggcgacacagagtcagtcccagaccctcaaccaatcggagaacctcccgcagccccctcaggtgtgggatctcttacaatggcttcaggtggtggcgcaccagtggcagacaataacgaaggtgccgatggagtgggtagttcctcgggaaattggcattgcgattcccaatggctgggggacagagtcatcaccaccagcacccgaacctgggccctgcccacctacaacaatcacctctacaagcaaatctccaacagcacatctggaggatcttcaaatgacaacgcctacttcggctacagcaccccctgggggtattttgacttcaacagattccactgccacttctcaccacgtgactggcagcgactcatcaacaacaactggggattccggcctaagcgactcaacttcaagctcttcaacattcaggtcaaagaggttacggacaacaatggagtcaagaccatcgccaataaccttaccagcacggtccaggtcttcacggactcagactatcagctcccgtacgtgctcgggtcggctcacgagggctgcctcccgccgttcccagcggacgttttcatgattcctcagtacgggtatctgacgcttaatgatggaagccaggccgtgggtcgttcgtccttttactgcctggaatatttcccgtcgcaaatgctaagaacgggtaacaacttccagttcagctacgagtttgagaacgtacctttccatagcagctacgctcacagccaaagcctggaccgactaatgaatccactcatcgaccaatacttgtactatctctctagaactattaacggttctggacagaatcaacaaacgctaaaattcagtgtggccggacccagcaacatggctgtccagggaagaaactacatacctggacccagctaccgacaacaacgtgtctcaaccactgtgactcaaaacaacaacagcgaatttgcttggcctggagcttcttcttgggctctcaatggacgtaatagcttgatgaatcctggacctgctatggccagccacaaagaaggagaggaccgtttctttcctttgtctggatctttaatttttggcaaacaaggtaccggcagagacaacgtggatgcggacaaagtcatgataaccaacgaagaagaaattaaaactactaacccggtagcaacggagtcctatggacaagtggccacaaaccaccagagtgcccaaactttggcggtgccttttaaggcacaggcgcagaccggttgggttcaaaaccaaggaatacttccgggtatggtttggcaggacagagatgtgtacctgcaaggacccatttgggccaaaattcctcacacggacggcaactttcacccttctccgctgatgggagggtttggaatgaagcacccgcctcctcagatcctcatcaaaaacacacctgtacctgcggatcctccaacggccttcaacaaggacaagctgaactctttcatcacccagtattctactggccaagtcagcgtggagatcgagtgggagctgcagaaggaaaacagcaagcgctggaacccggagatccagtacacttccaactattacaagtctaataatgttgaatttgctgttaatactgaaggtgtatatagtgaaccccgccccattggcaccagatacctgactcgtaatctgtaa

SEQ ID NO: 5 - protein, 736 aa, Artificial Sequence
  Description of Artificial Sequence: Synthetic polypeptide
MAADGYLPDWLEDNLSEGIREWWALKPGAPQPKANQQHQDNARGLVLPGYKYLGPGNGLDKGEPVNAADAAALEHDKAYDQQLKAGDNPYLKYNHADAEFQERLKEDTSFGGNLGRAVFQAKKRLLEPLGLVEEAAKTAPGKKRPVEQSPQEPDSSAGIGKSGAQPAKKRLNFGQTGDTESVPDPQPIGEPPAAPSGVGSLTMASGGGAPVADNNEGADGVGSSSGNWHCDSQWLGDRVITTSTRTWALPTYNNHLYKQISNSTSGGSSNDNAYFGYSTPWGYFDFNRFHCHFSPRDWQRLINNNWGFRPKRLNFKLFNIQVKEVTDNNGVKTIANNLTSTVQVFTDSDYQLPYVLGSAHEGCLPPFPADVFMIPQYGYLTLNDGSQAVGRSSFYCLEYFPSQMLRTGNNFQFSYEFENVPFHSSYAHSQSLDRLMNPLIDQYLYYLSRTIQSSQTPRQTLKFSVAGPSNMAVQGRNYIPGPSYRQQRVSTTVTQNNNSEFAWPGASSWALNGRNSLMNPGPAMASHKEGEDRFFPLSGSLIFGKQGTGRDNVDADKVMITNEEEIKTTNPVATESYGQVATNHQSAQAQAQTGWVQNQGILPGMVWQDRDVYLQGPIWAKIPHTDGNFHPSPLMGGFGMKHPPPQILIKNTPVPADPPTAFNKDKLNSFITQYSTGQVSVEIEWELQKENSKRWNPEIQYTSNYYKSNNVEFAVNTEGVYSEPRPIGTRYLTRNL

SEQ ID NO: 6 - protein, 743 aa, Artificial Sequence
  Description of Artificial Sequence: Synthetic polypeptide
MAADGYLPDWLEDNLSEGIREWWALKPGAPQPKANQQHQDNARGLVLPGYKYLGPGNGLDKGEPVNAADAAALEHDKAYDQQLKAGDNPYLKYNHADAEFQERLKEDTSFGGNLGRAVFQAKKRLLEPLGLVEEAAKTAPGKKRPVEQSPQEPDSSAGIGKSGAQPAKKRLNFGQTGDTESVPDPQPIGEPPAAPSGVGSLTMASGGGAPVADNNEGADGVGSSSGNWHCDSQWLGDRVITTSTRTWALPTYNNHLYKQISNSTSGGSSNDNAYFGYSTPWGYFDFNRFHCHFSPRDWQRLINNNWGFRPKRLNFKLFNIQVKEVTDNNGVKTIANNLTSTVQVFTDSDYQLPYVLGSAHEGCLPPFPADVFMIPQYGYLTLNDGSQAVGRSSFYCLEYFPSQMLRTGNNFQFSYEFENVPFHSSYAHSQSLDRLMNPLIDQYLYYLSRTIILGTGTSQTLKFSVAGPSNMAVQGRNYIPGPSYRQQRVSTTVTQNNNSEFAWPGASSWALNGRNSLMNPGPAMASHKEGEDRFFPLSGSLIFGKQGTGRDNVDADKVMITNEEEIKTTNPVATESYGQVATNHQSAQTRTNPEAAQAQTGWVQNQGILPGMVWQDRDVYLQGPIWAKIPHTDGNFHPSPLMGGFGMKHPPPQILIKNTPVPADPPTAFNKDKLNSFITQYSTGQVSVEIEWELQKENSKRWNPEIQYTSNYYKSNNVEFAVNTEGVYSEPRPIGTRYLTRNL

SEQ ID NO: 7 - protein, 743 aa, Artificial Sequence
  Description of Artificial Sequence: Synthetic polypeptide
MAADGYLPDWLEDNLSEGIREWWALKPGAPQPKANQQHQDNARGLVLPGYKYLGPGNGLDKGEPVNAADAAALEHDKAYDQQLKAGDNPYLKYNHADAEFQERLKEDTSFGGNLGRAVFQAKKRLLEPLGLVEEAAKTAPGKKRPVEQSPQEPDSSAGIGKSGAQPAKKRLNFGQTGDTESVPDPQPIGEPPAAPSGVGSLTMASGGGAPVADNNEGADGVGSSSGNWHCDSQWLGDRVITTSTRTWALPTYNNHLYKQISNSTSGGSSNDNAYFGYSTPWGYFDFNRFHCHFSPRDWQRLINNNWGFRPKRLNFKLFNIQVKEVTDNNGVKTIANNLTSTVQVFTDSDYQLPYVLGSAHEGCLPPFPADVFMIPQYGYLTLNDGSQAVGRSSFYCLEYFPSQMLRTGNNFQFSYEFENVPFHSSYAHSQSLDRLMNPLIDQYLYYLSRTIILGTGTSQTLKFSVAGPSNMAVQGRNYIPGPSYRQQRVSTTVTQNNNSEFAWPGASSWALNGRNSLMNPGPAMASHKEGEDRFFPLSGSLIFGKQGTGRDNVDADKVMITNEEEIKTTNPVATESYGQVATNHQSAQNGGTSSSAQAQTGWVQNQGILPGMVWQDRDVYLQGPIWAKIPHTDGNFHPSPLMGGFGMKHPPPQILIKNTPVPADPPTAFNKDKLNSFITQYSTGQVSVEIEWELQKENSKRWNPEIQYTSNYYKSNNVEFAVNTEGVYSEPRPIGTRYLTRNL

SEQ ID NO: 8 - protein, 743 aa, Artificial Sequence
  Description of Artificial Sequence: Synthetic polypeptide
MAADGYLPDWLEDNLSEGIREWWALKPGAPQPKANQQHQDNARGLVLPGYKYLGPGNGLDKGEPVNAADAAALEHDKAYDQQLKAGDNPYLKYNHADAEFQERLKEDTSFGGNLGRAVFQAKKRLLEPLGLVEEAAKTAPGKKRPVEQSPQEPDSSAGIGKSGAQPAKKRLNFGQTGDTESVPDPQPIGEPPAAPSGVGSLTMASGGGAPVADNNEGADGVGSSSGNWHCDSQWLGDRVITTSTRTWALPTYNNHLYKQISNSTSGGSSNDNAYFGYSTPWGYFDFNRFHCHFSPRDWQRLINNNWGFRPKRLNFKLFNIQVKEVTDNNGVKTIANNLTSTVQVFTDSDYQLPYVLGSAHEGCLPPFPADVFMIPQYGYLTLNDGSQAVGRSSFYCLEYFPSQMLRTGNNFQFSYEFENVPFHSSYAHSQSLDRLMNPLIDQYLYYLSRTINGSGQNQQTLKFSVAGPSNMAVQGRNYIPGPSYRQQRVSTTVTQNNNSEFAWPGASSWALNGRNSLMNPGPAMASHKEGEDRFFPLSGSLIFGKQGTGRDNVDADKVMITNEEEIKTTNPVATESYGQVATNHQSAQQAVRTSLAQAQTGWVQNQGILPGMVWQDRDVYLQGPIWAKIPHTDGNFHPSPLMGGFGMKHPPPQILIKNTPVPADPPTAFNKDKLNSFITQYSTGQVSVEIEWELQKENSKRWNPEIQYTSNYYKSNNVEFAVNTEGVYSEPRPIGTRYLTRNL

SEQ ID NO: 9 - protein, 736 aa, Artificial Sequence
  Description of Artificial Sequence: Synthetic polypeptide
MAADGYLPDWLEDNLSEGIREWWALKPGAPQPKANQQHQDNARGLVLPGYKYLGPGNGLDKGEPVNAADAAALEHDKAYDQQLKAGDNPYLKYNHADAEFQERLKEDTSFGGNLGRAVFQAKKRLLEPLGLVEEAAKTAPGKKRPVEQSPQEPDSSAGIGKSGAQPAKKRLNFGQTGDTESVPDPQPIGEPPAAPSGVGSLTMASGGGAPVADNNEGADGVGSSSGNWHCDSQWLGDRVITTSTRTWALPTYNNHLYKQISNSTSGGSSNDNAYFGYSTPWGYFDFNRFHCHFSPRDWQRLINNNWGFRPKRLNFKLFNIQVKEVTDNNGVKTIANNLTSTVQVFTDSDYQLPYVLGSAHEGCLPPFPADVFMIPQYGYLTLNDGSQAVGRSSFYCLEYFPSQMLRTGNNFQFSYEFENVPFHSSYAHSQSLDRLMNPLIDQYLYYLSRTINGSGQNQQTLKFSVAGPSNMAVQGRNYIPGPSYRQQRVSTTVTQNNNSEFAWPGASSWALNGRNSLMNPGPAMASHKEGEDRFFPLSGSLIFGKQGTGRDNVDADKVMITNEEEIKTTNPVATESYGQVATNHQSAQAQAQTGWVQNQGILPGMVWQDRDVYLQGPIWAKIPHTDGNFHPSPLMGGFGMKHPPPQILIKNTPVPADPPTAFNKDKLNSFITQYSTGQVSVEIEWELQKENSKRWNPEIQYTSNYYKSNNVEFAVNTEGVYSEPRPIGTRYLTRNL

SEQ ID NO: 10 - DNA, 2211 bp, Artificial Sequence
  Description of Artificial Sequence: Synthetic polynucleotide
atggctgccgatggttatcttccagattggctcgaggacaacctctctgagggcattcgcgagtggtgggacttgaaacctggagccccgaagcccaaagccaaccagcaaaagcaggacgacggccggggtctggtgcttcctggctacaagtacctcggacccttcaacggactcgacaagggggagcccgtcaacgcggcggacgcagcggccctcgagcacgacaaggcctacgaccagcagctcaaagcgggtgacaatccgtacctgcggtataaccacgccgacgccgagtttcaggagcgtctgcaagaagatacgtcttttgggggcaacctcgggcgagcagtcttccaggccaagaagcgggttctcgaacctctcggtctggttgaggaaggcgctaagacggctcctggaaagaaacgtccggtagagcagtcgccacaagagccagactcctcctcgggcatcggcaagacaggccagcagcccgctaaaaagagactcaattttggtcagactggcgactcagagtcagtccccgatccacaacctctcggagaacctccagcaacccccgctgctgtgggacctactacaatggcttcaggcggtggcgcaccaatggcagacaataacgaaggcgccgacggagtgggtaatgcctcaggaaattggcattgcgattccacatggctgggcgacagagtcatcaccaccagcacccgcacctgggccttgcccacctacaataaccacctctacaagcaaatctccagtgcttcaacgggggccagcaacgacaaccactacttcggctacagcaccccctgggggtattttgatttcaacagattccactgccacttttcaccacgtgactggcagcgactcatcaacaacaattggggattccggcccaagagactcaacttcaaactcttcaacatccaagtcaaggaggtcacgacgaatgatggcgtcacaaccatcgctaataaccttaccagcacggttcaagtcttctcggactcggagtaccagcttccgtacgtcctcggctctgcgcaccagggctgcctccctccgttcccggcggacgtgttcatgattccgcaatacggctacctgacgctcaacaatggcagccaagccgtgggacgttcatccttttactgcctggaatatttcccttctcagatgctgagaacgggcaacaactttaccttcagctacacctttgaggaagtgcctttccacagcagctacgcgcacagccagagcctggaccggctgatgaatcctctcatcgaccaatacctgtattacctgaacagaactcaaaatcagtccggaagtgcccaaaacaaggacttgctgtttagccgtgggtctccagctggcatgtctgttcagcccaaaaactggctacctggaccctgttatcggcagcagcgcgtttctaaaacaaaaacagacaacaacaacagcaattttacctggactggtgcttcaaaatataacctcaatgggcgtgaatccatcatcaaccctggcactgctatggcctcacacaaagacgacgaagacaagttctttcccatgagcggtgtcatgatttttggaaaagagagcgccggagcttcaaacactgcattggacaatgtcatgattacagacgaagaggaaattaaagccactaaccctgtggccaccgaaagatttgggaccgtggcagtcaatttccagagcagcagcacagaccctgcgaccggagatgtgcatgctatgggagcattacctggcatggtgtggcaagatagagacgtgtacctgcagggtcccatttgggccaaaattcctcacacagatggacactttcacccgtctcctcttatgggcggctttggactcaagaacccgcctcctcagatcctcatcaaaaacacgcctgttcctgcgaatcctccggcggagttttcagctacaaagtttgcttcattcatcacccaatactccacaggacaagtgagtgtggaaattgaatgggagctgcagaaagaaaacagcaagcgctggaatcccgaagtgcagtacacatccaattatgcaaaatctgccaacgttgattttactgtggacaacaatggactttatactgagcctcgccccattggcacccgttaccttacccgtcccctgtaa

SEQ ID NO: 11 - protein, 736 aa, Adeno-associated virus 1
MAADGYLPDWLEDNLSEGIREWWDLKPGAPKPKANQQKQDDGRGLVLPGYKYLGPFNGLDKGEPVNAADAAALEHDKAYDQQLKAGDNPYLRYNHADAEFQERLQEDTSFGGNLGRAVFQAKKRVLEPLGLVEEGAKTAPGKKRPVEQSPQEPDSSSGIGKTGQQPAKKRLNFGQTGDSESVPDPQPLGEPPATPAAVGPTTMASGGGAPMADNNEGADGVGNASGNWHCDSTWLGDRVITTSTRTWALPTYNNHLYKQISSASTGASNDNHYFGYSTPWGYFDFNRFHCHFSPRDWQRLINNNWGFRPKRLNFKLFNIQVKEVTTNDGVTTIANNLTSTVQVFSDSEYQLPYVLGSAHQGCLPPFPADVFMIPQYGYLTLNNGSQAVGRSSFYCLEYFPSQMLRTGNNFTFSYTFEEVPFHSSYAHSQSLDRLMNPLIDQYLYYLNRTQNQSGSAQNKDLLFSRGSPAGMSVQPKNWLPGPCYRQQRVSKTKTDNNNSNFTWTGASKYNLNGRESIINPGTAMASHKDDEDKFFPMSGVMIFGKESAGASNTALDNVMITDEEEIKATNPVATERFGTVAVNFQSSSTDPATGDVHAMGALPGMVWQDRDVYLQGPIWAKIPHTDGHFHPSPLMGGFGLKNPPPQILIKNTPVPANPPAEFSATKFASFITQYSTGQVSVEIEWELQKENSKRWNPEVQYTSNYAKSANVDFTVDNNGLYTEPRPIGTRYLTRPL

SEQ ID NO: 12 - DNA, 4718 bp, Adeno-associated virus 1
ttgcccactccctctctgcgcgctcgctcgctcggtggggcctgcggaccaaaggtccgcagacggcagagctctgctctgccggccccaccgagcgagcgagcgcgcagagagggagtgggcaactccatcactaggggtaatcgcgaagcgcctcccacgctgccgcgtcagcgctgacgtaaattacgtcataggggagtggtcctgtattagctgtcacgtgagtgcttttgcgacattttgcgacaccacgtggccatttagggtatatatggccgagtgagcgagcaggatctccattttgaccgcgaaatttgaacgagcagcagccatgccgggcttctacgagatcgtgatcaaggtgccgagcgacctggacgagcacctgccgggcatttctgactcgtttgtgagctgggtggccgagaaggaatgggagctgcccccggattctgacatggatctgaatctgattgagcaggcacccctgaccgtggccgagaagctgcagcgcgacttcctggtccaatggcgccgcgtgagtaaggccccggaggccctcttctttgttcagttcgagaagggcgagtcctacttccacctccatattctggtggagaccacgggggtcaaatccatggtgctgggccgcttcctgagtcagattagggacaagctggtgcagaccatctaccgcgggatcgagccgaccctgcccaactggttcgcggtgaccaagacgcgtaatggcgccggaggggggaacaaggtggtggacgagtgctacatccccaactacctcctgcccaagactcagcccgagctgcagtgggcgtggactaacatggaggagtatataagcgcctgtttgaacctggccgagcgcaaacggctcgtggcgcagcacctgacccacgtcagccagacccaggagcagaacaaggagaatctgaaccccaattctgacgcgcctgtcatccggtcaaaaacctccgcgcgctacatggagctggtcgggtggctggtggaccggggcatcacctccgagaagcagtggatccaggaggaccaggcctcgtacatctccttcaacgccgcttccaactcgcggtcccagatcaaggccgctctggacaatgccggcaagatcatggcgctgaccaaatccgcgcccgactacctggtaggccccgctccgcccgcggacattaaaaccaaccgcatctaccgcatcctggagctgaacggctacgaacctgcctacgccggctccgtctttctcggctgggcccagaaaaggttcgggaagcgcaacaccatctggctgtttgggccggccaccacgggcaagaccaacatcgcggaagccatcgcccacgccgtgcccttctacggctgcgtcaactggaccaatgagaactttcccttcaatgattgcgtcgacaagatggtgatctggtgggaggagggcaagatgacggccaaggtcgtggagtccgccaaggccattctcggcggcagcaaggtgcgcgtggaccaaaagtgcaagtcgtccgcccagatcgaccccacccccgtgatcgtcacctccaacaccaacatgtgcgccgtgattgacgggaacagcaccaccttcgagcaccagcagccgttgcaggaccggatgttcaaatttgaactcacccgccgtctggagcatgactttggcaaggtgacaaagcaggaagtcaaagagttcttccgctgggcgcaggatcacgtgaccgaggtggcgcatgagttctacgtcagaaagggtggagccaacaaaagacccgcccccgatgacgcggataaaagcgagcccaagcgggcctgcccctcagtcgcggatccatcgacgtcagacgcggaaggagctccggtggactttgccgacaggtaccaaaacaaatgttctcgtcacgcgggcatgcttcagatgctgtttccctgcaagacatgcgagagaatgaatcagaatttcaacatttgcttcacgcacgggacgagagactgttcagagtgcttccccggcgtgtcagaatctcaaccggtcgtcagaaagaggacgtatcggaaactctgtgccattcatcatctgctggggcgggctcccgagattgcttgctcggcctgcgatctggtcaacgtggacctggatgactgtgtttctgagcaataaatgacttaaaccaggtatggctgccgatggttatcttccagattggctcgaggacaacctctctgagggcattcgcgagtggtgggacttgaaacctggagccccgaagcccaaagccaaccagcaaaagcaggacgacggccggggtctggtgcttcctggctacaagtacctcggacccttcaacggactcgacaagggggagcccgtcaacgcggcggacgcagcggccctcgagcacgacaaggcctacgaccagcagctcaaagcgggtgacaatccgtacctgcggtataaccacgccgacgccgagtttcaggagcgtctgcaagaagatacgtcttttgggggcaacctcgggcgagcagtcttccaggccaagaagcgggttctcgaacctctcggtctggttgaggaaggcgctaagacggctcctggaaagaaacgtccggtagagcagtcgccacaagagccagactcctcctcgggcatcggcaagacaggccagcagcccgctaaaaagagactcaattttggtcagactggcgactcagagtcagtccccgatccacaacctctcggagaacctccagcaacccccgctgctgtgggacctactacaatggcttcaggcggtggcgcaccaatggcagacaataacgaaggcgccgacggagtgggtaatgcctcaggaaattggcattgcgattccacatggctgggcgacagagtcatcaccaccagcacccgcacctgggccttgcccacctacaataaccacctctacaagcaaatctccagtgcttcaacgggggccagcaacgacaaccactacttcggctacagcaccccctgggggtattttgatttcaacagattccactgccacttttcaccacgtgactggcagcgactcatcaacaacaattggggattccggcccaagagactcaacttcaaactcttcaacatccaagtcaaggaggtcacgacgaatgatggcgtcacaaccatcgctaataaccttaccagcacggttcaagtcttctcggactcggagtaccagcttccgtacgtcctcggctctgcgcaccagggctgcctccctccgttcccggcggacgtgttcatgattccgcaatacggctacctgacgctcaacaatggcagccaagccgtgggacgttcatccttttactgcctggaatatttcccttctcagatgctgagaacgggcaacaactttaccttcagctacacctttgaggaagtgcctttccacagcagctacgcgcacagccagagcctggaccggctgatgaatcctctcatcgaccaatacctgtattacctgaacagaactcaaaatcagtccggaagtgcccaaaacaaggacttgctgtttagccgtgggtctccagctggcatgtctgttcagcccaaaaactggctacctggaccctgttatcggcagcagcgcgtttctaaaacaaaaacagacaacaacaacagcaattttacctggactggtgcttcaaaatataacctcaatgggcgtgaatccatcatcaaccctggcactgctatggcctcacacaaagacgacgaagacaagttctttcccatgagcggtgtcatgatttttggaaaagagagcgccggagcttcaaacactgcattggacaatgtcatgattacagacgaagaggaaattaaagccactaaccctgtggccaccgaaagatttgggaccgtggcagtcaatttccagagcagcagcacagaccctgcgaccggagatgtgcatgctatgggagcattacctggcatggtgtggcaagatagagacgtgtacctgcagggtcccatttgggccaaaattcctcacacagatggacactttcacccgtctcctcttatgggcggctttggactcaagaacccgcctcctcagatcctcatcaaaaacacgcctgttcctgcgaatcctccggcggagttttcagctacaaagtttgcttcattcatcacccaatactccacaggacaagtgagtgtggaaattgaatgggagctgcagaaagaaaacagcaagcgctggaatcccgaagtgcagtacacatccaattatgcaaaatctgccaacgttgattttactgtggacaacaatggactttatactgagcctcgccccattggcacccgttaccttacccgtcccctgtaattacgtgttaatcaataaaccggttgattcgtttcagttgaactttggtctcctgtccttcttatcttatcggttaccatggttatagcttacacattaactgcttggttgcgcttcgcgataaaagacttacgtcatcgggttacccctagtgatggagttgcccactccctctctgcgcgctcgctcgctcggtggggcctgcggaccaaaggtccgcagacggcagagctctgctctgccggccccaccgagcgagcgagcgcgcagagagggagtgggcaa

SEQ ID NO: 13 - DNA, 3131 bp, Artificial Sequence
  Description of Artificial Sequence: Synthetic polynucleotide
gcggccgcgaattcgcccttggctgcgtcaactggaccaatgagaactttcccttcaatgattgcgtcgacaagatggtgatctggtgggaggagggcaagatgacggccaaggtcgtggagtccgccaaggccattctcggcggcagcaaggtgcgcgtggaccaaaagtgcaagtcgtccgcccagatcgaccccacccccgtgatcgtcacctccaacaccaacatgtgcgccgtgattgacgggaacagcaccaccttcgagcaccagcagcctctccaggaccggatgtttaagttcgaactcacccgccgtctggagcacgactttggcaaggtgacaaagcaggaagtcaaagagttcttccgctgggccagtgatcacgtgaccgaggtggcgcatgagttttacgtcagaaagggcggagccagcaaaagacccgcccccgatgacgcggataaaagcgagcccaagcgggcctgcccctcagtcgcggatccatcgacgtcagacgcggaaggagctccggtggactttgccgacaggtaccaaaacaaatgttctcgtcacgcgggcatgcttcagatgctgtttccctgcaaaacgtgcgagagaatgaatcggaatttcaacatttgcttcacacacggggtcagagactgctcagagtgtttccccggcgtgtcagaatctcaaccggtcgtcagaaagaggacgtatcggaaactccgtgcgattcatcatctgctggggcgggctcccgagattgcttgctcggcctgcgatctggtcaacgtggacctggatgactgtgtttctgagcaataaatgacttaaaccaggtatggctgccgatggttatcttccagattggctcgaggacaacctctctgagggcattcgcgagtggtgggcgctgaaacctggagccccgaagcccaaagccaaccagcaaaagcaggacgacggccggggtctggtgcttcctggctacaagtacctcggacccttcaacggactcgacaagggggagcccgtcaacgcggcggacgcagcggccctcgagcacgacaaggcttacgaccagcagctgcaggcgggtgacaatccgtacctgcggtataaccacgccgacgccgagtttcaggagcgtctgcaagaagatacgtcttttgggggcaacctcgggcgagcagtcttccaggccaagaagcgggttctcgaacctctcggtctggttgaggaaggcgctaagacggctcctggaaagaagagaccggtagagccatcaccccagcgttctccagactcctctacgggcatcggcaagaaaggccaacagcccgccagaaaaagactcaattttggtcagactggcgactcagagtcagttccagaccctcaacctctcggagaacctccagcagcgccctctggtgtgggacctaatacaatggctgcaggcggtggcgcaccaatggcagacaataacgaaggcgccgacggagtgggtagttcctcgggaaattggcattgcgattccacatggctgggcgacagagtcatcaccaccagcacccgaacctgggccctgcccacctacaacaaccacctctacaagcaaatctccaacgggacatcgggaggagccaccaacgacaacacctacttcggctacagcaccccctgggggtattttgactttaacagattccactgccacctttcaccacgtgactggcagcgactcatcaacaacaactggggattccgacccaagagactcagcttcaagctcttcaacatccaggtcaaggaggtcacgcagaatgaaggcaccaagaccatcgccaataacctcaccagcaccatccaggtgtttacggactcggagtaccagctgccgtacgttctcggctctgtccaccagggctgcctgcctccgttcccggcggacgtgttcatgattccccagtacggctacctaacactcaacaacggtagtcaggccgtgggacgctcctccttctactgcctggaatactttccttcgcagatgctgagaaccggcaacaacttccagtttacttacaccttcgaggacgtgcctttccacagcagctacgcccacagctagagcttggaccggctgatgaatcctctgattgaccagtacctgtactacttgtctcggactcaaacaacaggaggcacggcaaatacgcagactctgggcttcagccaaggtgggcctaatacaatggccaatcaggcaaagaactggctgccaggaccctgttaccgccaacaacgcgtctcaacgacaaccgggcaaaacaacaatagcaactttgcctggactgctgggaccaaataccatctgaatggaagaaattcattggctaatcctggcatcgctatggcaacacacaaagacgacgaggagcgtttttttcccagtaacgggatcctgatttttggcaaacaaaatgctgccagagacaatgcggattacagcgatgtcatgctcaccagcgaggaagaaatcaaaaccactaaccctgtggctacagaggaatacggtatcgtggcagataacttgcagcagcaaaacacggctcctcaaattggaactgtcaacagccagggggccttacccggtatggtctggcagaaccgggacgtgtacctgcagggtcccatctgggccaagattcctcacacggacggcaacttccacccgtctccgctgatgggcggctttggcctgaaacatcctccgcctcagatcctgatcaagaacacgcctgtacctgcggatcctccgaccaccttcaaccagtcaaagctgaactctttcatcacgcaatacagcaccggacaggtcagcgtggaaattgaatgggagctgcagaaggaaaacagcaagcgctggaaccccgagatccagtacacctccaactactacaaatctataagtgtggactttgctgttaatacagaaggcgtgtactctgaaccccgccccattggcacccgttacctcacccgtaatctgtaattgcctgttaatcaataaaccggttgattcgtttcagttgaactttggtctctgcgaagggcgaattc

SEQ ID NO: 14 - DNA, 255 bp, Adeno-associated virus 10
ggtaattcctccggaaattggcattgcgattccacatggctgggcgacagagtcatcaccaccagcacccgaacctgggtcctgcccacctacaacaaccacatctacaagcaaatctccagcgagacaggagccaccaacgacaaccactacttcggctacagcaccccctgggggtattttgactttaacagattccactgccacttttcaccacgtgactggcagcgactcatcaacaacaactggggattc

SEQ ID NO: 15 - protein, 738 aa, Adeno-associated virus 10
MAADGYLPDWLEDNLSEGIREWWDLKPGAPKPKANQQKQDDGRGLVLPGYKYLGPFNGLDKGEPVNAADAAALEHDKAYDQQLKAGDNPYLRYNHADAEFQERLQEDTSFGGNLGRAVFQAKKRVLEPLGLVEEAAKTAPGKKRPVEPSPQRSPDSSTGIGKKGQQPAKKRLNFGQTGESESVPDPQPIGEPPAGPSGLGSGTMAAGGGAPMADNNEGADGVGSSSGNWHCDSTWLGDRVITTSTRTWALPTYNNHLYKQISNGTSGGSTNDNTYFGYSTPWGYFDFNRFHCHFSPRDWQRLINNNWGFRPKRLSFKLFNIQVKEVTQNEGTKTIANNLTSTIQVFTDSEYQLPYVLGSAHQGCLPPFPADVFMIPQYGYLTLNNGSQAVGRSSFYCLEYFPSQMLRTGNNFEFSYTFEDVPFHSSYAHSQSLDRLMNPLIDQYLYYLSRTQSTGGTQGTQQLLFSQAGPANMSAQAKNWLPGPCYRQQRVSTTLSQNNNSNFAWTGATKYHLNGRDSLVNPGVAMATHKDDEERFFPSSGVLMFGKQGAGRDNVDYSSVMLTSEEEIKTTNPVATEQYGVVADNLQQANTGPIVGNVNSQGALPGMVWQNRDVYLQGPIWAKIPHTDGNFHPSPLMGGFGLKHPPPQILIKNTPVPADPPTTFSQAKLASFITQYSTGQVSVEIEWELQKENSKRWNPEIQYTSNYYKSTNVDFAVNTEGTYSEPRPIGTRYLTRNL

SEQ ID NO: 16 - protein, 738 aa, Adeno-associated virus 10
MAADGYLPDWLEDNLSEGIREWWDLKPGAPKPKANQQKQDDGRGLVLPGYKYLGPFNGLDKGEPVNAADAAALEHDKAYDQQLKAGDNPYLRYNHADAEFQERLQEDTSFGGNLGRAVFQAKKRVLEPLGLVEEGAKTAPGKKRPVEPSPQRSPDSSTGIGKKGQQPAKKRLNFGQTGDSESVPDPQPIGEPPAGPSGLGSGTMAAGGGAPMADNNEGADGVGSSSGNWHCDSTWLGDRVITTSTRTWALPTYNNHLYKQISNGTSGGSTNDNTYFGYSTPWGYFDFNRFHCHFSPRDWQRLINNNWGFRPKRLNFKLFNIQVKEVTQNEGTKTIANNLTSTIQVFTDSEYQLPYVLGSAHQGCLPPFPADVFMIPQYGYLTLNNGSQAVGRSSFYCLEYFPSQMLRTGNNFEFSYQFEDVPFHSSYAHSQSLDRLMNPLIDQYLYYLSRTQSTGGTAGTQQLLFSQAGPNNMSAQAKNWLPGPCYRQQRVSTTLSQNNNSNFAWTGATKYHLNGRDSLVNPGVAMATHKDDEERFFPSSGVLMFGKQGAGKDNVDYSSVMLTSEEEIKTTNPVATEQYGVVADNLQQQNAAPIVGAVNSQGALPGMVWQNRDVYLQGPIWAKIPHTDGNFHPSPLMGGFGLKHPPPQILIKNTPVPADPPTTFSQAKLASFITQYSTGQVSVEIEWELQKENSKRWNPEIQYTSNYYKSTNVDFAVNTDGTYSEPRPIGTRYLTRNL

SEQ ID NO: 17 - DNA, 258 bp, Adeno-associated virus 11
ggtaattcctccggaaattggcattgcgattccacatggctgggcgacagagtcatcaccaccagcacccgaacctgggccctgccaacctacaacaaccacctctacaaacaaatctccagcgcttcaacgggggccagcaacgacaaccactactttggctacagcaccccctgggggtattttgactttaacagattccactgccacttctcaccacgtgactggcagcgactcatcaacaacaactggggattc

SEQ ID NO: 18 - DNA, 255 bp, Adeno-associated virus 12
ggtaattcctccggaaattggcattgcgattccacatggctgggcgaccgagtcattaccaccagcacccggacttgggccctgcccacctacaacaaccacctctacaagcaaatctccagccaatcgggtgccaccaacgacaaccactacttcggctacagcaccccttgggggtattttgatttcaacagattccactgccatttctcaccacgtgactggcagcgactcatcaacaacaactggggattc

SEQ ID NO: 19 - DNA, 2208 bp, Adeno-associated virus 2
atggctgccgatggttatcttccagattggctcgaggacactctctctgaaggaataagacagtggtggaagctcaaacctggcccaccaccaccaaagcccgcagagcggcataaggacgacagcaggggtcttgtgcttcctgggtacaagtacctcggacccttcaacggactcgacaagggagagccggtcaacgaggcagacgccgcggccctcgagcacgacaaagcctacgaccggcagctcgacagcggagacaacccgtacctcaagtacaaccacgccgacgcggagtttcaggagcgccttaaagaagatacgtcttttgggggcaacctcggacgagcagtcttccaggcgaaaaagagggttcttgaacctctgggcctggttgaggaacctgttaagacggctccgggaaaaaagaggccggtagagcactctcctgtggagccagactcctcctcgggaaccggaaaggcgggccagcagcctgcaagaaaaagattgaattttggtcagactggagacgcagactcagtacctgacccccagcctctcggacagccaccagcagccccctctggtctgggaactaatacgatggctacaggcagtggcgcaccaatggcagacaataacgagggcgccgacggagtgggtaattcctcgggaaattggcattgcgattccacatggatgggcgacagagtcatcaccaccagcacccgaacctgggccctgcccacctacaacaaccacctctacaaacaaatttccagccaatcaggagcctcgaacgacaatcactactttggctacagcaccccttgggggtattttgacttcaacagattccactgccacttttcaccacgtgactggcaaagactcatcaacaacaactggggattccgacccaagagactcaacttcaagctctttaacattcaagtcaaagaggtcacgcagaatgacggtacgacgacgattgccaataaccttaccagcacggttcaggtgtttactgactcggagtaccagctcccgtacgtcctcggctcggcgcatcaaggatgcctcccgccgttcccagcagacgtcttcatggtgccacagtatggatacctcaccctgaacaacgggagtcaggcagtaggacgctcttcattttactgcctggagtactttccttctcagatgctgcgtaccggaaacaactttaccttcagctacacttttgaggacgttcctttccacagcagctacgctcacagccagagtctggaccgtctcatgaatcctctcatcgaccagtacctgtattacttgagcagaacaaacactccaagtggaaccaccacgcagtcaaggcttcagttttctcaggccggagcgagtgacattcgggaccagtctaggaactggcttcctggaccctgttaccgccagcagcgagtatcaaagacatctgcggataacaacaacagtgaatactcgtggactggagctaccaagtaccacctcaatggcagagactctctggtgaatccgggcccggccatggcaagccacaaggacgatgaagaaaagttttttcctcagagcggggttctcatctttgggaagcaaggctcagagaaaacaaatgtggacattgaaaaggtcatgattacagacgaagaggaaatcaggacaaccaatcccgtggctacggagcagtatggttctgtatctaccaacctccagagaggcaacagacaagcagctaccgcagatgtcaacacacaaggcgttcttccaggcatggtctggcaggacagagatgtgtaccttcaggggcccatctgggcaaagattccacacacggacggacattttcacccctctcccctcatgggtggattcggacttaaacaccctcctccacagattctcatcaagaacaccccggtacctgcgaatccttcgaccaccttcagtgcggcaaagtttgcttccttcatcacacagtactccacgggacaggtcagcgtggagatcgagtgggagctgcagaaggaaaacagcaaacgctggaatcccgaaattcagtacacttccaactacaacaagtctgttaatgtggactttactgtggacactaatggcgtgtattcagagcctcgccccattggcaccagatacctgactcgtaatctgtaa

SEQ ID NO: 20 - protein, 735 aa, Adeno-associated virus 2 [sequence omitted]

SEQ ID NO: 21 - protein, 621 aa, Adeno-associated virus 2
MPGFYEIVIKVPSDLDGHLPGISDSFVNWVAEKEWELPPDSDMDLNLIEQAPLTVAEKLQRDFLTEWRRVSKAPEALFFVQFEKGESYFHMHVLVETTGVKSMVLGRFLSQIREKLIQRIYRGIEPTLPNWFAVTKTRNGAGGGNKVVDECYIPNYLLPKTQPELQWAWTNMEQYLSACLNLTERKRLVAQHLTHVSQTQEQNKENQNPNSDAPVIRSKTSARYMELVGWLVDKGITSEKQWIQEDQASYISFNAASNSRSQIKAALDNAGKIMSLTKTAPDYLVGQQPVEDISSNRIYKILELNGYDPQYAASVFLGWATKKFGKRNTIWLFGPATTGKTNIAEAIAHTVPFYGCVNWTNENFPFNDCVDKMVIWWEEGKMTAKVVESAKAILGGSKVRVDQKCKSSAQIDPTPVIVTSNTNMCAVIDGNSTTFEHQQPLQDRMFKFELTRRLDHDFGKVTKQEVKDFFRWAKDHVVEVEHEFYVKKGGAKKRPAPSDADISEPKRVRESVAQPSTSDAEASINYADRYQNKCSRHVGMNLMLFPCRQCERMNQNSNICFTHGQKDCLECFPVSESQPVSVVKKAYQKLCYIHHIMGKVPDACTACDLVNVDLDDCIFEQ

SEQ ID NO: 22 - DNA, 4675 bp, Adeno-associated virus 2
ttggccactccctctctgcgcgctcgctcgctcactgaggccgggcgaccaaaggtcgcccgacgcccgggctttgcccgggcggcctcagtgagcgagcgagcgcgcagagagggagtggccaactccatcactaggggttcctggaggggtggagtcgtgacgtgaattacgtcatagggttagggaggtcctgtattagaggtcacgtgagtgttttgcgacattttgcgacaccatgtggtcacgctgggtatttaagcccgagtgagcacgcagggtctccattttgaagcgggaggtttgaacgcgcagccgccatgccggggttttacgagattgtgattaaggtccccagcgaccttgacgggcatctgcccggcatttctgacagctttgtgaactgggtggccgagaaggaatgggagttgccgccagattctgacatggatctgaatctgattgagcaggcacccctgaccgtggccgagaagctgcagcgcgactttctgacggaatggcgccgtgtgagtaaggccccggaggcccttttctttgtgcaatttgagaagggagagagctacttccacatgcacgtgctcgtggaaaccaccggggtgaaatccatggttttgggacgtttcctgagtcagattcgcgaaaaactgattcagagaatttaccgcgggatcgagccgactttgccaaactggttcgcggtcacaaagaccagaaatggcgccggaggcgggaacaaggtggtggatgagtgctacatccccaattacttgctccccaaaacccagcctgagctccagtgggcgtggactaatatggaacagtatttaagcgcctgtttgaatctcacggagcgtaaacggttggtggcgcagcatctgacgcacgtgtcgcagacgcaggagcagaacaaagagaatcagaatcccaattctgatgcgccggtgatcagatcaaaaacttcagccaggtacatggagctggtcgggtggctcgtggacaaggggattacctcggagaagcagtggatccaggaggaccaggcctcatacatctccttcaatgcggcctccaactcgcggtcccaaatcaaggctgccttggacaatgcgggaaagattatgagcctgactaaaaccgcccccgactacctggtgggccagcagcccgtggaggacatttccagcaatcggatttataaaattttggaactaaacgggtacgatccccaatatgcggcttccgtctttctgggatgggccacgaaaaagttcggcaagaggaacaccatctggctgtttgggcctgcaactaccgggaagaccaacatcgcggaggccatagcccacactgtgcccttctacgggtgcgtaaactggaccaatgagaactttcccttcaacgactgtgtcgacaagatggtgatctggtgggaggaggggaagatgaccgccaaggtcgtggagtcggccaaagccattctcggaggaagcaaggtgcgcgtggaccagaaatgcaagtcctcggcccagatagacccgactcccgtgatcgtcacctccaacaccaacatgtgcgccgtgattgacgggaactcaacgaccttcgaacaccagcagccgttgcaagaccggatgttcaaatttgaactcacccgccgtctggatcatgactttgggaaggtcaccaagcaggaagtcaaagactttttccggtgggcaaaggatcacgtggttgaggtggagcatgaattctacgtcaaaaagggtggagccaagaaaagacccgcccccagtgacgcagatataagtgagcccaaacgggtgcgcgagtcagttgcgcagccatcgacgtcagacgcggaagcttcgatcaactacgcagacaggtaccaaaacaaatgttctcgtcacgtgggcatgaatctgatgctgtttccctgcagacaatgcgagagaatgaatcagaattcaaatatctgcttcactcacggacagaaagactgtttagagtgctttcccgtgtcagaatctcaacccgtttctgtcgtcaaaaaggcgtatcagaaactgtgctacattcatcatatcatgggaaaggtgccagacgcttgcactgcctgcgatctggtcaatgtggatttggatgactgcatctttgaacaataaatgatttaaatcaggtatggctgccgatggttatcttccagattggctcgaggacactctctctgaaggaataagacagtggtggaagctcaaacctggcccaccaccaccaaagcccgcagagcggcataaggacgacagcaggggtcttgtgcttcctgggtacaagtacctcggacccttcaacggactcgacaagggagagccggtcaacgaggcagacgccgcggccctcgagcacgtacaaagcctacgaccggcagctcgacagcggagacaacccgtacctcaagtacaaccacgccgacgcggagtttcaggagcgccttaaagaagatacgtcttttgggggcaacctcggacgagcagtcttccaggcgaaaaagagggttcttgaacctctgggcctggttgaggaacctgttaagacggctccgggaaaaaagaggccggtagagcactctcctgtggagccagactcctcctcgggaaccggaaaggcgggccagcagcctgcaagaaaaagattgaattttggtcagactggagacgcagactcagtacctgacccccagcctctcggacagccaccagcagccccctctggtctgggaactaatacgatggctacaggcagtggcgcaccaatggcagacaataacgagggcgccgacggagtgggtaattcctccggaaattggcattgcgattccacatggatgggcgacagagtcatcaccaccagcacccgaacctgggccctgcccacctacaacaaccacctctacaaacaaatttccagccaatcaggagcctcgaacgacaatcactactttggctacagcaccccttgggggtattttgacttcaacagattccactgccacttttcaccacgtgactggcaaagactcatcaacaacaactggggattccgacccaagagactcaacttcaagctctttaacattcaagtcaaagaggtcacgcagaatgacggtacgacgacgattgccaataaccttaccagcacggttcaggtgtttactgactcggagtaccagctcccgtacgtcctcggctcggcgcatcaaggatgcctcccgccgttcccagcagacgtcttcatggtgccacagtatggatacctcaccctgaacaacgggagtcaggcagtaggacgctcttcattttactgcctggagtactttccttctcagatgctgcgtaccggaaacaactttaccttcagctacacttttgaggacgttcctttccacagcagctacgctcacagccagagtctggaccgtctcatgaatcctctcatcgaccagtacctgtattacttgagcagaacaaacactccaagtggaaccaccacgcagtcaaggcttcagttttctcaggccggagcgagtgacattcgggaccagtctaggaactggcttcctggaccctgttaccgccagcagcgagtatcaaagacatctgcggataacaacaacagtgaatactcgtggactggagctaccaagtaccacctcaatggcagagactctctggtgaatccggccatggcaagccacaaggacgatgaagaaaagttttttcctcagagcggggttctcatctttgggaagcaaggctcagagaaaacaaatgtgaacattgaaaaggtcatgattacagacgaagaggaaatcggaacaaccaatcccgtggctacggagcagtatggttctgtatctaccaacctccagagaggcaacagacaagcagctaccgcagatgtcaacacacaaggcgttcttccaggcatggtctggcaggacagagatgtgtaccttcaggggcccatctgggcaaagattccacacacggacggacattttcacccctctcccctcatgggtggattcggacttaaacaccctcctccacagattctcatcaagaacaccccggtacctgcgaatccttcgaccaccttcagtgcggcaaagtttgcttccttcatcacacagtactccacgggacacggtcagcgtggagatcgagtgggagctgcagaaggaaaacagcaaacgctggaatcccgaaattcagtacacttccaactacaacaagtctgttaatcgtggacttaccgtggatactaatggcgtgtattcagagcctcgccccattggcaccagatacctgactcgtaatctgtaattgcttgttaatcaataaaccgtttaattcgtttcagttgaactttggtctctgcgtatttctttcttatctagtttccatggctacgtagataagtagcatggcgggttaatcattaactacaaggaacccctagtgatggagttggccactccctctctgcgcgctcgctcgctcactgaggccgggcgaccaaaggtcgcccgacgcccgggctttgcccgggcggcctcagtgagcgagcgagcgcgcagagagggagtggccaa

SEQ ID NO: 23 - DNA, 4679 bp, Adeno-associated virus 2
ttggccactccctctctgcgcgctcgctcgctcactgaggccgggcgaccaaaggtcgcccgacgcccgggctttgcccgggcggcctcagtgagcgagcgagcgcgcagagagggagtggccaactccatcactaggggttcctggaggggtggagtcgtgacgtgaattacgtcatagggttagggaggtcctgtattagaggtcacgtgagtgttttgcgacattttgcgacaccatgtggtcacgctgggtatttaagcccgagtgagcacgcagggtctccattttgaagcgggaggtttgaacgcgcagccgccatgccggggttttacgagattgtgattaaggtccccagcgaccttgacgggcatctgcccggcatttctgacagctttgtgaactgggtggccgagaaggaatgggagttgccgccagattctgacatggatctgaatctgattgagcaggcacccctgaccgtggccgagaagctgcagcgcgactttctgacggaatggcgccgtgtgagtaaggccccggaggcccttttctttgtgcaatttgagaagggagagagctacttccacatgcacgtgctcgtggaaaccaccggggtgaaatccatggttttgggacgtttcctgagtcagattcgcgaaaaactgattcagagaatttaccgcgggatcgagccgactttgccaaactggttcgcggtcacaaagaccagaaatggcgccggaggcgggaacaaggtggtggatgagtgctacatccccaattacttgctccccaaaacccagcctgagctccagtgggcgtggactaatatggaacagtatttaagcgcctgtttgaatctcacggagcgtaaacggttggtggcgcagcatctgacgcacgtgtcgcagacgcaggagcagaacaaagagaatcagaatcccaattctgatgcgccggtgatcagatcaaaaacttcagccaggtacatggagctggtcgggtggctcgtggacaaggggattacctcggagaagcagtggatccaggaggaccaggcctcatacatctccttcaatgcggcctccaactcgcggtcccaaatcaaggctgccttggacaatgcgggaaagattatgagcctgactaaaaccgcccccgactacctggtgggccagcagcccgtggaggacatttccagcaatcggatttataaaattttggaactaaacgggtacgatccccaatatgcggcttccgtctttctgggatgggccacgaaaaagttcggcaagaggaacaccatctggctgtttgggcctgcaactaccgggaagaccaacatcgcggaggccatagcccacactgtgcccttctacgggtgcgtaaactggaccaatgagaactttcccttcaacgactgtgtcgacaagatggtgatctggtgggaggaggggaagatgaccgccaaggtcgtggagtcggccaaagccattctcggaggaagcaaggtgcgcgtggaccagaaatgcaagtcctcggcccagatagacccgactcccgtgatcgtcacctccaacaccaacatgtgcgccgtgattgacgggaactcaacgaccttcgaacaccagcagccgttgcaagaccggatgttcaaatttgaactcacccgccgtctggatcatgactttgggaaggtcaccaagcaggaagtcaaagactttttccggtgggcaaaggatcacgtggttgaggtggagcatgaattctacgtcaaaaagggtggagccaagaaaagacccgcccccagtgacgcagatataagtgagcccaaacgggtgcgcgagtcagttgcgcagccatcgacgtcagacgcggaagcttcgatcaactacgcagacaggtaccaaaacaaatgttctcgtcacgtgggcatgaatctgatgctgtttccctgcagacaatgcgagagaatgaatcagaattcaaatatctgcttcactcacggacagaaagactgtttagagtgctttcccgtgtcagaatctcaacccgtttctgtcgtcaaaaaggcgtatcagaaactgtgctacattcatcatatcatgggaaaggtgccagacgcttgcactgcctgcgatctggtcaatgtggatttggatgactgcatctttgaacaataaatgatttaaatcaggtatggctgccgatggttatcttccagattggctcgaggacactctctctgaaggaataagacagtggtggaagctcaaacctggcccaccaccaccaaagcccgcagagcggcataaggacgacagcaggggtcttgtgcttcctgggtacaagtacctcggacccttcaacggactcgacaagggagagccggtcaacgaggcagacgccgcggccctcgagcacgacaaagcctacgaccggcagctcgacagcggagacaacccgtacctcaagtacaaccacgccgacgcggagtttcaggagcgccttaaagaagatacgtcttttgggggcaacctcggacgagcagtcttccaggcgaaaaagagggttcttgaacctctgggcctggttgaggaacctgttaagacggctccgggaaaaaagaggccggtagagcactctcctgtggagccagactcctcctcgggaaccggaaaggcgggccagcagcctgcaagaaaaagattgaattttggtcagactggagacgcagactcagtacctgacccccagcctctcggacagccaccagcagccccctctggtctgggaactaatacgatggctacaggcagtggcgcaccaatggcagacaataacgagggcgccgacggagtgggtaattcctccggaaattggcattgcgattccacatggatgggcgacagagtcatcaccaccagcacccgaacctgggccctgcccacctacaacaaccacctctacaaacaaatttccagccaatcaggagcctcgaacgacaatcactactttggctacagcaccccttgggggtattttgacttcaacagattccactgccacttttcaccacgtgactggcaaagactcatcaacaacaactggggattccgacccaagagactcaacttcaagctctttaacattcaagtcaaagaggtcacgcagaatgacggtacgacgacgattgccaataaccttaccagcacggttcaggtgtttactgactcggagtaccagctcccgtacgtcctcggctcggcgcatcaaggatgcctcccgccgttcccagcagacgtcttcatggtgccacagtatggatacctcaccctgaacaacgggagtcaggcagtaggacgctcttcattttactgcctggagtactttccttctcagatgctgcgtaccggaaacaactttaccttcagctacacttttgaggacgttcctttccacagcagctacgctcacagccagagtctggaccgtctcatgaatcctctcatcgaccagtacctgtattacttgagcagaacaaacactccaagtggaaccaccacgcagtcaaggcttcagttttctcaggccggagcgagtgacattcgggaccagtctaggaactggcttcctggaccctgttaccgccagcagcgagtatcaaagacatctgcggataacaacaacagtgaatactcgtggactggagctaccaagtaccacctcaatggcagagactctctggtgaatccgggcccggccatggcaagccacaaggacgatgaagaaaagttttttcctcagagcggggttctcatctttgggaagcaaggctcagagaaaacaaatgtggacattgaaaaggtcatgattacagacgaagaggaaatcaggacaaccaatcccgtggctacggagcagtatggttctgtatctaccaacctccagagaggcaacagacaagcagctaccgcagatgtcaacacacaaggcgttcttccaggcatggtctggcaggacagagatgtgtaccttcaggggcccatctgggcaaagattccacacacggacggacattttcacccctctcccctcatgggtggattcggacttaaacaccctcctccacagattctcatcaagaacaccccggtacctgcgaatccttcgaccaccttcagtgcggcaaagtttgcttccttcatcacacagtactccacgggacaggtcagcgtggagatcgagtgggagctgcagaaggaaaacagcaaacgctggaatcccgaaattcagtacacttccaactacaacaagtctgttaatgtggactttactgtggacactaatggcgtgtattcagagcctcgccccattggcaccagatacctgactcgtaatctgtaattgcttgttaatcaataaaccgtttaattcgtttcagttgaactttggtctctgcgtatttctttcttatctagtttccatggctacgtagataagtagcatggcgggttaatcattaactacaaggaacccctagtgatggagttggccactccctctctgcgcgctcgctcgctcactgaggccgggcgaccaaaggtcgcccgacgcccgggctttgcccgggcggcctcagtgagcgagcgagcgcgcagagagggagtggccaa

SEQ ID NO: 24 - protein, 725 aa, Adeno-associated virus 5
MAADGYLPDWLEDTLSEGIRQWWKLKPGPPPPKPAERHKDDSRGLVLPGYKYLGPFNGLDKGEPVNEADAAALEHDKAYDRQLDSGDNPYLKYNHADAEFQERLKEDTSFGGNLGRAVFQAKKRVLEPFGLVEEGAKTAPTGKRIDDHFPKRKKARTEEDSKPSTSSDAEAGPSGSQQLQIPAQPASSLGADTMSAGGGGPLGDNNQGADGVGNASGDWHCDSTWMGDRVVTKSTRTWVLPSYNNHQYREIKSGSVDGSNANAYFGYSTPWGYFDFNRFHSHWSPRDWQRLINNYWGFRPRSLRVKIFNIQVKEVTVQDSTTTIANNLTSTVQVFTDDDYQLPYVVGNGTEGCLPAFPPQVFTLPQYGYATLNRDNTENPTERSSFFCLEYFPSKMLRTGNNFEFTYNFEEVPFHSSFAPSQNLFKLANPLVDQYLYRFVSTNNTGGVQFNKNLAGRYANTYKNWFPGPMGRTQGWNLGSGVNRASVSAFATTNRMELEGASYQVPPQPNGMTNNLQGSNTYALENTMIFNSQPANPGTTATYLEGNMLITSESETQPVNRVAYNVGGQMATNNQSSTTAPTTGTYNLQEIVPGSVWMERDVYLQGPIWAKIPETGAHFHPSPAMGGFGLKHPPPMMLIKNTPVPGNITSFSDVPVSSFITQYSTGQVTVEMEWELKKENSKRWNPEIQYTNNYNDPQFVDFAPDSTGEYRTTRPIGTRYLTRPL

SEQ ID NO: 25 - protein, 644 aa, Artificial Sequence
  Description of Artificial Sequence: Synthetic polypeptide
  MOD_RES (434)..(434): Any amino acid
KAYDQQLKAGDNPYLRYNHADAEFQERLQEDTSFGGNLGRAVFQAKKRVLEPLGLVETPAKTAPGKKRPVDSPDSTSGIGKKGQQPAKKRLNFGQTGDSESVPDPQPIGEPPAGPSGLGSGTMAAGGGAPMADNNEGADGVGNASGNWHCDSTWLGDRVITTSTRTWALPTYNNHLYKQISSQSAGSTNDNVYFGYSTPWGYFDFNRFHCHFSPRDWQRLINNNWGFRPKKLNFKLFNIQVKEVTTNDGVTTIANNLTSTVQVFSDSEYQLPYVLGSAHQGCLPPFPADVFMIPQYGYLTLNNGSQSVGRSSFYCLEYFPSQMLRTGNNFTFSYTFEDVPFHSSYAHSQSLDRLMNPLIDQYLYYLARTQSNAGGTAGNRELQFYQGGPTTMAEQAKNWLPGPCFRQQRVSKTLDQNNNSNFAWTGATKYHLNXRNSLVNPGVAMATHKDDEERFFPSSGVLIFGKTGAANKTTLENVLMTNEEEIRPTNPVATEEYGIVSSNLQAASTAAQTQVVNNQGALPGMVWQNRDVYLQGPIWAKIPHTDGNFHPSPLMGGFGLKHPPPQILIKNTPVPANPPEVFTPAKFASFITQYSTGQVSVEIEWELQKENSKRWNPEIQYTSNFDKQTGVDFAVDSQGVYSEP

SEQ ID NO: 26 - DNA, 1933 bp, Artificial Sequence
  Description of Artificial Sequence: Synthetic polynucleotide
caaggcctacgaccagcagctcaaagcgggtgacaatccgtacctgcggtataaccacgccgacgccgagtttcaggagtgtcttcaagaagatacgtcttttgggggcaacctcgggcgagcagtcttccaggccaaaaagcgggttctcgaacctcttggtctggttgagacgccagctaagacggcacctggaaagaagcgaccggtagactcgccagactccacctcgggcatcggcaagaaaggccagcagcccgcgaaaaagagactcaactttgggcagactggcgactcagagtcagtccccgaccctcaaccaatcggagaaccaccagcaggcccctctggtctgggatctggtacaatggttgcaggcggtggcgcaccaatggctgacaataacgagggcgccgacggagtgggtaatgcctcaggaaattggcattgcgattccacatggctgggcgacagagtcatcaccaccagcacccgaacctgggccctgcccacctacaacaaccacctctacaagcaaatctccagtcagtcagcagggagcaccaacgataacgtctatttcggctacagcaccccctgggggtattttgacttcaacagattccattgccacttctcaccacgtgactggcagcgacttatcaacaacaactggggattccggcccaagaagctcaacttcaagctcttcaacatccaggtcaaggaggtcacgacgaatgacggtgtcacaaccatcgctaataaccttaccagcacggttcaggtcttttcggactcggaatatcaactgccgtacgtcctcggctccgcgcaccagggctgcctgcctccgttcccggcagacgtgttcatgattccgcagtacggatacctgactctgaacaatggcagccaatcggtaggccgttcctccttctactgcctggagtactttccttctcagatgctgagaacgggcaacaacttcacctttagctacaccttcgaggacgtgcctttccacagcagctacgcgcacagccagagtctggaccggctgatgaatcccctcatcgaccagtacctgtactacttggccagaacacagagcaacgcaggaggtactgctggcaatcgggaactgcagttttatcagggcggacctaccaccatggccgaacaagcaaagaactggctgcccggaccttgcttccggcaacagagagtatccaagacgctggatcaaaataacaacagcaactttgcctggactggtgccacaaaataccatttaaatggaagaaattcattggttaatcccggtgtcgccatggcaacccacaaggacgacgaggaacgcttctccccttcgagcggagttctaatttttggcaaaactggagcagctaataaaactacattagaaaacgtgctcatgacaaatgaagaagaaattcgtcctaccaacccggtagctaccgaggaatacgggattgtaagcagcaacttgcaggcggctagcaccgcagcccagacacaagttgttaacaaccagggagccttacctggcatggtctggcagaaccgggacgtgtacctgcaaggtcccatttgggccaagattcctcacacggacggcaactttcacccgtctcctctaatgggtggctttggactgaaacacccgcctccccagatcctgatcaaaaacacgccggtacctgctaatcctccagaagtgtttactcctgccaagtttgcttccttcatcacgcagtacagcaccgggcaagtcagcgttgagatcgagtgggagctgcagaaagagaacagcaagcgctggaacccagagattcagtacacctccaactttgacaaacagactggagtggactttgctgttgacagccagggtgtttactctgagcct

SEQ ID NO: 27 - protein, 644 aa, Artificial Sequence
  Description of Artificial Sequence: Synthetic polypeptide
KAYDQQLKAGDNPYLRYNHADAEFQECLQEDTSFGGNLGRAVFQAKKRVLEPLGLVETPAKTAPGKKRPVDSPDSTSGIGKKGQQPAKKRLNFGQTGDSESVPDPQPIGEPPAGPSGLGSGTMVAGGGAPMADNNEGADGVGNASGNWHCDSTWLGDRVITTSTRTWALPTYNNHLYKQISSQSAGSTNDNVYFGYSTPWGYFDFNRFHCHFSPRDWQRLINNNWGFRPKKLNFKLFNIQVKEVTTNDGVTTIANNLTSTVQVFSDSEYQLPYVLGSAHQGCLPPFPADVFMIPQYGYLTLNNGSQSVGRSSFYCLEYFPSQMLRTGNNFTFSYTFEDVPFHSSYAHSQSLDRLMNPLIDQYLYYLARTQSNAGGTAGNRELQFYQGGPTTMAEQAKNWLPGPCFRQQRVSKTLDQNNNSNFAWTGATKYHLNGRNSLVNPGVAMATHKDDEERFSPSSGVLIFGKTGAANKTTLENVLMTNEEEIRPTNPVATEEYGIVSSNLQAASTAAQTQVVNNQGALPGMVWQNRDVYLQGPIWAKIPHTDGNFHPSPLMGGFGLKHPPPQILIKNTPVPANPPEVFTPAKFASFITQYSTGQVSVEIEWELQKENSKRWNPEIQYTSNFDKQTGVDFAVDSQGVYSEP

SEQ ID NO: 28 - DNA, 1933 bp, Artificial Sequence
  Description of Artificial Sequence: Synthetic polynucleotide
caaggcctacgaccagcagctcaaagcgggtgacaatccgtacctgcggtataaccacgccgacgccgagtttcaggagcgtcttcaagaagatacgtcttttgggggcaacctcgggcgagcagtcttccaggccaaaaagcgggttctcgaacctcttggtctggttgagacgccagctaagacggcacctggaaagaagcgaccggtagactcgccagactccacctcgggcatcggcaagaaaggccagcagcccgcgaaaaagagactcaactttgggcagactggcgactcagagccagtccccgaccctcaaccaatcggagaaccaccagcaggcccctctggtctgggatctggtacaatggctgcaggcggtggcgcaccaatggctgacaataacgagggcgccgacggagtgggtaatgcctcaggaaattggcattgcgattccacacggctgggcgacagagtcatcaccaccagcacccgaacctgggccctgcccacctacaacaaccacctctacaagcaaatctccagtcagtcagcagggagcaccaacgataacgtctatttcggctacagcaccccctgggggtattttgacttcaacagattccattgccacttctcaccacgtgactggcagcgacttatcaacaacaactggggattccggcccaagaagctcaacttcaagctcttcaacatccaggtcaaggaggtcacgacgaatgacggcgtcacaaccatcgctaataaccttaccagcacggttcaggtcttttcggactcggaatatcaactgccgtacgtcctcggctccgcgcaccagggctgcctgcctccgttcccggcagacgtgttcatgattccgcagtacggatacctgactctgaacaatggcagccaatcggtaggccgttcctccttctactgcctggagtactttccttctcagatgctgagaacgggcaacaacttcacctttagctacaccttcgaggacgtgcctttccacagcagctacgcgcacagccagagtctgggccggctgatgaatcccctcatcgaccagtacctgtactacttggccagaacacagagcaacgcaggaggtactgctggcaatcgggaactgcagttttatcagggcggacctaccaccatggccgaacaagcaaagaactggctgcccggaccttgcttccggcaacagagagtatccaagacgctggatcaaaataacaacagcaactttgcctggactggtgccacaaaataccatttaaatggaagaaattcattggttaatcccggtgtcgccatggcaacccacaaggacgacgaggaacgcttcttcccttcgagcggagttctaatttttggcaaaactggagcagctaataaaactacattagaaaacgtgctcatgacaaatgaagaagaaattcgtcctaccaacccggtagctaccgaggaatacgggattgtaagcagcaacttgcaggcggctagcaccgcagcccagacacaagttgttaacaaccagggagccttacctggcatggtctggcagaaccgggacgtgtacctgcaaggtcccatttgggccaagattcctcacacggacggcaactttcacccgtctcctctaatgggtggctttggactgaaacacccgcctccccagatcctgatcaaaaacacaccggtacctgctaatcctccagaagtgtttactcctgccaagtttgcttccttcatcacgcagtacagcaccgggcaagtcagcgttgagatcgaatgggagctgcagaaagagaacagcaagcgctggaacccagagattcagtacacctccaactttgacaaacagactggagtggactttgctgttgacagccagggtgtttactctgagcct

SEQ ID NO: 29 - protein, 644 aa, Artificial Sequence
  Description of Artificial Sequence: Synthetic polypeptide
KAYDQQLKAGDNPYLRYNHADAEFQERLQEDTSFGGNLGRAVFQAKKRVLEPLGLVETPAKTAPGKKRPVDSPDSTSGIGKKGQQPAKKRLNFGQTGDSEPVPDPQPIGEPPAGPSGLGSGTMAAGGGAPMADNNEGADGVGNASGNWHCDSTRLGDRVITTSTRTWALPTYNNHLYKQISSQSAGSTNDNVYFGYSTPWGYFDFNRFHCHFSPRDWQRLINNNWGFRPKKLNFKLFNIQVKEVTTNDGVTTIANNLTSTVQVFSDSEYQLPYVLGSAHQGCLPPFPADVFMIPQYGYLTLNNGSQSVGRSSFYCLEYFPSQMLRTGNNFTFSYTFEDVPFHSSYAHSQSLGRLMNPLIDQYLYYLARTQSNAGGTAGNRELQFYQGGPTTMAEQAKNWLPGPCFRQQRVSKTLDQNNNSNFAWTGATKYHLNGRNSLVNPGVAMATHKDDEERFFPSSGVLIFGKTGAANKTTLENVLMTNEEEIRPTNPVATEEYGIVSSNLQAASTAAQTQVVNNQGALPGMVWQNRDVYLQGPIWAKIPHTDGNFHPSPLMGGFGLKHPPPQILIKNTPVPANPPEVFTPAKFASFITQYSTGQVSVEIEWELQKENSKRWNPEIQYTSNFDKQTGVDFAVDSQGVYSEP

SEQ ID NO: 30 - DNA, 1933 bp, Artificial Sequence; identical to SEQ ID NO: 28
  Description of Artificial Sequence: Synthetic polynucleotide

SEQ ID NO: 31 - protein, 644 aa, Artificial Sequence; identical to SEQ ID NO: 29
  Description of Artificial Sequence: Synthetic polypeptide

SEQ ID NO: 32 - DNA, 1933 bp, Artificial Sequence
  Description of Artificial Sequence: Synthetic polynucleotide
caaggcctacgaccagcagctcaaagcgggtgacaatccgtacctgcggtataaccacgccgacgccgagtttcaggagcgtcttcaagaagatacgtcttttgggggcaacctcgggcgagcagtcttccaggccaaaaagcgggttctcgaacctcttggtctggttgagacgccagctaagacggcacctggaaagaagcgaccggtagactcgccagactccacctcgggcatcggcaagaaaggccagcagcccgcgaaaaagagactcaactttgggcagactggcgactcagagtcagtccccgaccctcaaccaatcggagaaccaccagcaggcccctctggtctgggatctggtacaatggctgcaggcggtggcgcaccaatggctgacaatagcgagggcgccgacggagtgggtaatgcctcaggaaattggcattgcgattccacatggctgggcgacagagtcatcaccaccagcacccgaacctgggccctgcccacctacaacaaccacctctacaagcaaatctccagtcagtcagcagggagcaccaacgataacgtctatttcggctacagcaccccctgggggtattttgacttcaacagattccattgccacttctcaccacgtgactggcagcgacttatcaacaacaactggggattccggcccaagaagctcaacttcaagctcttcaacatccaggtcaaggaggtcacgacgaatgacggtgtcacaaccatcgctaataaccttaccagcacggttcaggtcttttcggactcggaatatcaactgccgtacgtcctcggctccgcgcaccagggctgcctgcctccgttcccggcagacgtgttcatgattccgcagtacggatacctgactctgaacaatggcagccaatcggtaggccgttcctccttctactgcctggagtactttccttctcagatgctgagaacgggcaacaacttcacctttagctacaccttcgaggacgtgcctttccacagcagctacgcgcacagccagagtctggaccggctgatgaatcccctcatcgaccagtacctgtactacttggccagaacacagagcaacgcaggaggtactgctggcaatcgggaactgcagttttatcagggcggacctaccaccatggccgaacaagcaaagaactggctgcccggaccttgcttccggcaacagagagtatccaagacgctggatcaaaataacaacagcaactttgcctggactggtgccacaaaataccatttaaatggaagaaattcattggttaatcccggtgtcgccatggcaacccacaaggacgacgaggaacgcttcttcccttcgagcggagttctaatttttggcaaaactggagcagctaataaaactacattagaaaacgtgctcatgacaaatgaagaagaaattcgtcctaccaacccggtagctaccgaggaatacgggattgtaagcagcaacttgcaggcggctagcaccgcagcccagacacaagttgttaacaaccagggagccttacctggcatggtctggcagaaccgggacgtgtacctgcaaggtcccatttgggccaagattcctcacacggacggcaactttcacccgtctcctctaatgggtggctttggactgaaacacccgcctccccagatcctgatcaaaaacacaccggtacctgctaatcctccagaagtgtttactcctgccaagcttgcttccttcatcacgcagtacagcaccgggcaagtcagcgttgagatcgagtgggagctgcagaaagagaacagcaagcgctggaacccagagattcagtacacctccaactttgacaaacagactggagtggactttgctgttgacagccagggtgtttactctgagcct

SEQ ID NO: 33 - protein, 644 aa, Artificial Sequence
  Description of Artificial Sequence: Synthetic polypeptide
KAYDQQLKAGDNPYLRYNHADAEFQERLQEDTSFGGNLGRAVFQAKKRVLEPLGLVETPAKTAPGKKRPVDSPDSTSGIGKKGQQPAKKRLNFGQTGDSESVPDPQPIGEPPAGPSGLGSGTMAAGGGAPMADNSEGADGVGNASGNWHCDSTWLGDRVITTSTRTWALPTYNNHLYKQISSQSAGSTNDNVYFGYSTPWGYFDFNRFHCHFSPRDWQRLINNNWGFRPKKLNFKLFNIQVKEVTTNDGVTTIANNLTSTVQVFSDSEYQLPYVLGSAHQGCLPPFPADVFMIPQYGYLTLNNGSQSVGRSSFYCLEYFPSQMLRTGNNFTFSYTFEDVPFHSSYAHSQSLDRLMNPLIDQYLYYLARTQSNAGGTAGNRELQFYQGGPTTMAEQAKNWLPGPCFRQQRVSKTLDQNNNSNFAWTGATKYHLNGRNSLVNPGVAMATHKDDEERFFPSSGVLIFGKTGAANKTTLENVLMTNEEEIRPTNPVATEEYGIVSSNLQAASTAAQTQVVNNQGALPGMVWQNRDVYLQGPIWAKIPHTDGNFHPSPLMGGFGLKHPPPQILIKNTPVPANPPEVFTPAKLASFITQYSTGQVSVEIEWELQKENSKRWNPEIQYTSNFDKQTGVDFAVDSQGVYSEP

SEQ ID NO: 34 - DNA, 1933 bp, Artificial Sequence
  Description of Artificial Sequence: Synthetic polynucleotide
caaggcctacgaccagcagctcaaagcgggtgacaatccgtacctgcggtataaccacgccgacgccgagtttcaggagcgtcttcaagaagatacgtcttttgggggcaacctcgggcgagcagtcttccaggccaaaaagcgggttctcgaacctcttggtctggttgagacgccagctaagacggcacctggaaagaagcgaccggtagactcgccagactccacctcgggcatcggcaagaaaggccagcagcccgcgaaaaagagactcaactttgggcagactggcgactcagagtcagtccccgaccctcaaccaatcggagaaccaccagcaggcccctctggtctgggatctggtacaatggctgcaggcggtggcgcaccaatggctgacaataacgagggcgccgacggagtgggtaatgcctcaggaaattggcattgcgattccacatggctgggcgacagagtcatcaccaccagcacccgaacctgggccctgcccacctacaacaaccacctctacaagcaaatctccagtcagtcagcagggagcaccaacgataacgtctatttcggctacagcaccccctgggggtattttgacttcaacagattccattgccacttctcaccacgtgactggcagcgacttatcaacaacaactggggattccggcccaagaagctcaacttcaagctcttcaacatccaggtcaaggaggtcacgacgaatgacggcgtcacaaccatcgctaataaccttaccagcacggttcaggtcttttcggacccggaatatcaactgccgtacgtcctcggctccgcgcaccagggctgcctgcctccgttcccggcagacgtgttcatgattccgcagtacggatacctgactctgaacaatggcagccaatcggtaggccgttcctccttctactgcctggagtactttccttctcagatgctgagaacgggcaacaacttcacctttagctacaccttcgaggacgtgcctttccacagcagctacgcgcacagccagagtctggaccggctgatgaatcccctcatcgaccagtacctgtactacttggccagaacacagagcaacgcaggaggtactgctggcaatcgggaactgcagttttatcagggcggacctaccaccatggccgaacaagcaaagaactggctgcccggaccttgcttccggcaacagagagtatccaagacgctggatcaaaataacaacagcaactttgcctggactggtgccacaaaataccatttaaatggaagaaattcattggttaatcccggtgtcgccatggcaacccacaaggacgacgaggaacgcttcttcccttcgagcggagttctaatttttggcaaaactggagcagctaataaaactacattagaaaacgtgctcatgacaaatgaagaagaaattcgtcctaccaacccggtagctaccgaggaatacgggattgtaagcagcaacttgcaggcggctagcaccgcagcccagacacaagttgttaacaaccagggagccttacctggcatggtctggcagaaccgggacgtgtacctgcaaggtcccatttgggccaagattcctcacacggacggcaactttcacccgtctcctctaatgggtggctttggactgaaacacccgcctccccagatcctgatcaaaaacacaccggtacctgctaatcctccagaagtgtttactcctgccaagattgcttccttcatcacgcagtacagcaccgggcaagtcagcgttgagatcgagtgggagctgcagaaagagaacagcaagcgctggaacccagagattcagtacacctccaactttgacaaacagactggagtggactttgctgttgacagccagggtgtttactctgagcct

SEQ ID NO: 35 - protein, 644 aa, Artificial Sequence
  Description of Artificial Sequence: Synthetic polypeptide
KAYDQQLKAGDNPYLRYNHADAEFQERLQEDTSFGGNLGRAVFQAKKRVLEPLGLVETPAKTAPGKKRPVDSPDSTSGIGKKGQQPAKKRLNFGQTGDSESVPDPQPIGEPPAGPSGLGSGTMAAGGGAPMADNNEGADGVGNASGNWHCDSTWLGDRVITTSTRTWALPTYNNHLYKQISSQSAGSTNDNVYFGYSTPWGYFDFNRFHCHFSPRDWQRLINNNWGFRPKKLNFKLFNIQVKEVTTNDGVTTIANNLTSTVQVFSDPEYQLPYVLGSAHQGCLPPFPADVFMIPQYGYLTLNNGSQSVGRSSFYCLEYFPSQMLRTGNNFTFSYTFEDVPFHSSYAHSQSLDRLMNPLIDQYLYYLARTQSNAGGTAGNRELQFYQGGPTTMAEQAKNWLPGPCFRQQRVSKTLDQNNNSNFAWTGATKYHLNGRNSLVNPGVAMATHKDDEERFFPSSGVLIFGKTGAANKTTLENVLMTNEEEIRPTNPVATEEYGIVSSNLQAASTAAQTQVVNNQGALPGMVWQNRDVYLQGPIWAKIPHTDGNFHPSPLMGGFGLKHPPPQILIKNTPVPANPPEVFTPAKIASFITQYSTGQVSVEIEWELQKENSKRWNPEIQYTSNFDKQTGVDFAVDSQGVYSEP

SEQ ID NO: 36 - protein, 738 aa, Artificial Sequence
  Description of Artificial Sequence: Synthetic polypeptide
MAADGYLPDWLEDNLSEGIREWWALKPGAPKPKANQQKQDDGRGLVLPGYKYLGPFNGLDKGEPVNAADAAALEHDKAYDQQLKAGDNPYLRYNHADAEFQERLQEDTSFGGNLGRAVFQAKKRVLEPLGLVEEGAKTAPGKKRPVEPSPQRSPDSTTGIGKKGQQPAKKRLNFGQTGDSESVPDPQPIGEPPAGPSGLGSGTMAAGGGAPMADNNEGADGVGSSSGNWHCDSTWLGDRVITTSTRTWALPTYNNHLYKQISNGTSGGSTNDNTYFGYSTPWGYFDFNRFHCHFSPRDWQRLINNNWGFRPKRLNFKLFNIQVKEVTQNEGTKTIANNLTSTIQVFTDSEYQLPYVLGSARQGCLPPFPADVFMIPQYGYLTLNNGSQAVGRSSFYCLEYFPSQMLRTGNNFEFSYQFEDVPFHSSYAHSQSLDRLMNPLIDQYLYYLSRTQSTGGTAGTQQLLFSQAGPNNMSAQAKNWLPGPCYRQQRVSTTLSQNNNSNFAWTGATKYHLNGRDSLVNPGVAMATHKDDEERFFPSSGVLMFGKQGAGKGNVDYSSVMLTSEEEIKTTNPVATEQYGVVADNLQQQNAAPIVGAVNSQGALPGMVWQNRDVYLQGPIWAKIPHTDGNFHPSPLMGGFGLKHPPPQILIKNTPVPADPPTTFSQAKLASFITQYSTGQVSVEIEWELQKENSKRWNPEIQYTSNYYKSTNVDFAVNTDGTYSEPRPIGTRYLTRNL

SEQ ID NO: 37 - DNA, 3121 bp, Artificial Sequence
  Description of Artificial Sequence: Synthetic polynucleotide
gaattcgcccttctacggctgcgtcaactggaccaatgagaactttcccttcaacgactgtgtcgacaagatggtgatctggtgggaggaggggaagatgaccgccaaggtcgtggagtcggccaaagccattctcggaggaagcaaggtgcgcgtggaccagaaatgcaagtcctcggcccagatagacccgactcccgtgatcgtcacctccaacaccaacatgtgcgccgtgattgacgggaactcaacgaccttcgaacaccagcagccgttgcaagaccggatgttcaaatttgaactcacccgccgtctggatcatgactttgggaaggtcaccaagcaggaagtcaaagactttttccggtgggcaaaggatcacgtggttgaggtggagcacgaattctacgtcaaaaagggtggagccaagaaaagacccgcccccagtgacgcagatataagtgagcccaaacgggtgcgcgagtcagttgcgcagccatcgacgtcagacgcggaagcttcgatcaactacgcagacaggtaccaaaacaaatgttctcgtcacgcgggcatgaatctgatgctgtttccctgcagacaatgcgagagaatgaatcagaattcaaatatctgcttcactcacggacagaaagactgtttagagtgctttcccgtgtcagaatctcaacccgtttctgtcgtcaaaaaggcgtatcagaaactgtgctacattcatcatatcatgggaaaggtgccagacgcttgcactgcctgcgatctggtcgatgtggatttggatgactgcatctttgaacaataaatgatttaaatcaggtatggctgccgatggttatcttccagattggctcgaggacaacctctctgagggcattcgcgagtggtgggcgctgaaacctggagccccgaagcccaaagccaaccagcaaaagcaggacggcggccggggtctggtgcttcctggctacaagtacctcggacccttcaacggactcgacaagggggagcccgtcaacgcggcggacgcagcggccctcgagcacgacaaggcctacgaccagcagctcaaagcgggtgacaatccgtacctgcggtataaccacgccgacgccgagtttcaggagcgtctgcaagaagatacgtcttttgggggcaacctcgggcgagcagtcttccaggccaagaagcgggttctcgaacctctcggtctggttgaggaaggcgctaagacggctcctggaaagaagagaccggtagagccatcaccccagcgttctccagactcctctacgggcatcggcaagaaaggccagcagcccgcgaaaaagagactcaactttgggcagactggcgactcagagtcagtgcccgaccctcaaccaatcggagaaccccccgcaggcccctctggtctgggatctggtacaatggctgcaggcggtggcgctccaatggcagacaataacgaaggcgccgacggagtgggtagttcctcaggaaattggcattgcgattccacatggctgggcgactgagtcatcaccaccagcacccgaacctgggccctccccacctacaacaaccacctctacaagcaaatctccaacgggacttcgggaggaagcaccaacgacaacacctacttcggctacagcaccccctgggggtattttgactttaacagattccactgccacttctcaccacgtgactggcagcgactcatcaacaacaactggggattccggcccaagagactcaacttcaagctcttcaacatccaggtcaaggaggtcacgcagaatgaaggcaccaagaccatcgccaataaccttaccagcacgattcaggtctttacggactcggaataccagctcccgtacgtcctcggctctgcgcaccagggctgcctgcctccgttcccggcggacgtcttcatgattcctcagtacgggtacctgactctgaacaatggcagtcaggccgtgggccgttcctccttctactgcctggagtactttccttctcaaatgctgagaacgggcaacaactttgagttcagctaccagtttgaggacgtgccttttcacagcagctacgcgcacagccaaagcctggaccggctgatgaaccccctcatcgaccagtacctgtactacctgtctcggactcagtccacgggaggtaccgcaggaactcagcagttgctattttctcaggccgggcctaataacatgtcggctcaggccaaaaactggctacccgggccctgctaccggcagtaacgcgtctccacgacactgtcgcaaaataacaacagcaactttgtctggaccggtgccaccaagtatcatctgaatggcagagactctctggtagatcccggtgtcgctatggcaacccacaaggacgacgaagagcgattttttccgtccagcggagtcataatgtttgggaaacagggagctggaaaagacaacgtggactatagcagcgtcatgctaaccagtgaggaagaaattaaaaccaccaacccagtggccacagaacagtacggcgtggtggccgataacctgcaacagcaaaacgccgctcctattgtaggggccgtcaacagtcaaggagccttacctggcatggtctggcagaaccgggacgtgtacctgcagggtcctacctgggccaagattcctcacacggacggaaactttcatccctcgccgctgatgggaggctttggactgaaacacccgcctcctcagatcctgattaagaatacacctgttcccgcggatcctccaactaccttcagtcaagctaagctggcgtcgttcatcacgcagtacagcaccggacaggtcagcgtggaaattgaatgggagctgcaggaagaaaacagcaaacgctggaacccagagattcaatacacttccaactactacaaatctacaaatgtggactttgctgttaacacagatggcacttattctgagcctcgccccatcggcacccgttacctcacccgtaatctgtaattgcttgttaatcaataaaccggttgattcgtttcagttgaactttggtctctgcgaagggcgaattc

SEQ ID NO: 38 - protein, 738 aa, Artificial Sequence
  Description of Artificial Sequence: Synthetic polypeptide
MAADGYLPDWLEDNLSEGIREWWALKPGAPKPKANQQKQDDGRGLVLPGYKYLGPFNGLDKGEPVNAADAAALEHDKAYDQQLKAGDNPYLRYNHADAEFQERLQEDTSFGGNLGRAVFQAKKRVLEPLGLVEEGAKTAPGKKRPVEPSPQRSPDSSTGIGKKGQQPAKKRLNFGQTGDSESVPDPQPIGEPPAGPSGLGSGTMAAGGGAPMADNNEGADGVGSSSGNWHCDSTWLGDGVITTSTRTWALPTYNNHLYKQISNGTSGGSTNDNTYFGYSTPWGYFDFNRFHCHFSPRDWQRLINNNWGFRPKSLNFKLFNIQVKEVTQNEGTKTIANNLTSTIQVFTDSEYQLPYVLGSAHQGCLPPFPADVFMIPQYGYLTLNNGSQAVGRSSFYCLEYFPSQMLRTGNNFEFSYQFEDVPFHSSYAHSQSLDRLMNPLIDQYLYYLSRTQSTGGTAGTQQLLFSQAGPNNMSAQAKNWLPGPCYRQQRVSTTLSQNDNSNFAWTGATKYHLNGRDSLVNPGVAMATHKDDEERFFPSSGVLMFGKQGAGKDNVDYSSVMLTSEEEIKTTNPVATEQYGVVADNLQQQNAAPIVGAVNSQGALPGMVWQNRDVYLQGPIWAKIPHTDGNFHPSPLMGGFGLKHPPPQILIKNTPVPADPPTTFSQAKLASFITQYSTGQVSVEIEWELQKENSKRWNPEIQYTSNYYKSTNVDFAVNTDGTYSEPRPIGTRYLTRNL

SEQ ID NO: 39 - DNA, 3121 bp, Artificial Sequence
  Description of Artificial Sequence: Synthetic polynucleotide
gaattcgcccttcgcgagaccaaagttcaactgaaacgaatcaaccggtttattgattaacaagcaattacagattacgggtgaggtaacgggtgccgatggggcgaggctcagaataagtgccatctgtgttaacagcaaagtccacatttgtagatttgtagtagttggaagtgtattgaatctctgggttccagcgtttgctgttttctttctgcagctcccattcaatttccacgctgacctgtccggtgctgtactgcgtgatgaacgacgccagcttagcttgactgaaggtagttggaggatccgcgggaacaggtgtattcttaatcaggatctgaggaggcgggtgtttcagtccaaagcctcccatcagcggcgagggatgaaagtttccgtccgtgtgaggaatcttggcccagataggaccctgcaggtacacgtcccggttctgccagaccatgccaggtaaggctccttgactgttgacggcccctacaataggagcggcgttttgctgttgcaggttatcggccaccacgccgtactgttctgtggccactgggttggtggttttaatttcttcctcactggttagcataacgctgctatagtccacgttgtcttttccagctccctgtttcccaaacattaagactccgctggacggaaaaaatcgctcttcgtcgtccttgtgggttgccatagcgacaccgggatttaccagagagtctctgccattcagatgatacttggtggcaccggtccaggcaaagttgctgttgtcattttgcgacagtgtcgtggagacgcgttgctgccggtagcagggcccgggtagccagtttttggcctgagccgacatgttattaggcccggcctgagaaaatagcaactgctgagttcctgcggtacctcccgtggactgagtccgagacaggtagtacaggtactggtcgatgagggggttcatcagccggtccaggctttggctgtgcgcgtagctgctgtgaaaaggcacgtcctcaaactggtagctgaactcaaagttgttgcccgttctcagcatttgagaaggaaagtactccaggcagtagaaggaggaacggcccacggcctgactgccattgttcagagtcaggtacccgtactgaggaatcatgaagacgtccgccgggaacggaggcaggcagccctggtgcgcagagccgaggacgtacgggagctggtattccgagtccgtaaagacctgaatcgtgctggtaaggttattggcgatggtcttggtgccttcattctgcgtgacctccttgacctggatgttgaagagcttgaagttgaggctcttgggccggaatccccagttgttgttgatgagtcgctgccagtcacgtggtgagaagtggcagtggaatctgttaaagtcaaaatacccccagggggtgctgtagccgaagtaggtgttgtcgttggtgcttcctcccgaagtcccgttggagatttgcttgtagaggtggttgttgtaggtggggagggcccaggttcgggtgctggtggtgatgactccgtcgcccagccatgtggaatcgcaatgccaatttcctgaggaactacccactccgtcggcgccttcgttattgtctgccattggagcgccaccgcctgcagccattgtaccagatcccagaccagaggggcctgcggggggttctccgattggttgagggtcgggcactgactctgagtcgccagtctgcccaaagttgagtctctttttcgcgggctgctggcctttcttgccgatgcccgtagaggagtctggagaacgctggggtgatggctctaccggtctcttctttccaggagccgtcttagcgccttcctcaaccagaccgagaggttcgagaacccgcttcttggcctggaagactgctcgcccgaggttgcccccaaaagacgtatcttcttgcagacgctcctgaaactcggcgtcggcgtggttataccgcaggtacggattgtcacccgctttgagctgctggtcgtaggccttgtcgtgctcgagggccgctgcgtccgccgcgttgacgggctcccccttgtcgagtccgttgaagggtccgaggtacttgtagccaggaagcaccagaccccggccgtcgtcctgcttttgctggttggctttgggcttcggggctccaggtttcagcgcccaccactcgcgaatgccctcagagaggttgtcctcgagccaatctggaagataaccatcggcagccatacctgatttaaatcatttattgttcaaagatgcagtcatccaaatccacattgaccagatcgcaggcagtgcaagcgtctggcacctttcccatgatatgatgaatgtagcacagtttctgatacgcctttttgacgacagaaacgggttgagattctgacacgggaaagcactctaaacagtctttctgtccgtgagtgaagcagatatttgaattctgattcattctctcgcattgtctgcagggaaacagcatcagattcatgcccacgtgacgagaacatttgttttggtacctgtctgcgtagttgatcgaagcttccgcgtctgacgtcgatggctgcgcaactgactcgcgcacccgtttgggctcacttatatctgcgtcactgggggcgggtcttttcttggctccaccctttttgacgtagaattcatgctccacctcaaccacgtgatcctttgcccaccggaaaaagtctttgacttcctgcttggtgaccttcccaaagtcatgatccagacggcgggtgagttcaaatttgaacatccggtcttgcaacggctgctggtgttcgaaggtcgttgagttcccgtcaatcacggcgcacatgttggtgttggaggtgacgatcacgggagtcgggtctatctgggccgaggacttgcatttctggtccacgcgcaccttgcttcctccgagaatggctttggccgactccacgaccttggcggtcatcttcccctcctcccaccagatcaccatcttgtcgacacagtcgttgaagggaaagttctcattggtccagttgacgcagccgtagaaagggcgaattc

SEQ ID NO: 40 - DNA, 2211 bp, Artificial Sequence
  Description of Artificial Sequence: Synthetic polynucleotide
atggctgctgacggttatcttccagattggctcgaggacaacctttctgaaggcattcgtgagtggtgggctctgaaacctggagtccctcaacccaaagcgaaccaacaacaccaggacaaccgtcggggtcttgtgcttccgggttacaaatacctcggacccggtaacggactcgacaaaggagagccggtcaacgaggcggacgcggcagccctcgaacacgacaaagcttacgaccagcagctcaaggccggtgacaacccgtacctcaagtacaaccacgccgacgccgagtttcaggagcgtcttcaagaagatacgtcttttgggggcaaccttggcagagcagtcttccaggccaaaaagaggatccttgagcctcttggtctggttgaggaagcagctaaaacggctcctggaaagaagggggctgtagatcagtctcctcaggaaccggactcatcatctggtgttggcaaatcgggcaaacagcctgccagaaaaagactaaatttcggtcagactggagactcagagtcagtcccagaccctcaacctctcggagaaccaccagcagcccccacaagtttgggatctaatacaatggcttcaggcggtggcgcaccaatggcagacaataacgagggtgccgatggagtgggtaattcctcaggaaattggcattgcgattcccaatggctgggcgacagagtcatcaccaccagcaccagaacctgggccctgcccacttacaacaaccatctctacaagcaaatctccagccaatcaggagcttcaaacgacaaccactactttggctacagcaccccttgggggtattttgactttaacagattccactgccacttctcaccacgtgactggcagcgactcattaacaacaactggggattccggcccaagaaactcagcttcaagctcttcaacatccaagttagaggggtcacgcagaacgatggcacgacgactattgccaataaccttaccagcacggttcaagtgtttacggactcggagtatcagctcccgtacgtgctcgggtcggcgcaccaaggctgtctcccgccgtttccagcggacgtcttcatggtccctcagtatggatacctcaccctgaacaacggaagtcaagcggtgggacgctcatccttttactgcctggagtacttcccttcgcagatgctaaggactggaaataacttccaattcagctataccttcgaggatgtaccttttcacagcagctacgctcacagccagagtttggatcgcttgatgaatcctcttattgatcagtatctgtactacctgaacagaacgcaaggaacaacctctggaacaaccaaccaatcacggctgctttttagccaggctgggcctcagtctatgtctttgcaggccagaaattggctacctgggccctgctaccggcaacagagactttcaaagactgctaacgacaacaacaacagtaactttccttggacagcggccagcaaatatcatctcaatggccgcgactcgctggtgaatccaggaccagctatggccagtcacaaggacgatgaagaaaaatttttccctatgcacggcaatctaatatttggcaaagaagggacaacggcaagtaacgcagaattagataatgtaatgattacggatgaagaagagattcgtaccaccaatcctgtggcaacagagcagtatggaactgtggcaaataacttgcagagctcaaatacagctcccacgactggaactgtcaatcatcagggggccttacctggcatggtgtggcaagatcgtgacgtgtaccttcaaggacctatctgggcaaagattcctcacacggatggacactttcatccttctcctctgatgggaggctttggactgaaacatccgcctcctcaaatcatgatcaaaaatactccggtaccggcaaatcctccgacgactttcagcccggccaagtttgcttcatttatcactcagtactccactggacaggtcagcgtggaaattgagtgggagctacagaaagaaaacagcaaacgttggaatccagagattcagtacacttccaactacaacaagtctgttaatgtggactttactgtagacactaatggtgtttatagtgaacctcgccctattggaacccggtatctcacacgaaacttgtga

SEQ ID NO: 41 - protein, 736 aa, Adeno-associated virus 3
MAADGYLPDWLEDNLSEGIREWWALKPGVPQPKANQQHQDNRRGLVLPGYKYLGPGNGLDKGEPVNEADAAALEHDKAYDQQLKAGDNPYLKYNHADAEFQERLQEDTSFGGNLGRAVFQAKKRILEPLGLVEEAAKTAPGKKGAVDQSPQEPDSSSGVGKSGKQPARKRLNFGQTGDSESVPDPQPLGEPPAAPTSLGSNTMASGGGAPMADNNEGADGVGNSSGNWHCDSQWLGDRVITTSTRTWALPTYNNHLYKQISSQSGASNDNHYFGYSTPWGYFDFNRFHCHFSPRDWQRLINNNWGFRPKKLSFKLFNIQVRGVTQNDGTTTIANNLTSTVQVFTDSEYQLPYVLGSAHQGCLPPFPADVFMVPQYGYLTLNNGSQAVGRSSFYCLEYFPSQMLRTGNNFQFSYTFEDVPFHSSYAHSQSLDRLMNPLIDQYLYYLNRTQGTTSGTTNQSRLLFSQAGPQSMSLQARNWLPGPCYRQQRLSKTANDNNNSNFPWTAASKYHLNGRDSLVNPGPAMASHKDDEEKFFPMHGNLIFGKEGTTASNAELDNVMITDEEEIRTTNPVATEQYGTVANNLQSSNTAPTTGTVNHQGALPGMVWQDRDVYLQGPIWAKIPHTDGHFHPSPLMGGFGLKHPPPQIMIKNTPVPANPPTTFSPAKFASFITQYSTGQVSVEIEWELQKENSKRWNPEIQYTSNYNKSVNVDFTVDTNGVYSEPRPIGTRYLTRNL

SEQ ID NO: 42 - DNA, 4726 bp, Adeno-associated virus 3
ttggccactccctctatgcgcactcgctcgctcggtggggcctggcgaccaaaggtcgccagacggacgtgctttgcacgtccggccccaccgagcgagcgagtgcgcatagagggagtggccaactccatcactagaggtatggcagtgacgtaacgcgaagcgcgcgaagcgagaccacgcctaccagctgcgtcagcagtcaggtgacccttttgcgacagtttgcgacaccacgtggccgctgagggtatatattctcgagtgagcgaaccaggagctccattttgaccgcgaaatttgaacgagcagcagccatgccggggttctacgagattgtcctgaaggtcccgagtgacctggacgagcgcctgccgggcatttctaactcgtttgttaactgggtggccgagaaggaatgggacgtgccgccggattctgacatggatccgaatctgattgagcaggcacccctgaccgtggccgaaaagcttcagcgcgagttcctggtggagtggcgccgcgtgagtaaggccccggaggccctcttttttgtccagttcgaaaagggggagacctacttccacctgcacgtgctgattgagaccatcggggtcaaatccatggtggtcggccgctacgtgagccagattaaagagaagctggtgacccgcatctaccgcggggtcgagccgcagcttccgaactggttcgcggtgaccaaaacgcgaaatggcgccgggggcgggaacaaggtggtggacgactgctacatccccaactacctgctccccaagacccagcccgagctccagtgggcgtggactaacatggaccagtatttaagcgcctgtttgaatctcgcggagcgtaaacggctggtggcgcagcatctgacgcacgtgtcgcagacgcaggagcagaacaaagagaatcagaaccccaattctgacgcgccggtcatcaggtcaaaaacctcagccaggtacatggagctggtcgggtggctggtggaccgcgggatcacgtcagaaaagcaatggattcaggaggaccaggcctcgtacatctccttcaacgccgcctccaactcgcggtcccagatcaaggccgcgctggacaatgcctccaagatcatgagcctgacaaagacggctccggactacctggtgggcagcaacccgccggaggacattaccaaaaatcggatctaccaaatcctggagctgaacgggtacgatccgcagtacgcggcctccgtcttcctgggctgggcgcaaaagaagttcgggaagaggaacaccatctggctctttgggccggccacgacgggtaaaaccaacatcgcggaagccatcgcccacgccgtgcccttctacggctgcgtaaactggaccaatgagaactttcccttcaacgattgcgtcgacaagatggtgatctggtgggaggagggcaagatgacggccaaggtcgtggagagcgccaaggccattctgggcggaagcaaggtgcgcgtggaccaaaagtgcaagtcatcggcccagatcgaacccactcccgtgatcgtcacctccaacaccaacatgtgcgccgtgattgacgggaacagcaccaccttcgagcatcagcagccgctgcaggaccggatgtttgaatttgaacttacccgccgtttggaccatgactttgggaaggtcaccaaacaggaagtaaaggactttttccggtgggcttccgatcacgtgactgacgtggctcatgagttctacgtcagaaagggtggagctaagaaacgccccgcctccaatgacgcggatgtaagcgagccaaaacgggagtgcacgtcacttgcgcagccgacaacgtcagacgcggaagcaccggcggactacgcggacaggtaccaaaacaaatgttctcgtcacgtgggcatgaatctgatgctttttccctgtaaaacatgcgagagaatgaatcaaatttccaatgtctgttttacgcatggtcaaagagactgtggggaatgcttccctggaatgtcagaatctcaacccgtttctgtcgtcaaaaagaagacttatcagaaactgtgtccaattcatcatatcctgggaagggcacccgagattgcctgttcggcctgcgatttggccaatgtggacttggatgactgtgtttctgagcaataaatgacttaaaccaggtatggctgctgacggttatcttccagattggctcgaggacaacctttctgaaggcattcgtgagtggtgggctctgaaacctggagtccctcaacccaaagcgaaccaacaacaccaggacaaccgtcggggtcttgtgcttccgggttacaaatacctcggacccggtaacggactcgacaaaggagagccggtcaacgaggcggacgcggcagccctcgaacacgacaaagcttacgaccagcagctcaaggccggtgacaacccgtacctcaagtacaaccacgccgacgccgagtttcaggagcgtcttcaagaagatacgtcttttgggggcaaccttggcagagcagtcttccaggccaaaaagaggatccttgagcctcttggtctggttgaggaagcagctaaaacggctcctggaaagaagggggctgtagatcagtctcctcaggaaccggactcatcatctggtgttggcaaatcgggcaaacagcctgccagaaaaagactaaatttcggtcagactggagactcagagtcagtcccagaccctcaacctctcggagaaccaccagcagcccccacaagtttgggatctaatacaatggcttcaggcggtggcgcaccaatggcagacaataacgagggtgccgatggagtgggtaattcctcaggaaattggcattgcgattcccaatggctgggcgacagagtcatcaccaccagcaccagaacctgggccctgcccacttacaacaaccatctctacaagcaaatctccagccaatcaggagcttcaaacgacaaccactactttggctacagcaccccttgggggtattttgactttaacagattccactgccacttctcaccacgtgactggcagcgactcattaacaacaactggggattccggcccaagaaactcagcttcaagctcttcaacatccaagttagaggggtcacgcagaacgatggcacgacgactattgccaataaccttaccagcacggttcaagtgtttacggactcggagtatcagctcccgtacgtgctcgggtcggcgcaccaaggctgtctcccgccgtttccagcggacgtcttcatggtccctcagtatggatacctcaccctgaacaacggaagtcaagcggtgggacgctcatccttttactgcctggagtacttcccttcgcagatgctaaggactggaaataacttccaattcagctataccttcgaggatgtaccttttcacagcagctacgctcacagccagagtttggatcgcttgatgaatcctcttattgatcagtatctgtactacctgaacagaacgcaaggaacaacctctggaacaaccaaccaatcacggctgctttttagccaggctgggcctcagtctatgtctttgcaggccagaaattggctacctgggccctgctaccggcaacagagactttcaaagactgctaacgacaacaacaacagtaactttccttggacagcggccagcaaatatcatctcaatggccgcgactcgctggtgaatccaggaccagctatggccagtcacaaggacgatgaagaaaaatttttccctatgcacggcaatctaatatttggcaaagaagggacaacggcaagtaacgcagaattagataatgtaatgattacggatgaagaagagattcgtaccaccaatcctgtggcaacagagcagtatggaactgtggcaaataacttgcagagctcaaatacagctcccacgactggaactgtcaatcatcagggggccttacctggcatggtgtggcaagatcgtgacgtgtaccttcaaggacctatctgggcaaagattcctcacacggatggacactttcatccttctcctctgatgggaggctttggactgaaacatccgcctcctcaaatcatgatcaaaaatactccggtaccggcaaatcctccgacgactttcagcccggccaagtttgcttcatttatcactcagtactccactggacaggtcagcgtggaaattgagtgggagctacagaaagaaaacagcaaacgttggaatccagagattcagtacacttccaactacaacaagtctgttaatgtggactttactgtagacactaatggtgtttatagtgaacctcgccctattggaacccggtatctcacacgaaacttgtgaatcctggttaatcaataaaccgtttaattcgtttcagttgaactttggctcttgtgcacttctttatctttatcttgtttccatggctactgcgtagataagcagcggcctgcggcgcttgcgcttcgcggtttacaactgctggttaatatttaactctcgccatacctctagtgatggagttggccactccctctatgcgcactcgctcgctcggtggggcctggcgaccaaaggtcgccagacggacgtgctttgcacgtccggccccaccgagcgagcgagtgcgcatagagggagtggccaa

SEQ ID NO: 43 - protein, 737 aa, Artificial Sequence
  Description of Artificial Sequence: Synthetic polypeptide
MAADGYLPDWLEDNLSEGIREWWDLKPGAPKPKANQQKQDNGRGLVLPGYKYLGPFNGLDKGEPVNAADAAALEHDKAYDQQLNAGDNPYLRYNHADAEFQERLQEDTSFGGNLGRAVFQAKKRVLEPLGLVEEGAKTAPAKKRPVEPSPQRSPDSSTGIGKKGQQPARKRLNFGQTGDSESVPDPQPLGEPPAAPSSVGSGTVAAGGGAPMADNNEGADGVGNASGNWHCDSTWLGDRVITTSTRTWALPTYNNHLYEQISSETAGSTNDNTYFGYSTPWGYFDFNRFHCHFSPRDWQRLINNNWGFRPKKLRFKLFNIQVKEVTTNDGVTTIANNLTSTIQVFSDSEYQLPYVLGSAHQGCLPPFPADVFMIPQYGYLTLNNGSQSVGRSSFYCLEYFPSQMLRTGNNFEFSYSFEDVPFHSSYAHSQSLDRLMNPLIDQYLYYLARTQSDPGGTAGNRELQFYQGGPSTMAEQAKNWLPGPCFRQQRVSKTLDQNNNSNFAWTGATKYHLNGRNSLVNPGVAMATHKDDEDRFFPSSGVLIFGKTGATNKTTLENVLMTNEEEIRPTNPVATEEYGIVSSNLQAANTAAQTQVVNNQGALPGMVWQNRDVYLQGPIWAKIPHTDGNFHPSPLMGGFGLKHPPPQILIKNTPVPANPPEVFTPAKFASFITQYSTGQVSVEIEWELQKENSKRWDPEIQYTSNFEKQTGVDFAVDSQGVYSEPRPIGTRYLTRNL

SEQ ID NO: 44 - DNA, 2211 bp, Artificial Sequence
  Description of Artificial Sequence: Synthetic polynucleotide
atggctgctgacggttatcttccagattggctcgaggacaacctttctgaaggcattcgtgagtggtgggctctgaaacctggagtccctcaacccaaagcgaaccaacaacaccaggacaaccgtcggggtcttgtgcttccgggttacaaatacctcggacccggtaacggactcgacaaaggagagccggtcaacgaggcggacgcggcagccctcgaacacgacaaagcttacgaccagcagctcaaggccggtgacaacccgtacctcaagtacaaccacgccgacgccgagtttcaggagcgtcttcaagaagatacgtcttttgggggcaaccttggcagagcagtcttccaggccaaaaagaggatccttgagcctcttggtctggttgaggaagcagctaaaacggctcctggaaagaagggggctgtagatcagtctcctcaggaaccggactcatcatctggtgttggcaaatcgggcaaacagcctgccagaaaaagactaaatttcggtcagactggagactcagagtcagtcccagaccctcaacctctcggagaaccaccagcagcccccacaagtttgggatctaatacaatggcttcaggcggtggcgcaccaatggcagacaataacgagggtgccgatggagtgggtaattcctcaggaaattggcattgcgattcccaatggctgggcgacagagtcatcaccaccagcaccagaacctgggccctgcccacttacaacaaccatctctacaagcaaatctccagccaatcaggagcttcaaacgacaaccactactttggctacagcaccccttgggggtattttgactttaacagattccactgccacttctcaccacgtgactggcagcgactcattaacaacaactggggattccggcccaagaaactcagcttcaagctcttcaacatccaagttagaggggtcacgcagaacgatggcacgacgactattgccaataaccttaccagcacggttcaagtgtttacggactcggagtatcagctcccgtacgtgctcgggtcggcgcaccaaggctgtctcccgccgtttccagcggacgtcttcatggtccctcagtatggatacctcaccctgaacaacggaagtcaagcggtgggacgctcatccttttactgcctggagtacttcccttcgcagatgctaaggactggaaataacttccaattcagctataccttcgaggatgtaccttttcacagcagctacgctcacagccagagtttggatcgcttgatgaatcctcttattgatcagtatctgtactacctgaacagaacgcaaggaacaacctctggaacaaccaaccaatcacggctgctttttagccaggctgggcctcagtctatgtctttgcaggccagaaattggctacctgggccctgctaccggcaacagagactttcaaagactgctaacgacaacaacaacagtaactttccttggacagcggccagcaaatatcatctcaatggccgcgactcgctggtgaatccaggaccagctatggccagtcacaaggacgatgaagaaaaatttttccctatgcacggcaatctaatatttggcaaagaagggacaacggcaagtaacgcagaattagataatgtaatgattacggatgaagaagagattcgtaccaccaatcctgtggcaacagagcagtatggaactgtggcaaataacttgcagagctcaaatacagctcccacgactggaactgtcaatcatcagggggccttacctggcatggtgtggcaagatcgtgacgtgtaccttcaaggacctatctgggcaaagattcctcacacggatggacactttcatccttctcctctgatgggaggctttggactgaaacatccgcctcctcaaatcatgatcaaaaatactccggtaccggcaaatcctccgacgactttcagcccggccaagtttgcttcatttatcactcagtactccactggacaggtcagcgtggaaattgagtgggagctacagaaagaaaacagcaaacgttggaatccagagattcagtacacttccaactacaacaagtctgttaatgtggactttactgtagacactaatggtgtttatagtgaacctcgccctattggaacccggtatctcacacgaaacttgtaa

SEQ ID NO: 45 - protein, 736 aa, Artificial Sequence; identical to SEQ ID NO: 41
  Description of Artificial Sequence: Synthetic polypeptide

SEQ ID NO: 46 - protein, 736 aa, Adeno-associated virus 3A; identical to SEQ ID NO: 41

SEQ ID NO: 47 - protein, 624 aa, Adeno-associated virus 3A
MPGFYEIVLKVPSDLDERLPGISNSFVNWVAEKEWDVPPDSDMDPNLIEQAPLTVAEKLQREFLVEWRRVSKAPEALFFVQFEKGETYFHLHVLIETIGVKSMVVGRYVSQIKEKLVTRIYRGVEPQLPNWFAVTKTRNGAGGGNKVVDDCYIPNYLLPKTQPELQWAWTNMDQYLSACLNLAERKRLVAQHLTHVSQTQEQNKENQNPNSDAPVIRSKTSARYMELVGWLVDRGITSEKQWIQEDQASYISFNAASNSRSQIKAALDNASKIMSLTKTAPDYLVGSNPPEDITKNRIYQILELNGYDPQYAASVFLGWAQKKFGKRNTIWLFGPATTGKTNIAEAIAHAVPFYGCVNWTNENFPFNDCVDKMVIWWEEGKMTAKVVESAKAILGGSKVRVDQKCKSSAQIEPTPVIVTSNTNMCAVIDGNSTTFEHQQPLQDRMFEFELTRRLDHDFGKVTKQEVKDFFRWASDHVTDVAHEFYVRKGGAKKRPASNDADVSEPKRECTSLAQPTTSDAEAPADYADRYQNKCSRHVGMNLMLFPCKTCERMNQISNVCFTHGQRDCGECFPGMSESQPVSVVKKKTYQKLCPIHHILGRAPEIACSACDLANVDLDDCVSEQ

SEQ ID NO: 48 - protein, 736 aa, Adeno-associated virus 3B
MAADGYLPDWLEDNLSEGIREWWALKPGVPQPKANQQHQDNRRGLVLPGYKYLGPGNGLDKGEPVNEADAAALEHDKAYDQQLKAGDNPYLKYNHADAEFQERLQEDTSFGGNLGRAVFQAKKRILEPLGLVEEAAKTAPGKKRPVDQSPQEPDSSSGVGKSGKQPARKRLNFGQTGDSESVPDPQPLGEPPAAPTSLGSNTMASGGGAPMADNNEGADGVGNSSGNWHCDSQWLGDRVITTSTRTWALPTYNNHLYKQISSQSGASNDNHYFGYSTPWGYFDFNRFHCHFSPRDWQRLINNNWGFRPKKLSFKLFNIQVKEVTQNDGTTTIANNLTSTVQVFTDSEYQLPYVLGSAHQGCLPPFPADVFMVPQYGYLTLNNGSQAVGRSSFYCLEYFPSQMLRTGNNFQFSYTFEDVPFHSSYAHSQSLDRLMNPLIDQYLYYLNRTQGTTSGTTNQSRLLFSQAGPQSMSLQARNWLPGPCYRQQRLSKTANDNNNSNFPWTAASKYHLNGRDSLVNPGPAMASHKDDEEKFFPMHGNLIFGKEGTTASNAELDNVMITDEEEIRTTNPVATEQYGTVANNLQSSNTAPTTRTVNDQGALPGMVWQDRDVYLQGPIWAKIPHTDGHFHPSPLMGGFGLKHPPPQIMIKNTPVPANPPTTFSPAKFASFITQYSTGQVSVEIEWELQKENSKRWNPEIQYTSNYNKSVNVDFTVDTNGVYSEPRPIGTRYLTRNL

SEQ ID NO: 49 - protein, 624 aa, Adeno-associated virus 3B
MPGFYEIVLKVPSDLDEHLPGISNSFVNWVAEKEWELPPDSDMDPNLIEQAPLTVAEKLQREFLVEWRRVSKAPEALFFVQFEKGETYFHLHVLIETIGVKSMVVGRYVSQIKEKLVTRIYRGVEPQLPNWFAVTKTRNGAGGGNKVVDDCYIPNYLLPKTQPELQWAWTNMDQYLSACLNLAERKRLVAQHLTHVSQTQEQNKENQNPNSDAPVIRSKTSARYMELVGWLVDRGITSEKQWIQEDQASYISFNAASNSRSQIKAALDNASKIMSLTKTAPDYLVGSNPPEDITKNRIYQILELNGYDPQYAASVFLGWAQKKFGKRNTIWLFGPATTGKTNIAEAIAHAVPFYGCVNWTNENFPFNDCVDKMVIWWEEGKMTAKVVESAKAILGGSKVRVDQKCKSSAQIEPTPVIVTSNTNMCAVIDGNSTTFEHQQPLQDRMFKFELTRRLDHDFGKVTKQEVKDFFRWASDHVTDVAHEFYVRKGGAKKRPASNDADVSEPKRQCTSLAQPTTSDAEAPADYADRYQNKCSRHVGMNLMLFPCKTCERMNQISNVCFTHGQRDCGECFPGMSESQPVSVVKKKTYQKLCPIHHILGRAPEIACSACDLANVDLDDCVSEQ

SEQ ID NO: 50 - DNA, 4722 bp, Adeno-associated virus 3B
tggccactccctctatgcgcactcgctcgctcggtggggcctggcgaccaaaggtcgccagacggacgtgctttgcacgtccggccccaccgagcgagcgagtgcgcatagagggagtggccaactccatcactagaggtatggcagtgacgtaacgcgaagcgcgcgaagcgagaccacgcctaccagctgcgtcagcagtcaggtgacccttttgcgacagtttgcgacaccacgtggccgctgagggtatatattctcgagtgagcgaaccaggagctccattttgaccgcgaaatttgaacgagcagcagccatgccggggttctacgagattgtcctgaaggtcccgagtgacctggacgagcacctgccgggcatttctaactcgtttgttaactgggtggccgagaaggaatgggagctgccgccggattctgacatggatccgaatctgattgagcaggcacccctgaccgtggccgaaaagcttcagcgcgagttcctggtggagtggcgccgcgtgagtaaggccccggaggccctcttttttgtccagttcgaaaagggggagacctacttccacctgcacgtgctgattgagaccatcggggtcaaatccatggtggtcggccgctacgtgagccagattaaagagaagctggtgacccgcatctaccgcggggtcgagccgcagcttccgaactggttcgcggtgaccaaaacgcgaaatggcgccgggggcgggaacaaggtggtggacgactgctacatccccaactacctgctccccaagacccagcccgagctccagtgggcgtggactaacatggaccagtatttaagcgcctgtttgaatctcgcggagcgtaaacggctggtggcgcagcatctgacgcacgtgtcgcagacgcaggagcagaacaaagagaatcagaaccccaattctgacgcgccggtcatcaggtcaaaaacctcagccaggtacatggagctggtcgggtggctggtggaccgcgggatcacgtcagaaaagcaatggattcaggaggaccaggcctcgtacatctccttcaacgccgcctccaactcgcggtcccagatcaaggccgcgctggacaatgcctccaagatcatgagcctgacaaagacggctccggactacctggtgggcagcaacccgccggaggacattaccaaaaatcggatctaccaaatcctggagctgaacgggtacgatccgcagtacgcggcctccgtcttcctgggctgggcgcaaaagaagttcgggaagaggaacaccatctggctctttgggccggccacgacgggtaaaaccaacatcgcggaagccatcgcccacgccgtgcccttctacggctgcgtaaactggaccaatgagaactttcccttcaacgattgcgtcgacaagatggtgatctggtgggaggagggcaagatgacggccaaggtcgtggagagcgccaaggccattctgggcggaagcaaggtgcgcgtggaccaaaagtgcaagtcatcggcccagatcgaacccactcccgtgatcgtcacctccaacaccaacatgtgcgccgtgattgacgggaacagcaccaccttcgagcatcagcagccgctgcaggaccggatgtttaaatttgaacttacccgccgtttggaccatgactttgggaaggtcaccaaacaggaagtaaaggactttttccggtgggcttccgatcacgtgactgacgtggctcatgagttctacgtcagaaagggtggagctaagaaacgccccgcctccaatgacgcggatgtaagcgagccaaaacggcagtgcacgtcacttgcgcagccgacaacgtcagacgcggaagcaccggcggactacgcggacaggtaccaaaacaaatgttctcgtcacgtgggcatgaatctgatgctttttccctgtaaaacatgcgagagaatgaatcaaatttccaatgtctgttttacgcatggtcaaagagactgtggggaatgcttccctggaatgtcagaatctcaacccgtttctgtcgtcaaaaagaagacttatcagaaactgtgtccaattcatcatatcctgggaagggcacccgagattgcctgttcggcctgcgatttggccaatgtggacttggatgactgtgtttctgagcaataaatgacttaaaccaggtatggctgctgacggttatcttccagattggctcgaggacaacctttctgaaggcattcgtgagtggtgggctctgaaacctggagtccctcaacccaaagcgaaccaacaacaccaggacaaccgtcggggtcttgtgcttccgggttacaaatacctcggacccggtaacggactcgacaaaggagagccggtcaacgaggcggacgcggcagccctcgaacacgacaaagcttacgaccagcagctcaaggccggtgacaacccgtacctcaagtacaaccacgccgacgccgagtttcaggagcgtcttcaagaagatacgtcttttgggggcaaccttggcagagcagtcttccaggccaaaaagaggatccttgagcctcttggtctggttgaggaagcagctaaaacggctcctggaaagaagaggcctgtagatcagtctcctcaggaaccggactcatcatctggtgttggcaaatcgggcaaacagcctgccagaaaaagactaaatttcggtcagactggcgactcagagtcagtcccagaccctcaacctctcggagaaccaccagcagcccccacaagtttgggatctaatacaatggcttcaggcggtggcgcaccaatggcagacaataacgagggtgccgatggagtgggtaattcctcaggaaattggcattgcgattcccaatggctgggcgacagagtcatcaccaccagcaccagaacctgggccctgcccacttacaacaaccatctctacaagcaaatctccagccaatcaggagcttcaaacgacaaccactactttggctacagcaccccttgggggtattttgactttaacagattccactgccacttctcaccacgtgactggcagcgactcattaacaacaactggggattccggcccaagaaactcagcttcaagctcttcaacatccaagttaaagaggtcacgcagaacgatggcacgacgactattgccaataaccttaccagcacggttcaagtgtttacggactcggagtatcagctcccgtacgtgctcgggtcggcgcaccaaggctgtctcccgccgtttccagcggacgtcttcatggtccctcagtatggatacctcaccctgaacaacggaagtcaagcggtgggacgctcatccttttactgcctggagtacttcccttcgcagatgctaaggactggaaataacttccaattcagctataccttcgaggatgtaccttttcacagcagctacgctcacagccagagtttggatcgcttgatgaatcctcttattgatcagtatctgtactacctgaacagaacgcaaggaacaacctctggaacaaccaaccaatcacggctgctttttagccaggctgggcctcagtctatgtctttgcaggccagaaattggctacctgggccctgctaccggcaacagagactttcaaagactgctaacgacaacaacaacagtaactttccttggacagcggccagcaaatatcatctcaatggccgcgactcgctggtgaatccaggaccagctatggccagtcacaaggacgatgaagaaaaatttttccctatgcacggcaatctaatatttggcaaagaagggacaacggcaagtaacgcagaattagataatgtaatgattacggatgaagaagagattcgtaccaccaatcctgtggcaacagagcagtatggaactgtggcaaataacttgcagagctcaaatacagctcccacgactagaactgtcaatgatcagggggccttacctggcatggtgtggcaagatcgtgacgtgtaccttcaaggacctatctgggcaaagattcctcacacggatggacactttcatccttctcctctgatgggaggctttggactgaaacatccgcctcctcaaatcatgatcaaaaatactccggtaccggcaaatcctccgacgactttcagcccggccaagtttgcttcatttatcactcagtactccactggacaggtcagcgtggaaattgagtgggagctacagaaagaaaacagcaaacgttggaatccagagattcagtacacttccaactacaacaagtctgttaatgtggactttactgtagacactaatggtgtttatagtgaacctcgccctattggaacccggtatctcacacgaaacttgtaatcctggttaatcaataaaccgtttaattcgtttcagttgaactttggctcttgtgcacttcttatcttatcttgtttccatggctactgcgtagataagcagcggcctgcggcgcttgcgcttcgcggtttacaactgctggttaatatttaactctcgccatacctctagtgatggagttggccactccctctatgcgcactcgctcgctcggtggggccggacgtgcaaagcacgtccgtctggcgacctttggtcgccaggccccaccgagcgagcgagtgcgcatagagggagtggccaa

SEQ ID NO: 51 - DNA, 1800 bp, Adeno-associated virus 4
  modified_base (342)..(342): Unknown
acggctcctggaaagaagagaccgttgattgaatccccccagcagcccgactcctccacgggtatcggcaaaaaaggcaagcagccggctaaaaagaagctcgttttcgaagacgaaactggagcaggcgacggaccccctgagggatcaacttccggagccatgtctgatgacagtgagatgcgtgcagcagctggcggagctgcagtcgagggsggacaaggtgccgatggagtgggtaatgcctcgggtgattggcattgcgattccacctggtctgagggccacgtcacgaccaccagcaccagaacctgggtcttgcccacctacaacaaccacctntacaagcgactcggagagagcctgcagtccaacacctacaacggattctccaccccctggggatactttgacttcaaccgcttccactgccacttctcaccacgtgactggcagcgactcatcaacaacaactggggcatgcgacccaaagccatgcgggtcaaaatcttcaacatccaggtcaaggaggtcacgacgtcgaacggcgagacaacggtggctaataaccttaccagcacggttcagatctttgcggactcgtcgtacgaactgccgtacgtgatggatgcgggtcaagagggcagcctgcctccttttcccaacgacgtctttatggtgccccagtacggctactgtggactggtgaccggcaacacttcgcagcaacagactgacagaaatgccttctactgcctggagtactttccttcgcagatgctgcggactggcaacaactttgaaattacgtacagttttgagaaggtgcctttccactcgatgtacgcgcacagccagagcctggaccggctgatgaaccctctcatcgaccagtacctgtggggactgcaatcgaccaccaccggaaccaccctgaatgccgggactgccaccaccaactttaccaagctgcggcctaccaacttttccaactttaaaaagaactggctgcccgggccttcaatcaagcagcagggcttctcaaagactgccaatcaaaactacaagatccctgccaccgggtcagacagtctcatcaaatacgagacgcacagcactctggacggaagatggagtgccctgacccccggacctccaatggccacggctggacctgcggacagcaagttcagcaacagccagctcatctttgcggggcctaaacagaacggcaacacggccaccgtacccgggactctgatcttcacctctgaggaggagctggcagccaccaacgccaccgatacggacatgtggggcaacctacctggcggtgaccagagcaacagcaacctgccgaccgtggacagactgacagccttgggagccgtgcctggaatggtctggcaaaacagagacatttactaccagggtcccatttgggccaagattcctcataccgatggacactttcacccctcaccgctgattggtgggtttgggctgaaacacccgcctcctcaaatttttatcaagaacaccccggtacctgcgaatcctgcaacgaccttcagctctactccggtaaactccttcattactcagtacagcactggccaggtgtcggtgcagattgactgggagatccagaaggagcggtccaaacgctggaaccccgaggtccagtttacctccaactacggacagcaaaactctctgttgtgggctcccgatgcggctgggaaatacactgagcctagggctatcggtacccgctacctcacccaccacctgtaataa

SEQ ID NO: 52 - DNA, 2208 bp, Adeno-associated virus 4
  modified_base (750)..(750): Unknown
atgactgacggttaccttccagattggctagaggacaacctctctgaaggcgttcgagagtggtgggcgctgcaacctggagcccctaaacccaaggcaaatcaacaacatcaggacaacgctcggggtcttgtgcttccgggttacaaatacctcggacccggcaacggactcgacaagggggaacccgtcaacgcagcggacgcggcagccctcgagcacgacaaggcctacgaccagcagctcaaggccggtgacaacccctacctcaagtacaaccacgccgacgcggagttccagcagcggcttcagggcgacacatcgtttgggggcaacctcggcagagcagtcttccaggccaaaaagagggttcttgaacctcttggtctggttgagcaagcgggtgagacggctcctggaaagaagagaccgttgattgaatccccccagcagcccgactcctccacgggtatcggcaaaaaaggcaagcagccggctaaaaagaagctcgttttcgaagacgaaactggagcaggcgacggaccccctgagggatcaacttccggagccatgtctgatgacagtgagatgcgtgcagcagctggcggagctgcagtcgagggsggacaaggtgccgatggagtgggtaatgcctcgggtgattggcattgcgattccacctggtctgagggccacgtcacgaccaccagcaccagaacctgggtcttgcccacctacaacaaccacctntacaagcgactcggagagagcctgcagtccaacacctacaacggattctccaccccctggggatactttgacttcaaccgcttccactgccacttctcaccacgtgactggcagcgactcatcaacaacaactggggcatgcgacccaaagccatgcgggtcaaaatcttcaacatccaggtcaaggaggtcacgacgtcgaacggcgagacaacggtggctaataaccttaccagcacggttcagatctttgcggactcgtcgtacgaactgccgtacgtgatggatgcgggtcaagagggcagcctgcctccttttcccaacgacgtctttatggtgccccagtacggctactgtggactggtgaccggcaacacttcgcagcaacagactgacagaaatgccttctactgcctggagtactttccttcgcagatgctgcggactggcaacaactttgaaattacgtacagttttgagaaggtgcctttccactcgatgtacgcgcacagccagagcctggaccggctgatgaaccctctcatcgaccagtacctgtggggactgcaatcgaccaccaccggaaccaccctgaatgccgggactgccaccaccaactttaccaagctgcggcctaccaacttttccaactttaaaaagaactggctgcccgggccttcaatcaagcagcagggcttctcaaagactgccaatcaaaactacaagatccctgccaccgggtcagacagtctcatcaaatacgagacgcacagcactctggacggaagatggagtgccctgacccccggacctccaatggccacggctggacctgcggacagcaagttcagcaacagccagctcatctttgcggggcctaaacagaacggcaacacggccaccgtacccgggactctgatcttcacctctgaggaggagctggcagccaccaacgccaccgatacggacatgtggggcaacctacctggcggtgaccagagcaacagcaacctgccgaccgtggacagactgacagccttgggagccgtgcctggaatggtctggcaaaacagagacatttactaccagggtcccatttgggccaagattcctcataccgatggacactttcacccctcaccgctgattggtgggtttgggctgaaacacccgcctcctcaaatttttatcaagaacaccccggtacctgcgaatcctgcaacgaccttcagctctactccggtaaactccttcattactcagtacagcactggccaggtgtcggtgcagattgactgggagatccagaaggagcggtccaaacgctggaaccccgaggtccagtttacctccaactacggacagcaaaactctctgttgtgggctcccgatgcggctgggaaatacactgagcctagggctatcggtacccgctacctcacccaccacctgtaataa

SEQ ID NO: 53 - DNA, 1872 bp, Adeno-associated virus 4
atgccggggttctacgagatcgtgctgaaggtgcccagcgacctggacgagcacctgcccggcatttctgactcttttgtgagctgggtggccgagaaggaatgggagctgccgccggattctgacatggacttgaatctgattgagcaggcacccctgaccgtggccgaaaagctgcaacgcgagttcctggtcgagtggcgccgcgtgagtaaggccccggaggccctcttctttgtccagttcgagaagggggacagctacttccacctgcacatcctggtggagaccgtgggcgtcaaatccatggtggtgggccgctacgtgagccagattaaagagaagctggtgacccgcatctaccgcggggtcgagccgcagcttccgaactggttcgcggtgaccaagacgcgtaatggcgccggaggcgggaacaaggtggtggacgactgctacatccccaactacctgctccccaagacccagcccgagctccagtgggcgtggactaacatggaccagtatataagcgcctgtttgaatctcgcggagcgtaaacggctggtggcgcagcatctgacgcacgtgtcgcagacgcaggagcagaacaaggaaaaccagaaccccaattctgacgcgccggtcatcaggtcaaaaacctccgccaggtacatggagctggtcgggtggctggtggaccgcgggatcacgtcagaaaagcaatggatccaggaggaccaggcgtcctacatctccttcaacgccgcctccaactcgcggtcacaaatcaaggccgcgctggacaatgcctccaaaatcatgagcctgacaaagacggctccggactacctggtgggccagaacccgccggaggacatttccagcaaccgcatctaccgaatcctcgagatgaacgggtacgatccgcagtacgcggcctccgtcttcctgggctgggcgcaaaagaagttcgggaagaggaacaccatctggctctttgggccggccacgacgggtaaaaccaacatcgcggaagccatcgcccacgccgtgcccttctacggctgcgtgaactggaccaatgagaactttccgttcaacgattgcgtcgacaagatggtgatctggtgggaggagggcaagatgacggccaaggtcgtagagagcgccaaggccatcctgggcggaagcaaggtgcgcgtggaccaaaagtgcaagtcatcggcccagatcgacccaactcccgtgatcgtcacctccaacaccaacatgtgcgcggtcatcgacggaaactcgaccaccttcgagcaccaacaaccactccaggaccggatgttcaagttcgagctcaccaagcgcctggagcacgactttggcaaggtcaccaagcaggaagtcaaagactttttccggtgggcgtcagatcacgtgaccgaggtgactcacgagttttacgtcagaaagggtggagctagaaagaggcccgcccccaatgacgcagatataagtgagcccaagcgggcctgtccgtcagttgcgcagccatcgacgtcagacgcggaagctccggtggactacgcggacaggtaccaaaacaaatgttctcgtcacgtgggtatgaatctgatgctttttccctgccggcaatgcgagagaatgaatcagaatgtggacatttgcttcacgcacggggtcatggactgtgccgagtgcttccccgtgtcagaatctcaacccgtgtctgtcgtcagaaagcggacgtatcagaaactgtgtccgattcatcacatcatggggagggcgcccgaggtggcctgctcggcctgcgaactggccaatgtggacttggatgactgtgacatggaacaataa

SEQ ID NO: 54 - DNA, 1611 bp, Adeno-associated virus 4
atgccggggttctacgagatcgtgctgaaggtgcccagcgacctggacgagcacctgcccggcatttctgactcttttgtgagctgggtggccgagaaggaatgggagctgccgccggattctgacatggacttgaatctgattgagcaggcacccctgaccgtggccgaaaagctgcaacgcgagttcctggtcgagtggcgccgcgtgagtaaggccccggaggccctcttctttgtccagttcgagaagggggacagctacttccacctgcacatcctggtggagaccgtgggcgtcaaatccatggtggtgggccgctacgtgagccagattaaagagaagctggtgacccgcatctaccgcggggtcgagccgcagcttccgaactggttcgcggtgaccaagacgcgtaatggcgccggaggcgggaacaaggtggtggacgactgctacatccccaactacctgctccccaagacccagcccgagctccagtgggcgtggactaacatggaccagtatataagcgcctgtttgaatctcgcggagcgtaaacggctggtggcgcagcatctgacgcacgtgtcgcagacgcaggagcagaacaaggaaaaccagaaccccaattctgacgcgccggtcatcaggtcaaaaacctccgccaggtacatggagctggtcgggtggctggtggaccgcgggatcacgtcagaaaagcaatggatccaggaggaccaggcgtcctacatctccttcaacgccgcctccaactcgcggtcacaaatcaaggccgcgctggacaatgcctccaaaatcatgagcctgacaaagacggctccggactacctggtgggccagaacccgccggaggacatttccagcaaccgcatctaccgaatcctcgagatgaacgggtacgatccgcagtacgcggcctccgtcttcctgggctgggcgcaaaagaagttcgggaagaggaacaccatctggctctttgggccggccacgacgggtaaaaccaacatcgcggaagccatcgcccacgccgtgcccttctacggctgcgtgaactggaccaatgagaactttccgttcaacgattgcgtcgacaagatggtgatctggtgggaggagggcaagatgacggccaaggtcgtagagagcgccaaggccatcctgggcggaagcaaggtgcgcgtggaccaaaagtgcaagtcatcggcccagatcgacccaactcccgtgatcgtcacctccaacaccaacatgtgcgcggtcatcgacggaaactcgaccaccttcgagcaccaacaaccactccaggaccggatgttcaagttcgagctcaccaagcgcctggagcacgactttggcaaggtcaccaagcaggaagtcaaagactttttccggtgggcgtcagatcacgtgaccgaggtgactcacgagttttacgtcagaaagggtggagctagaaagaggcccgcccccaatgacgcagatataagtgagcccaagcgggcctgtccgtcagttgcgcagccatcgacgtcagacgcggaagctccggtggactacgcggacagattggctagaggacaacctctctga

SEQ ID NO: 55 - DNA, 1872 bp, Adeno-associated virus 4; identical to SEQ ID NO: 53

SEQ ID NO: 56 - DNA, 1617 bp, Adeno-associated virus 4
  modified_base (162)..(162): Unknown
atgcgtgcagcagctggcggagctgcagtcgagggsggacaaggtgccgatggagtgggtaatgcctcgggtgattggcattgcgattccacctggtctgagggccacgtcacgaccaccagcaccagaacctgggtcttgcccacctacaacaaccacctntacaagcgactcggagagagcctgcagtccaacacctacaacggattctccaccccctggggatactttgacttcaaccgcttccactgccacttctcaccacgtgactggcagcgactcatcaacaacaactggggcatgcgacccaaagccatgcgggtcaaaatcttcaacatccaggtcaaggaggtcacgacgtcgaacggcgagacaacggtggctaataaccttaccagcacggttcagatctttgcggactcgtcgtacgaactgccgtacgtgatggatgcgggtcaagagggcagcctgcctccttttcccaacgacgtctttatggtgccccagtacggctactgtggactggtgaccggcaacacttcgcagcaacagactgacagaaatgccttctactgcctggagtactttccttcgcagatgctgcggactggcaacaactttgaaattacgtacagttttgagaaggtgcctttccactcgatgtacgcgcacagccagagcctggaccggctgatgaaccctctcatcgaccagtacctgtggggactgcaatcgaccaccaccggaaccaccctgaatgccgggactgccaccaccaactttaccaagctgcggcctaccaacttttccaactttaaaaagaactggctgcccgggccttcaatcaagcagcagggcttctcaaagactgccaatcaaaactacaagatccctgccaccgggtcagacagtctcatcaaatacgagacgcacagcactctggacggaagatggagtgccctgacccccggacctccaatggccacggctggacctgcggacagcaagttcagcaacagccagctcatctttgcggggcctaaacagaacggcaacacggccaccgtacccgggactctgatcttcacctctgaggaggagctggcagccaccaacgccaccgatacggacatgtggggcaacctacctggcggtgaccagagcaacagcaacctgccgaccgtggacagactgacagccttgggagccgtgcctggaatggtctggcaaaacagagacatttactaccagggtcccatttgggccaagattcctcataccgatggacactttcacccctcaccgctgattggtgggtttgggctgaaacacccgcctcctcaaatttttatcaagaacaccccggtacctgcgaatcctgcaacgaccttcagctctactccggtaaactccttcattactcagtacagcactggccaggtgtcggtgcagattgactgggagatccagaaggagcggtccaaacgctggaaccccgaggtccagtttacctccaactacggacagcaaaactctctgttgtgggctcccgatgcggctgggaaatacactgagcctagggctatcggtacccgctacctcacccaccacctgtaa

SEQ ID NO: 57 - DNA, 939 bp, Adeno-associated virus 4
atggagctggtcgggtggctggtggaccgcgggatcacgtcagaaaagcaatggatccaggaggaccaggcgtcctacatctccttcaacgccgcctccaactcgcggtcacaaatcaaggccgcgctggacaatgcctccaaaatcatgagcctgacaaagacggctccggactacctggtgggccagaacccgccggaggacatttccagcaaccgcatctaccgaatcctcgagatgaacgggtacgatccgcagtacgcggcctccgtcttcctgggctgggcgcaaaagaagttcgggaagaggaacaccatctggctctttgggccggccacgacgggtaaaaccaacatcgcggaagccatcgcccacgccgtgcccttctacggctgcgtgaactggaccaatgagaactttccgttcaacgattgcgtcgacaagatggtgatctggtgggaggagggcaagatgacggccaaggtcgtagagagcgccaaggccatcctgggcggaagcaaggtgcgcgtggaccaaaagtgcaagtcatcggcccagatcgacccaactcccgtgatcgtcacctccaacaccaacatgtgcgcggtcatcgacggaaactcgaccaccttcgagcaccaacaaccactccaggaccggatgttcaagttcgagctcaccaagcgcctggagcacgactttggcaaggtcaccaagcaggaagtcaaagactttttccggtgggcgtcagatcacgtgaccgaggtgactcacgagttttacgtcagaaagggtggagctagaaagaggcccgcccccaatgacgcagatataagtgagcccaagcgggcctgtccgtcagttgcgcagccatcgacgtcagacgcggaagctccggtggactacgcggacagattggctagaggacaacctctctga

SEQ ID NO: 58 - DNA, 1197 bp, Adeno-associated virus 4
atggagctggtcgggtggctggtggaccgcgggatcacgtcagaaaagcaatggatccaggaggaccaggcgtcctacatctccttcaacgccgcctccaactcgcggtcacaaatcaaggccgcgctggacaatgcctccaaaatcatgagcctgacaaagacggctccggactacctggtgggccagaacccgccggaggacatttccagcaaccgcatctaccgaatcctcgagatgaacgggtacgatccgcagtacgcggcctccgtcttcctgggctgggcgcaaaagaagttcgggaagaggaacaccatctggctctttgggccggccacgacgggtaaaaccaacatcgcggaagccatcgcccacgccgtgcccttctacggctgcgtgaactggaccaatgagaactttccgttcaacgattgcgtcgacaagatggtgatctggtgggaggagggcaagatgacggccaaggtcgtagagagcgccaaggccatcctgggcggaagcaaggtgcgcgtggaccaaaagtgcaagtcatcggcccagatcgacccaactcccgtgatcgtcacctccaacaccaacatgtgcgcggtcatcgacggaaactcgaccaccttcgagcaccaacaaccactccaggaccggatgttcaagttcgagctcaccaagcgcctggagcacgactttggcaaggtcaccaagcaggaagtcaaagactttttccggtgggcgtcagatcacgtgaccgaggtgactcacgagttttacgtcagaaagggtggagctagaaagaggcccgcccccaatgacgcagatataagtgagcccaagcgggcctgtccgtcagttgcgcagccatcgacgtcagacgcggaagctccggtggactacgcggacaggtaccaaaacaaatgttctcgtcacgtgggtatgaatctgatgctttttccctgccggcaatgcgagagaatgaatcagaatgtggacatttgcttcacgcacggggtcatggactgtgccgagtgcttccccgtgtcagaatctcaacccgtgtctgtcgtcagaaagcggacgtatcagaaactgtgtccgattcatcacatcatggggagggcgcccgaggtggcctgctcggcctgcgaactggccaatgtggacttggatgactgtgacatggaacaa

SEQ ID NO: 59 - DNA, 245 bp, Adeno-associated virus 4
ctccatcatctaggtttgcccactgacgtcaatgtgacgtcctagggttagggaggtccctgtattagcagtcacgtgagtgtcgtatttcgcggagcgtagcggagcgcataccaagctgccacgtcacagccacgtggtccgtttgcgacagtttgcgacaccatgtggtcaggagggtatataaccgcgagtgagccagcgaggagctccattttgcccgcgaattttgaacgagcagcagc

SEQ ID NO: 60 - protein, 313 aa, Adeno-associated virus 4
  MOD_RES (313)..(313): Unknown
MELVGWLVDRGITSEKQWIQEDQASYISFNAASNSRSQIKAALDNASKIMSLTKTAPDYLVGQNPPEDISSNRIYRILEMNGYDPQYAASVFLGWAQKKFGKRNTIWLFGPATTGKTNIAEAIAHAVPFYGCVNWTNENFPFNDCVDKMVIWWEEGKMTAKVVESAKAILGGSKVRVDQKCKSSAQIDPTPVIVTSNTNMCAVIDGNSTTFEHQQPLQDRMFKFELTKRLEHDFGKVTKQEVKDFFRWASDHVTEVTHEFYVRKGGARKRPAPNDADISEPKRACPSVAQPSTSDAEAPVDYADRLARGQPLX

SEQ ID NO: 61 - protein, 399 aa, Adeno-associated virus 4
MELVGWLVDRGITSEKQWIQEDQASYISFNAASNSRSQIKAALDNASKIMSLTKTAPDYLVGQNPPEDISSNRIYRILEMNGYDPQYAASVFLGWAQKKFGKRNTIWLFGPATTGKTNIAEAIAHAVPFYGCVNWTNENFPFNDCVDKMVIWWEEGKMTAKVVESAKAILGGSKVRVDQKCKSSAQIDPTPVIVTSNTNMCAVIDGNSTTFEHQQPLQDRMFKFELTKRLEHDFGKVTKQEVKDFFRWASDHVTEVTHEFYVRKGGARKRPAPNDADISEPKRACPSVAQPSTSDAEAPVDYADRYQNKCSRHVGMNLMLFPCRQCERMNQNVDICFTHGVMDCAECFPVSESQPVSVVRKRTYQKLCPIHHIMGRAPEVACSACELANVDLDDCDMEQ

SEQ ID NO: 62 - protein, 623 aa, Adeno-associated virus 4
MPGFYEIVLKVPSDLDEHLPGISDSFVSWVAEKEWELPPDSDMDLNLIEQAPLTVAEKLQREFLVEWRRVSKAPEALFFVQFEKGDSYFHLHILVETVGVKSMVVGRYVSQIKEKLVTRIYRGVEPQLPNWFAVTKTRNGAGGGNKVVDDCYIPNYLLPKTQPELQWAWTNMDQYISACLNLAERKRLVAQHLTHVSQTQEQNKENQNPNSDAPVIRSKTSARYMELVGWLVDRGITSEKQWIQEDQASYISFNAASNSRSQIKAALDNASKIMSLTKTAPDYLVGQNPPEDISSNRIYRILEMNGYDPQYAASVFLGWAQKKFGKRNTIWLFGPATTGKTNIAEAIAHAVPFYGCVNWTNENFPFNDCVDKMVIWWEEGKMTAKVVESAKAILGGSKVRVDQKCKSSAQIDPTPVIVTSNTNMCAVIDGNSTTFEHQQPLQDRMFKFELTKRLEHDFGKVTKQEVKDFFRWASDHVTEVTHEFYVRKGGARKRPAPNDADISEPKRACPSVAQPSTSDAEAPVDYADRYQNKCSRHVGMNLMLFPCRQCERMNQNVDICFTHGVMDCAECFPVSESQPVSVVRKRTYQKLCPIHHIMGRAPEVACSACELANVDLDDCDMEQ

SEQ ID NO: 63 - protein, 537 aa, Adeno-associated virus 4
  MOD_RES (537)..(537): Unknown
MPGFYEIVLKVPSDLDEHLPGISDSFVSWVAEKEWELPPDSDMDLNLIEQAPLTVAEKLQREFLVEWRRVSKAPEALFFVQFEKGDSYFHLHILVETVGVKSMVVGRYVSQIKEKLVTRIYRGVEPQLPNWFAVTKTRNGAGGGNKVVDDCYIPNYLLPKTQPELQWAWTNMDQYISACLNLAERKRLVAQHLTHVSQTQEQNKENQNPNSDAPVIRSKTSARYMELVGWLVDRGITSEKQWIQEDQASYISFNAASNSRSQIKAALDNASKIMSLTKTAPDYLVGQNPPEDISSNRIYRILEMNGYDPQYAASVFLGWAQKKFGKRNTIWLFGPATTGKTNIAEAIAHAVPFYGCVNWTNENFPFNDCVDKMVIWWEEGKMTAKVVESAKAILGGSKVRVDQKCKSSAQIDPTPVIVTSNTNMCAVIDGNSTTFEHQQPLQDRMFKFELTKRLEHDFGKVTKQEVKDFFRWASDHVTEVTHEFYVRKGGARKRPAPNDADISEPKRACPSVAQPSTSDAEAPVDYADRLARGQPLX

SEQ ID NO: 64 - protein, 623 aa, Adeno-associated virus 4; identical to SEQ ID NO: 62

SEQ ID NO: 65 - protein, 544 aa, Adeno-associated virus 4
MSDDSEMRAAAGGAAVEGGQGADGVGNASGDWHCDSTWSEGHVTTTSTRTWVLPTYNNHLYKRLGESLQSNTYNGFSTPWGYFDFNRFHCHFSPRDWQRLINNNWGMRPKAMRVKIFNIQVKEVTTSNGETTVANNLTSTVQIFADSSYELPYVMDAGQEGSLPPFPNDVFMVPQYGYCGLVTGNTSQQQTDRNAFYCLEYFPSQMLRTGNNFEITYSFEKVPFHSMYAHSQSLDRLMNPLIDQYLWGLQSTTTGTTLNAGTATTNFTKLRPTNFSNFKKNWLPGPSIKQQGFSKTANQNYKIPATGSDSLIKYETHSTLDGRWSALTPGPPMATAGPADSKFSNSQLIFAGPKQNGNTATVPGTLIFTSEEELAATNATDTDMWGNLPGGDQSNSNLPTVDRLTALGAVPGMVWQNRDIYYQGPIWAKIPHTDGHFHPSPLIGGFGLKHPPPQIFIKNTPVPANPATTFSSTPVNSFITQYSTGQVSVQIDWEIQKERSKRWNPEVQFTSNYGQQNSLLWAPDAAGKYTEPRAIGTRYLTHHL

SEQ ID NO: 66 - protein, 734 aa, Adeno-associated virus 4
MTDGYLPDWLEDNLSEGVREWWALQPGAPKPKANQQHQDNARGLVLPGYKYLGPGNGLDKGEPVNAADAAALEHDKAYDQQLKAGDNPYLKYNHADAEFQQRLQGDTSFGGNLGRAVFQAKKRVLEPLGLVEQAGETAPGKKRPLIESPQQPDSSTGIGKKGKQPAKKKLVFEDETGAGDGPPEGSTSGAMSDDSEMRAAAGGAAVEGGQGADGVGNASGDWHCDSTWSEGHVTTTSTRTWVLPTYNNHLYKRLGESLQSNTYNGFSTPWGYFDFNRFHCHFSPRDWQRLINNNWGMRPKAMRVKIFNIQVKEVTTSNGETTVANNLTSTVQIFADSSYELPYVMDAGQEGSLPPFPNDVFMVPQYGYCGLVTGNTSQQQTDRNAFYCLEYFPSQMLRTGNNFEITYSFEKVPFHSMYAHSQSLDRLMNPLIDQYLWGLQSTTTGTTLNAGTATTNFTKLRPTNFSNFKKNWLPGPSIKQQGFSKTANQNYKIPATGSDSLIKYETHSTLDGRWSALTPGPPMATAGPADSKFSNSQLIFAGPKQNGNTATVPGTLIFTSEEELAATNATDTDMWGNLPGGDQSNSNLPTVDRLTALGAVPGMVWQNRDIYYQGPIWAKIPHTDGHFHPSPLIGGFGLKHPPPQIFIKNTPVPANPATTFSSTPVNSFITQYSTGQVSVQIDWEIQKERSKRWNPEVQFTSNYGQQNSLLWAPDAAGKYTEPRAIGTRYLTHHL

SEQ ID NO: 67 - protein, 598 aa, Adeno-associated virus 4
TAPGKKRPLIESPQQPDSSTGIGKKGKQPAKKKLVFEDETGAGDGPPEGSTSGAMSDDSEMRAAAGGAAVEGGQGADGVGNASGDWHCDSTWSEGHVTTTSTRTWVLPTYNNHLYKRLGESLQSNTYNGFSTPWGYFDFNRFHCHFSPRDWQRLINNNWGMRPKAMRVKIFNIQVKEVTTSNGETTVANNLTSTVQIFADSSYELPYVMDAGQEGSLPPFPNDVFMVPQYGYCGLVTGNTSQQQTDRNAFYCLEYFPSQMLRTGNNFEITYSFEKVPFHSMYAHSQSLDRLMNPLIDQYLWGLQSTTTGTTLNAGTATTNFTKLRPTNFSNFKKNWLPGPSIKQQGFSKTANQNYKIPATGSDSLIKYETHSTLDGRWSALTPGPPMATAGPADSKFSNSQLIFAGPKQNGNTATVPGTLIFTSEEELAATNATDTDMWGNLPGGDQSNSNLPTVDRLTALGAVPGMVWQNRDIYYQGPIWAKIPHTDGHFHPSPLIGGFGLKHPPPQIFIKNTPVPANPATTFSSTPVNSFITQYSTGQVSVQIDWEIQKERSKRWNPEVQFTSNYGQQNSLLWAPDAAGKYTEPRAIGTRYLTHHL

SEQ ID NO: 68 - DNA, 129 bp, Adeno-associated virus 4
ttggccactccctctatgcgcgctcgctcactcactcggccctgcggccagaggccggcagtctggagacctttggtgtccagggcagggccgagtgagtgagcgagcgcgcatagagggagtggccaa

SEQ ID NO: 69 - DNA, 125 bp, Adeno-associated virus 4
ttggccactccctctatgcgcgctcgctcactcactcggccctggagaccaaaggtctccagactgccggcctctggccggcagggccgagtgagtgagcgagcgcgcatagagggagtggccaa

SEQ ID NO: 70 - DNA, 4768 bp, Adeno-associated virus 4
  modified_base (3009)..(3009): Unknown
ttggccactccctctatgcgcgctcgctcactcactcggccctggagaccaaaggtctccagactgccggcctctggccggcagggccgagtgagtgagcgagcgcgcatagagggagtggccaactccatcatctaggtttgcccactgacgtcaatgtgacgtcctagggttagggaggtccctgtattagcagtcacgtgagtgtcgtatttcgcggagcgtagcggagcgcataccaagctgccacgtcacagccacgtggtccgtttgcgacagtttgcgacaccatgtggtcaggagggtatataaccgcgagtgagccagcgaggagctccattttgcccgcgaattttgaacgagcagcagccatgccggggttctacgagatcgtgctgaaggtgcccagcgacctggacgagcacctgcccggcatttctgactcttttgtgagctgggtggccgagaaggaatgggagctgccgccggattctgacatggacttgaatctgattgagcaggcacccctgaccgtggccgaaaagctgcaacgcgagttcctggtcgagtggcgccgcgtgagtaaggccccggaggccctcttctttgtccagttcgagaagggggacagctacttccacctgcacatcctggtggagaccgtgggcgtcaaatccatggtggtgggccgctacgtgagccagattaaagagaagctggtgacccgcatctaccgcggggtcgagccgcagcttccgaactggttcgcggtgaccaagacgcgtaatggcgccggaggcgggaacaaggtggtggacgactgctacatccccaactacctgctccccaagacccagcccgagctccagtgggcgtggactaacatggaccagtatataagcgcctgtttgaatctcgcggagcgtaaacggctggtggcgcagcatctgacgcacgtgtcgcagacgcaggagcagaacaaggaaaaccagaaccccaattctgacgcgccggtcatcaggtcaaaaacctccgccaggtacatggagctggtcgggtggctggtggaccgcgggatcacgtcagaaaagcaatggatccaggaggaccaggcgtcctacatctccttcaacgccgcctccaactcgcggtcacaaatcaaggccgcgctggacaatgcctccaaaatcatgagcctgacaaagacggctccggactacctggtgggccagaacccgccggaggacatttccagcaaccgcatctaccgaatcctcgagatgaacgggtacgatccgcagtacgcggcctccgtcttcctgggctgggcgcaaaagaagttcgggaagaggaacaccatctggctctttgggccggccacgacgggtaaaaccaacatcgcggaagccatcgcccacgccgtgcccttctacggctgcgtgaactggaccaatgagaactttccgttcaacgattgcgtcgacaagatggtgatctggtgggaggagggcaagatgacggccaaggtcgtagagagcgccaaggccatcctgggcggaagcaaggtgcgcgtggaccaaaagtgcaagtcatcggcccagatcgacccaactcccgtgatcgtcacctccaacaccaacatgtgcgcggtcatcgacggaaactcgaccaccttcgagcaccaacaaccactccaggaccggatgttcaagttcgagctcaccaagcgcctggagcacgactttggcaaggtcaccaagcaggaagtcaaagactttttccggtgggcgtcagatcacgtgaccgaggtgactcacgagttttacgtcagaaagggtggagctagaaagaggcccgcccccaatgacgcagatataagtgagcccaagcgggcctgtccgtcagttgcgcagccatcgacgtcagacgcggaagctccggtggactacgcggacaggtaccaaaacaaatgttctcgtcacgtgggtatgaatctgatgctttttccctgccggcaatgcgagagaatgaatcagaatgtggacatttgcttcacgcacggggtcatggactgtgccgagtgcttccccgtgtcagaatctcaacccgtgtctgtcgtcagaaagcggacgtatcagaaactgtgtccgattcatcacatcatggggagggcgcccgaggtggcctgctcggcctgcgaactggccaatgtggacttggatgactgtgacatggaacaataaatgactcaaaccagatatgactgacggttaccttccagattggctagaggacaacctctctgaaggcgttcgagagtggtgggcgctgcaacctggagcccctaaacccaaggcaaatcaacaacatcaggacaacgctcggggtcttgtgcttccgggttacaaatacctcggacccggcaacggactcgacaagggggaacccgtcaacgcagcggacgcggcagccctcgagcacgacaaggcctacgaccagcagctcaaggccggtgacaacccctacctcaagtacaaccacgccgacgcggagttccagcagcggcttcagggcgacacaccgtttgggggcaacctcggcagagcagtcttccaggccaaaaagagggttcttgaacctcttggtctggttgagcaagcgggtgagacggctcctggaaagaagagaccgttgattgaatccccccagcagcccgactcctccacgggtatcggcaaaaaaggcaagcagccggctaaaaagaagctcgttttcgaagacgaaactggagcaggcgacggaccccctgagggatcaacttccggagccatgtctgatgacagtgagatgcgtgcagcagctggcggagctgcagtcgagggsggacaaggtgccgatggagtgggtaatgcctcgggtgattggcattgcgattccacctggtctgagggccacgtcacgaccaccagcaccagaacctgggtcttgcccacctacaacaaccacctntacaagcgactcggagagagcctgcagtccaacacctacaacggattctccaccccctggggatactttgacttcaaccgcttccactgccacttctcaccacgtgactggcagcgactcatcaacaacaactggggcatgcgacccaaagccatgcgggtcaaaatcttcaacatccaggtcaaggaggtcacgacgtcgaacggcgagacaacggtggctaataaccttaccagcacggttcagatctttgcggactcgtcgtacgaactgccgtacgtgatggatgcgggtcaagagggcagcctgcctccttttcccaacgacgtctttatggtgccccagtacggctactgtggactggtgaccggcaacacttcgcagcaacagactgacagaaatgccttctactgcctggagtactttccttcgcagatgctgcggactggcaacaactttgaaattacgtacagttttgagaaggtgcctttccactcgatgtacgcgcacagccagagcctggaccggctgatgaaccctctcatcgaccagtacctgtggggactgcaatcgaccaccaccggaaccaccctgaatgccgggactgccaccaccaactttaccaagctgcggcctaccaacttttccaactttaaaaagaactggctgcccgggccttcaatcaagcagcagggcttctcaaagactgccaatcaaaactacaagatccctgccaccgggtcagacagtctcatcaaatacgagacgcacagcactctggacggaagatggagtgccctgacccccggacctccaatggccacggctggacctgcggacagcaagttcagcaacagccagctcatctttgcggggcctaaacagaacggcaacacggccaccgtacccgggactctgatcttcacctctgaggaggagctggcagccaccaacgccaccgatacggacatgtggggcaacctacctggcggtgaccagagcaacagcaacctgccgaccgtggacagactgacagccttgggagccgtgcctggaatggtctggcaaaacagagacatttactaccagggtcccatttgggccaagattcctcataccgatggacactttcacccctcaccgctgattggtgggtttgggctgaaacacccgcctcctcaaatttttatcaagaacaccccggtacctgcgaatcctgcaacgaccttcagctctactccggtaaactccttcattactcagtacagcactggccaggtgtcggtgcagattgactgggagatccagaaggagcggtccaaacgctggaaccccgaggtccagtttacctccaactacggacagcaaaactctctgttgtgggctcccgatgcggctgggaaatacactgagcctagggctatcggtacccgctacctcacccaccacctgtaataacctgttaatcaataaaccggtttattcgtttcagttgaactttggtctccgtgtccttcttatcttatctcgtttccatggctactgcgtacataagcagcggcctgcggcgcttgcgcttcgcggtttacaactgccggttaatcagtaacttctggcaaaccatgatgatggagttggccactccctctatgcgcgctcgctcactcactcggccctggagaccaaaggtctccagactgccggcctctggccggcagggccgagtgagtgagcgagcgcgcatagagggagtggccaa

SEQ ID NO: 71 - DNA, 3098 bp, Adeno-associated virus
gaattcgccctttctacggctgcgtcaactggaccaatgagaactttcccttcaacgattgcgtcgacaagatggtgatctggtgggaggagggcaagatgacggccaaggtcgtggagtccgccaaggccattctcggcggcagcaaggtgcgcgtggaccaaaagtgcaagtcttccgcccagatcgatcccacccccgtgatcgtcacttccaacaccaacatgtgcgctgtgattgacgggaacagcaccaccttcgagcaccagcagccgttacaagaccggatgttcaaatttgaactcacccgccgtctggagcacgactttggcaaggtgacaaagcaggaagtcaaagagttcttccgctgggcgcaggatcacgtgaccgaggtggcgcatgagttctacgtcagaaagggtggagccaacaagagacccgcccccgatgacgcggataaaagcgagcccaagcgggcctgcccctcagtcgcggatccatcgacgtcagacgcggaaggagctccggtggactttgccgacaggtaccaaaacaaatgttctcgtcacgcgggcatgcttcagatgctgtttccctgcaagacatgcgagagaatgaatcagaatttcaacatttgcttcacgcacgggaccagagactgttcagaatgtttccccggcgtgtcagaatctcaaccggtcgtcagaaagaggacgtatcggaaactctgtgccattcatcatctgctggggcgggctcccgagattgcttgctcggcctgcgatctggtcaacgtggacctggatgaccgtgtttctgagcaataaatgacttaaaccaggtatggctgccgatggttatcttccagattggctcgaggacaacctctctgagggcattcgcgagtggtgggacttgaaacctggagccccgaaacccaaagccaaccagcaaaagcaggacgacggccggggtctggtgcttcctggctacaagtacctcggacccttcaacggactcgacaagggagagccggtcaacgaggcagacgccgcggccctcgagcacgacaaggcctacgacaagcagctcgagcagggggacaacccgtacctcaagtacaaccacgccgacgccgagtttcaggagcgtcttcaagaagatacgtcttttgggggcaacctcgggcgagcagtcttccaggccaagaagcgggttctcgaacctctcggtctggttgaggaaggcgctaagacggctcctggaaagaagagacccatagaatcccccgactcctccacgggcatcggcaagaaaggccagcagcccgctaaaaagaagctcaactttgggcagactggcgactcagagtcagtgcccgacccccaacctctcggagaacctcccgccgcgccctcaggtctgggatctggtacaatggctgcaggcggtggcgcaccaatggcagacaataacgaaggcgccgacggagtgggtaatgcctccggaaattggcattgcgattccacatggctgggcgacagagtcatcaccaccagcacccgcacctgggccctgcccacctacaacaaccacctctacaagcagatatcaagtcagagcggggctaccaacgacaaccacttcttcggctacagcaccccctggggctattttgacttcaacagattccactgccacttctcaccacgtgactggcagcgactcatcaacaacaactggggattccggcccagaaagctgcggttcaagttgttcaacatccaggtcaaggaggtcacgacgaacgacggcgttacgaccatcgctaataaccttaccagcacgattcaggtcttctcggactcggagtaccaactgccgtacgtcctcggctctgcgcaccagggctgcctccctccgttccctgcggacgtgttcatgattcctcagtacggatatctgactctaaacaacggcagtcagtctgtgggacgttcctccttctactgcctggagtactttccttctcagatgctgagaacgggcaataactttgaattcagctacacctttgaggaagtgcctttccacagcagctatgcgcacagccagagcctggaccggctgatgaatcccctcatcgaccagtacctgtactacctggcccggacccagagcactacggggtccacaagggagctgcagttccatcaggctgggcccaacaccatggccgagcaatcaaagaactggctgcccggaccctgttatcggcagcagagactgtcaaaaaacatagacagcaacaacaacagtaactttgcctggaccggggccactaaataccatctgaatggtagaaattcattaaccaacccgggcgtagccatggccaccaacaaggacgacgaggaccagttctttcccatcaacggagtgctggtttttggcgaaacgggggctgccaacaagacaacgctggaaaacgtgctaatgaccagcgaggaggagatcaaaaccaccaatcccgtggctacagaagaatacggtgtggtctccagcaacctgcaatcgtctacggccggaccccagacacagactgtcaacagccagggggctctgcccggcatggtctggcagaaccgggacgtgtacctgcagggtcccatctgggccaaaattcctcacacggacggcaactttcacccgtctcccctgatgggcggatttggactcaaacacccgcctcctcaaattctcatcaaaaacaccccggtacctgctaatcctccagaggtgtttactcctgccaagtttgcctcatttatcacgcagtacagcaccggccaggtcagcgtggagatcgagtgggaactgcagaaagaaaacagcaaacgctggaatccagagattcagtacacctcaaattatgccaagtctaataatgtggaatttgctgtcaacaacgaaggggtttatactgagcctcgccccattggcacccgttacctcacccgtaacctgtaattgcctgttaatcaataaaccggttaattcgtttcagttgaactttggtctctgcgaagggcgaattc

SEQ ID NO: 72 - protein, 728 aa, Artificial Sequence
  Description of Artificial Sequence: Synthetic polypeptide
MAADGYLPDWLEDNLSEGIREWWDLKPGAPKPKANQQKQDDGRGLVLPGYKYLGPFNGLDKGEPVNEADAAALEHDKAYDKQLEQGDNPYLKYNHADAEFQERLQEDTSFGGNLGRAVFQAKKRVLEPLGLVEEGAKTAPGKKRPIESPDSSTGIGKKGQQPAKKKLNFGQTGDSESVPDPQPLGEPPAAPSGLGSGTMAAGGGAPMADNNEGADGVGNASGNWHCDSTWLGDRVITTSTRTWALPTYNNHLYKQISSQSGATNDNHFFGYSTPWGYFDFNRFHCHFSPRDWQRLINNNWGFRPRKLRFKLFNIQVKEVTTNDGVTTIANNLTSTIQVFSDSEYQLPYVLGSAHQGCLPPFPADVFMIPQYGYLTLNNGSQSVGRSSFYCLEYFPSQMLRTGNNFEFSYTFEEVPFHSSYAHSQSLDRLMNPLIDQYLYYLARTQSTTGSTRELQFHQAGPNTMAEQSKNWLPGPCYRQQRLSKNIDSNNNSNFAWTGATKYHLNGRNSLTNPGVAMATNKDDEDQFFPINGVLVFGETGAANKTTLENVLMTSEEEIKTTNPVATEEYGVVSSNLQSSTAGPQTQTVNSQGALPGMVWQNRDVYLQGPIWAKIPHTDGNFHPSPLMGGFGLKHPPPQILIKNTPVPANPPEVFTPAKFASFITQYSTGQVSVEIEWELQKENSKRWNPEIQYTSNYAKSNNVEFAVNNEGVYTEPRPIGTRYLTRNL

SEQ ID NO: 73 - DNA, 2495 bp, Artificial Sequence
  Description of Artificial Sequence: Synthetic polynucleotide
gaattcgccctttctacggctgcgtcaactagaccaatgagaactttcccttcaacgattgcgtcgacaagatggtgatctggtgggaggagggcaagatgacggccaaggtcgtggagtccgccaaggccattcatcatctgctggggcgggctcccgagattgcttgctcggcctgcgatctggtcaacgtggacctggatgactgtgtttctgagcaataaatgacttaaaccaggtatggctgccgatggttatcttccagattggctcgaggacaacctctctgagggcattcgcgagtggtgggacttgaaacctggagccccgaaacccaaagccaaccagcaaaagcaggacgacggccggggtctggtgcttcctggctacaagtacctcggacccttcaacggactcgacaagggagagccggtcaacgaggcagacgccgcggccctcgagcacgacaaggcctacgacaagcagctcgagcagggggacaacccgtacctcaagtacaaccacgccgacgccgagtttcaggagcgtcttcaagaagatacgtcttttgggggcaacctcgggcgagcagtcttccaggccaagaagcgggttctcgaacctctcggtctggttgaggaaggcgctaagacggctcctggaaagaagagacccatagaatcccccgactcctccacgggcatcggcaagaaaggccagcagcccgctaaaaagaagctcaactttgggcagactggcgactcagagtcagtgcccgaccctcaaccaatcggagaaccccccgcaggcccctctggtctgggatctggtacaatggctgcaggcggtggcgctccaatggcagacaataacgaaggcgccgacggagtgggtaatgcctccggaaattggcattgcgattccacatggctgggcgacagagtcatcaccaccagcacccgcacctgggccctgcccacctacaacaaccacctctacaagcagatatcaagtcagagcggggctaccaacgacaaccacttcttcggctacagcaccccctggggctattttgacttcaacagattccactgccacttctcaccacgtgactggcagcgactcatcaacaacaactggggattccggcccagaaagctgcggttcaagttgttcaacatccaggtcaaggaggtcacgacgaacgacggcgttacgaccatcgctaataaccttaccagcacgattcaggtcttctcggactcggagtaccaactgccgtacgtcctcggctctgcgcaccagggctgcctccctccgttccctgcggacgtgttcatgattcctcagtacggatatctgactctaaacaacggcagtcagtctgtgggacgttcctccttctactgcctggagtactttccttctcagatgctgagaacgggcaataactttgaattcagctacacctttgaggaagtgcctttccacagcagctatgcgcacagccagagcctggaccggctgatgaatcccctcatcgaccagtacctgtactacctggcccggacccagagcactacggggtccacaagggagctgcagttccatcaggctgggcccaacaccatggccgagcaatcaaagaactggctgcccggaccctgttatcggcagcagagactgtcaaaaaacatagacagcaacaacaccagtaactttgcctggaccggggccactaaataccatctgaatggtagaaattcattaaccaacccgggcgtagccatggccaccaacaaggacgacgaggaccagttctttcccatcaacggagtgctggtttttggcaaaacgggggctgccaacaagacaacgctggaaaacgtgctaatgaccagcgaggaggagatcaaaaccaccaatcccgtggctacagaacagtacggtgtggtctccagcaacctgcaatcgtctacggccggaccccagacacagactgtcaacagccagggggctctgcccggcatggtctggcagaaccgggacgtgtacctgcagggtcccatctgggccaaaattcctcacacggacggcaactttcacccgtctcccctgatgggcggatttggactcaaacacccgcctcctcaaattctcatcaaaaacaccccggtacctgctaatcctccagaggtgtttactcctgccaagtttgcctcatttatcacgcagtacagcaccggccaggtcagcgtggagatcgagtgggaactgcagaaagaaaacagcaaacgctggaatccagagattcagtacacctcaaattatgccaagtctaataatgtggaatttgctgtcaacaacgaaggggtttatactgagcctcgccccattggcacccgttacctcacccgtaacctgtaattgcctgttaatcaataaaccggttaattcgtttcagttgaactttggtctctgcgaagggcgaattc

SEQ ID NO: 74 - protein, 728 aa, Artificial Sequence
  Description of Artificial Sequence: Synthetic polypeptide
MAADGYLPDWLEDNLSEGIREWWDLKPGAPKPKANQQKQDDGRGLVLPGYKYLGPFNGLDKGEPVNEADAAALEHDKAYDKQLEQGDNPYLKYNHADAEFQERLQEDTSFGGNLGRAVFQAKKRVLEPLGLVEEGAKTAPGKKRPIESPDSSTGIGKKGQQPAKKKLNFGQTGDSESVPDPQPIGEPPAGPSGLGSGTMAAGGGAPMADNNEGADGVGNASGNWHCDSTWLGDRVITTSTRTWALPTYNNHLYKQISSQSGATNDNHFFGYSTPWGYFDFNRFHCHFSPRDWQRLINNNWGFRPRKLRFKLFNIQVKEVTTNDGVTTIANNLTSTIQVFSDSEYQLPYVLGSAHQGCLPPFPADVFMIPQYGYLTLNNGSQSVGRSSFYCLEYFPSQMLRTGNNFEFSYTFEEVPFHSSYAHSQSLDRLMNPLIDQYLYYLARTQSTTGSTRELQFHQAGPNTMAEQSKNWLPGPCYRQQRLSKNIDSNNTSNFAWTGATKYHLNGRNSLTNPGVAMATNKDDEDQFFPINGVLVFGKTGAANKTTLENVLMTSEEEIKTTNPVATEQYGVVSSNLQSSTAGPQTQTVNSQGALPGMVWQNRDVYLQGPIWAKIPHTDGNFHPSPLMGGFGLKHPPPQILIKNTPVPANPPEVFTPAKFASFITQYSTGQVSVEIEWELQKENSKRWNPEIQYTSNYAKSNNVEFAVNNEGVYTEPRPIGTRYLTRNL

SEQ ID NO: 75 - DNA, 2504 bp, Artificial Sequence
  Description of Artificial Sequence: Synthetic polynucleotide
gaattcgccctttctacggctgcgtcaactggaccaatgagaactttcccttcaacgattgcgtcgacaagatggtgatctggtgggaggagggcaagatgacggccaaggtcgtggagtccgccaaggccattcatcatctgctggggcgggctcccgagattgcttgctcggcctgcgatctggtcaacgtggacctggatgactgtgtttctgagcaataaatgacttaaaccaggtatggctgccgatggttatcttccagattggctcgaggacaacctctctgagggcattcgcgagtggtgggacttgaaacctggagccccgaaacccaaagccaaccagcaaaagcaggacgacggccggggtctggtgcttcctggctacaagtacctcggacccttcaacggactcgacaagggagagccggtcaacgaggcagacgccgcggccctcgagcacgacaaggcctacgacaagcagctcgagcagggggacaacccgtacctcaagtacaaccacgccgacgccgagtttcaggagcgtcttcaagaagatacgtcttttgggggcaacctcgggcgagcagtcttccaggccaagaagcgggttctcgaacctctcggtctggttgaggaaggcgctaagacggctcctggaaagaagagacccatagaatcccccgactcctccacgggcatcggcaagaaaggccagcagcccgctaaaaagaagctcaactttgggcagactggcgactcagagtcagtgcccgaccctcaaccaatcggagaaccccccgcaggcccctctggtctgggatctggtacaatggctgcaggcggtggcgctccaatggcagacaataacgaaggcgccgacggagtgggtaatgcctccggaaattggcattgcgattccacatggctgggcgacagagtcatcaccaccagcacccgcacctgggccctgcccacctacaacaaccacctctacaagcagatatcaagtcagagcggggctaccaacgacaaccacttcttcggctacagcaccccctggggctattttgacttcaacagattccactgccacttctcatcacgtgactggcagcgactcatcaacaacaactggggattccggcccaagagactcaacttcaagctcttcaacatccaggtcaaggaggtcacgcagaatgaaggcaccaagaccatcgccaataaccttaccagcacgattcaggtctttacggactcggaataccggctcccgtacgtcctcggctctgcgcaccagggctgcctgcctccgttcccggcggacgtcttcatgattcctcagtacgggtacctgactctgaacaacggcagtcaggccgtgggccgttcctccttctactgcctggagtactttccttctcaaatgctgagaacgggcaacaactttgagttcagctaccagtttgaggacgtgccttttcacagcagctacgcgcacagccaaagcctggaccggctgatgaaccccctcatcgaccagtacctgtactacctgtctcggactcagtccacgggaggtaccgcaggaactcagcagttgctattttctcaggccgggcctaataacatgtcggctcaggccaaaaactggctacccgggccctgctaccggcagcaacgcgtctccacgacactgtcgcaaaataacaacagcaactttgcttggaccggtgccaccaagtatcatctgaatggcagagactctctggtaaatcccggtgtcgctatggcaacgcacaaggacgacgaagagcgattttttccatccagcggagtcttgatgtttgggaaacagggagctggaaaagacaacgtggactatagcagcgttatgctaaccagtgaggaagaaatcaaaaccaccaacccagtggccacagaacagtacggcgtggtggccgataacctgcaacagcaaaacgccgctcctattgtaggggccgtcaacagtcaaggagccttacctggcatggtctggcagaaccgggacgtgtacctgcagggtcctatctgggccaagattcctcacacggacggcaactttcatccttcgccgctgatgggaggctttggactgaaacacccgcctcctcagatcctgattaagaatacacctgttcccgcggatcctccaactaccttcagtcaagccaagccggcgtcgttcatcacgcagtacagcaccggacaggtcagcgtggaaattgaatgggagctgcagaaagagaacagcaagcgctggaacccagagattcagtatacttccaactactacaaatctacaaatgtggactttgctgtcaatactgagggtacttattcagagcctcgccccattggcacccgttacctcacccgtaacctgtaattgcctgttaatcaataaaccggttaattcgtttcagttgaactttggtctctgcgaagggcgaattc

SEQ ID NO: 76 - protein, 731 aa, Artificial Sequence
  Description of Artificial Sequence: Synthetic polypeptide
MAADGYLPDWLEDNLSEGIREWWDLKPGAPKPKANQQKQDDGRGLVLPGYKYLGPFNGLDKGEPVNEADAAALEHDKAYDKQLEQGDNPYLKYNHADAEFQERLQEDTSFGGNLGRAVFQAKKRVLEPLGLVEEGAKTAPGKKRPIESPDSSTGIGKKGQQPAKKKLNFGQTGDSESVPDPQPIGEPPAGPSGLGSGTMAAGGGAPMADNNEGADGVGNASGNWHCDSTWLGDRVITTSTRTWALPTYNNHLYKQISSQSGATNDNHFFGYSTPWGYFDFNRFHCHFSSRDWQRLINNNWGFRPKRLNFKLFNIQVKEVTQNEGTKTIANNLTSTIQVFTDSEYRLPYVLGSAHQGCLPPFPADVFMIPQYGYLTLNNGSQAVGRSSFYCLEYFPSQMLRTGNNFEFSYQFEDVPFHSSYAHSQSLDRLMNPLIDQYLYYLSRTQSTGGTAGTQQLLFSQAGPNNMSAQAKNWLPGPCYRQQRVSTTLSQNNNSNFAWTGATKYHLNGRDSLVNPGVAMATHKDDEERFFPSSGVLMFGKQGAGKDNVDYSSVMLTSEEEIKTTNPVATEQYGVVADNLQQQNAAPIVGAVNSQGALPGMVWQNRDVYLQGPIWAKIPHTDGNFHPSPLMGGFGLKHPPPQILIKNTPVPADPPTTFSQAKPASFITQYSTGQVSVEIEWELQKENSKRWNPEIQYTSNYYKSTNVDFAVNTEGTYSEPRPIGTRYLTRNL

SEQ ID NO: 77 - DNA, 3128 bp, Artificial Sequence
  Description of Artificial Sequence: Synthetic polynucleotide
gaattcgccctttctacggctgcgtcaactggaccaatgagaactttcccttcaacgattgcgtcgacaagatggtgatctggtgggaggagggcaagatgacggccaaggtcgtggagtccgccaaggccattctcggcggcagcaaggtgcgcgtggaccaaaagtgcaagtcttccgcccagatcgatcccacccccgtgatcgtcacttccaacaccaacatgtgcgccgtgattgacgggaacagcaccaccttcgagcaccagcagccgttacaagaccggatgttcaaatttgaactcacccgccgtctggagcacgactttggcaaggtgacaaagcaggaagtcaaagagttcttccgctgggcgcaggatcacgtgaccgaggtggcgcatgagttctacgtcagaaagggtggagccaacaagagacccgcccccgatgacgcggataaaagcgagcccaagcgggcctgcccctcagtcgcggatccatcgacgtcagacgcggaaggagctccggtggactttgccgacaggtaccaaaacaaatgttctcgtcacgcgggcatgcttcagatgctgtttccctgcaagacatgcgagagaatgaatcagaatttcaacatttgcttcacgcacgggaccagagactgttcagaatgtttccccggcgtgtcagaatctcaaccggtcgtcagaaagaggacgtatcggaaactctgtgccattcatcatctgctagggcgggctcccgagattgcttgctcggcctgcgatctggtcaacgtggacctggatgactgtgtttctgagcaataaatgacttaaaccaggtatggctgccgatggttatcttccagattggctcgaggacaacctctctgagggcattcgcgagtggtgggacttgaaacctggagccccgaaacccaaagccaaccagcaaaagcaggacgacggccggggtctggtgcttcctggctacaagtacctcggacccttcaacggactcgacaagggggagcccgtcaacgcggcggacgcagcggccctcgagcacgacaaggcctacgaccagcagctcaaagcgggtgacaatccgtacctgcggtataaccacgccgacgccgagtttcaggagcgtctgcaagaagatacgtcttttgggggcaacctcgggcgagcagtcttccaggccaagaagcgggttctcgaacctctcggtctggttgaggaaggcgctaagacggctcctggaaagaagagaccggtagagccatcaccccagcgttctccagactcctctacgggcatcggcaagacaggccagcagcccgcgaaaaagagactcaactttgggcagactggcgactcagagtcagtgcccgaccctcaaccaatcggagaaccccccgcaggcccctctggtctgggatctggtacaatggctgcaggcggtggcgctccaatggcagacaataacgaaggcgccgacggagtgggtagttcctcaggaaattggcattgcgattccacatggctgggcgacagagtcatcaccaccagcacccgaacctgggccctccccacctacaacaaccacctctacaagcaaatctccaacgggacatcgggaggaagcaccaacgacaacacctacttcggctacagcaccccctgggggtattttgactttaacagattccactgccacttctcaccacgtgactggcagcgactcatcaacaacaactggggattccggcccaagagactcaacttcaagctcttcaacatccaggtcaaggaggtcacgcagaatgaaggcaccaagaccatcgccaataaccttaccagcacgattcaggtctttacggactcggaataccagctcccgtacgtcctcggctctgcgcaccagggctgcctgcctccgttcccggcggacgtcttcatgattcctcagtacgggtacctgactctgaacaacggcagtcaggccgtgggccgttcctccttctactgcctggagtactttccttctcaaatgctgagaacgggcaacaactttgagttcagctaccagtttgaggacgtgccttttcacagcagctacgcgcacagccaaagcctggaccggctgatgaaccccctcatcgaccagtacctgtactacctgtctcggactcagtccacgggaggtaccgcaggaactcagcagttgctattttctcaggccgggcctaataacatgtcggctcaggccaaaaactggctacccgggccctgctaccggcagcaacgcgtctccacgacactgtcgcaaaataacaacagcaactttgcttggaccggtgccaccaagtatcatctgaatggcagagactctctggtaaatcccggtgtcgctatggcaacgcacaaggacgacgaagagcgattttttccatccagcggagtcttgatgtttgggaaacagggagctggaaaagacaacgtggactatagcagcgttatgctaaccagtgaggaagaaatcaaaaccaccaacccagtggccacagaacagtacggcgtggtggccgataacctgcaacagcaaaacgccgctcctattgtaggggccgtcaacagtcaaggagccttacctggcatggtctggcagaaccgggacgtgtacctgcagggtcctatctgggccaagattcctcacacggacggcaactttcatccttcgccgctgatgggaggctttggactgaaacacccgcctcctcagatcctgattaagaatacacctgttcccgcggatcctccaactaccttcagtcaagccaagctggcgtcgttcatcacgcagtacagcaccggacaggtcagcgtggaaattgaatgggagctgcagaaagagaacagcaagcgctggaacccagagattcagtatacttccaactactacaaatctacaaatgtggactttgctgtcaatactgagggtacttattcagagcctcgccccattggcacccgttacctcacccgtaacctgtaattgcctgttaatcaataaaccggctaattcgtttcagttgaactttggtctctgcgaagggcgaattc

SEQ ID NO: 78 - protein, 738 aa, Artificial Sequence
  Description of Artificial Sequence: Synthetic polypeptide
MAADGYLPDWLEDNLSEGIREWWDLKPGAPKPKANQQKQDDGRGLVLPGYKYLGPFNGLDKGEPVNAADAAALEHDKAYDQQLKAGDNPYLRYNHADAEFQERLQEDTSFGGNLGRAVFQAKKRVLEPLGLVEEGAKTAPGKKRPVEPSPQRSPDSSTGIGKTGQQPAKKRLNFGQTGDSESVPDPQPIGEPPAGPSGLGSGTMAAGGGAPMADNNEGADGVGSSSGNWHCDSTWLGDRVITTSTRTWALPTYNNHLYKQISNGTSGGSTNDNTYFGYSTPWGYFDFNRFHCHFSPRDWQRLINNNWGFRPKRLNFKLFNIQVKEVTQNEGTKTIANNLTSTIQVFTDSEYQLPYVLGSAHQGCLPPFPADVFMIPQYGYLTLNNGSQAVGRSSFYCLEYFPSQMLRTGNNFEFSYQFEDVPFHSSYAHSQSLDRLMNPLIDQYLYYLSRTQSTGGTAGTQQLLFSQAGPNNMSAQAKNWLPGPCYRQQRVSTTLSQNNNSNFAWTGATKYHLNGRDSLVNPGVAMATHKDDEERFFPSSGVLMFGKQGAGKDNVDYSSVMLTSEEEIKTTNPVATEQYGVVADNLQQQNAAPIVGAVNSQGALPGMVWQNRDVYLQGPIWAKIPHTDGNFHPSPLMGGFGLKHPPPQILIKNTPVPADPPTTFSQAKLASFITQYSTGQVSVEIEWELQKENSKRWNPEIQYTSNYYKSTNVDFAVNTEGTYSEPRPIGTRYLTRNL

SEQ ID NO: 79 - DNA, 3084 bp, Artificial Sequence
  Description of Artificial Sequence: Synthetic polynucleotide
gaattcgccctttctacggctgcatcaactggaccaatgagaactttcccttcaacgattgcgtcgacaagatggtgatctggtgggaggagggcaagatgacggccaaggtcgtggagtccgccaaggccattctcggcggcagcaaggtgcgcgtggaccaaaagtgcaagtcgtccgcccagatcgaccccacccccgtgatcgtcacctccaacaccaacatgtgcgccgtgattgacgggaacagcaccaccttcgagcaccagcagccgttgcaggaccggatgttcaagttcgaactcacccgccgtctggagcacgactttggcaaggtgaccaagcaggaagtcaaagagttcttccgctgggcgcaggatcacgtgaccgaggtggcgcatgagttctacgtcagaaagggcggagccagcaaaagacccgcccccgatgacgcggatataagcgagcccaagcgggcctgcccctcagtcgcggatccatcgacgtcagacgcggaaggagctccggtggactttgccgacaggtaccaaaacaaatgttctcgtcacgcgggcatgcttcagatgctgtttccctgcaaaacgtgcgagaaaatgaatcagaatttcaacatttgcttcacgcacggggtcagagactgctcagaatgtttccccggtgcatcagaatctcaaccggtcgtcagaaaaaaaacgtatcagaaactgtgtgccattcatcatctgctggggcgggcacccgagattgcttgctcggcctgcgatctggtcaacgtggacctggacgactgtgtttctgagcaataaatgacttaaaccaggtatggctgccgatggttatcttccagattggcttgaggacaacctctctgagggcattcgcgagtggtgggacctgaaacctggagccccgaaacccaaagccaaccagcaaaagcaggacgacggccggggtctggtgcttcctggctacaagtacctcggacccttcaacggactcgacaagggggagcccgtcaacgcggcggacgcagcggccctcgagcacgacaaggcctacgaccagcagctcaaagcgggtgacaatccgtacctgcggtataaccacgccgacgccgagtttcaggagcgtctgcaagaagatacgtcttttgggggcaacctcgggcgagcagtcttccaggccaagaagcgggttctcgaacctctcggtctggttgaggaaggcgctaagacggctcctggaaagaagagaccggtagagccatcacctcagcgttcccccgactcctccacgggcatcggcaagaaaggccaccagcccgcgagaaagagactgaactttgggcagactggcgactcggagtcagtccccgaccctcaaccaatcggagaaccaccagcaggcccctctggtctgggatctggtacaatggctgcaggcggtggcgctccaatggcagacaataacgaaggcgccgacggagtgggtagttcctcaggaaattggcattgcgattccacatggctgggcgacagagtcatcaccaccagcacccgaacctgggccctgcccacctacaacaaccatctctacaagcaaatctccaacgggacatcgggaggaagcactaacgacaacacctactttggctacagcaccccctgggggtattttgacttcaacagattccactgccacttctcaccacgtgactggcagcgactcatcaacaataactggggattccggcccaagagactcaacttcaagctcttcaacatccaggtcaaggaggtcacgcagaatgaaggcaccaagaccatcgccaataaccttaccagcacgattcaggtgtttacggactcggaataccagctcccgtacgtccccggctctgcgcaccagggctgcctccctccgttcccggcggacgtcttcatgattcctcagtacgggtatctgaccctaaacaatggcagtcaggctgtgggccgttcctccttctactgcctggaatacttcccttctcaaatgctgaggacgggcaacaactttgaattcagctacaccttcgaggacgtgcctttccacagcagctacgcgcacagccagagcctggaccggctgatgaaccctctcatcgaccagtacctgtattacttatccagaactcagtccacaggaggaactcaaggtactcagcaattgttattttctcaagccgggcccgcaaacatgtcggctcaggccaagaactggctacctggaccgtgttaccgtcagcaacgagtttccacgacactgtcgcaaaacaacaacagcaattttgcttggaccggtgccaccaagtatcacctgaatggcagagactccctggttaatcccggcgttgccatggctacccacaaggacgacgaggagcgcttcttcccgtcaagcggagttctaatgtttggcaagcagggggctggaaaagacaatgtggactacagcagcgtgatgctcaccagcgaagaagaaattaaaactactaacccagtggctacagagcagtatggtgtggtggcagacaacctgcagcagaccaacggagctcccattgtgggaactgtcaacagccagggggccttacctggtatggtctggcaaaaccgggacgtgtacctgcagggccccatctgggccaaaattcctcacacggacggcaactttcatccttcgccgctgatgggaggctttggactgaaacacccgcctcctcagatcctggtgaaaaacactcctgttcctgcggatcctccgaccaccttcagccaggccaagctggcttcttttatcacgcagtacagcaccggacaggtcagcgtggaaatcgaatgggagctgcagaaagaaaacagcaagcgctggaacccagagattcagtatacttccaactactacaaatctacaaatgtggactttgctgtcaatactgagggtacttattcagagcctcgccccattggcactcgttatctcacccgtaatctgtaattgcttgttaatcaataaaccggt

SEQ ID NO: 80 - protein, 738 aa, Artificial Sequence
  Description of Artificial Sequence: Synthetic polypeptide
MAADGYLPDWLEDNLSEGIREWWDLKPGAPKPKANQQKQDDGRGLVLPGYKYLGPFNGLDKGEPVNAADAAALEHDKAYDQQLKAGDNPYLRYNHADAEFQERLQEDTSFGGNLGRAVFQAKKRVLEPLGLVEEGAKTAPGKKRPVEPSPQRSPDSSTGIGKKGHQPARKRLNFGQTGDSESVPDPQPIGEPPAGPSGLGSGTMAAGGGAPMADNNEGADGVGSSSGNWHCDSTWLGDRVITTSTRTWALPTYNNHLYKQISNGTSGGSTNDNTYFGYSTPWGYFDFNRFHCHFSPRDWQRLINNNWGFRPKRLNFKLFNIQVKEVTQNEGTKTIANNLTSTIQVFTDSEYQLPYVPGSAHQGCLPPFPADVFMIPQYGYLTLNNGSQAVGRSSFYCLEYFPSQMLRTGNNFEFSYTFEDVPFHSSYAHSQSLDRLMNPLIDQYLYYLSRTQSTGGTQGTQQLLFSQAGPANMSAQAKNWLPGPCYRQQRVSTTLSQNNNSNFAWTGATKYHLNGRDSLVNPGVAMATHKDDEERFFPSSGVLMFGKQGAGKDNVDYSSVMLTSEEEIKTTNPVATEQYGVVADNLQQTNGAPIVGTVNSQGALPGMVWQNRDVYLQGPIWAKIPHTDGNFHPSPLMGGFGLKHPPPQILVKNTPVPADPPTTFSQAKLASFITQYSTGQVSVEIEWELQKENSKRWNPEIQYTSNYYKSTNVDFAVNTEGTYSEPRPIGTRYLTRNL

SEQ ID NO: 81 - DNA, 3123 bp, Artificial Sequence
  Description of Artificial Sequence: Synthetic polynucleotide
gaattcgcccttggctgcgtcaactggaccaatgagaactttcccttcaacgattgcgtcgacaagatggtgatctggtgggaggagggcaagatgacggccaaggtcgtggagtccgccaaggccattctcggcggcagcaaggtgcgcgtggaccaaaagtgcaagtcgtccgcccagatcgaccccacccccgtgatcgtcacctccaacaccaacatgtgcgccgtgattgacgggaacagcaccaccttcgagcaccagcagccgttgcaggaccggatgttcaagttcgaactcacccgccgtctggagcacgactttggcaaggtgaccaagcaggaagtcaaagagttcttccgctgggcgcaggatcacgtgaccgaggtggcgcatgagttctacgtcagaaagggcggagccagcaaaagacccgcccccgatgacgcggatataagcgagcccaagcgggcctgcccctcagtcgcggatccatcgacgtcagacgcggaaggagctccggtggactttgccgacaggtaccaaaacaaatgttctcgtcacgcgggcatgctccagatgctgtttccctgcaaaacgtgcgagagaatgaatcagaatttcaacatttgcttcacgcacggggtcagagactgctcagaatgtttccccggtgcatcagaatctcaaccggtcgtcagaaaaaaaacgtatcagaaactgtgtgccattcatcatctgctggggcgggcacccgagattgcttgctcggcctgcgatctggtcaacgtggacctggacgactgtgtttctgagcaataaatgacttaaaccaggtatggctgccgatggttatcttccagattggcttgaggacaacctctctgagggcattcgcgagtggtgggacctgaaacctggagccccgaaacccaaagccaaccagcaaaagcaggacgacggccggggtctggtgcttcctggctacaagtacctcggacccttcaacggactcgacaagggggagcccgtcaacgcggcggacgcagcggccctcgagcacgacaaggcctacgaccagcagctcaaagcgggtgacaatccgtacctgcggtataaccacgccgacgccgagtttcaggagcgtctgcaagaagatacgtcttttgggggcaacctcgggcgagcagtcttccaggccaagaagcgggttctcgaacctctcggtctggttgaggaaggcgctaagacggctcctggaaagaagagaccggtagagccatcacctcagcgttcccccgactcctccacgggcatcggcaagaaaggccaccagcccgcgagaaagagactgaactttgggcagactggcgactcggagtcagtccccgaccctcaaccaatcggagaaccaccagcaggcccctctggtctgggatctggtacaatggctgcaggcggtggcgctccaatggcagacaataacgaaggcgccgacggagtgggtagttcctcaggaaattggcattgcgattccacatggctgggcgacagagtcatcaccaccagcacccgaacctgggccctgcccacctacaacaaccatctctacaagcaaatctccaacgggacatcgggaggaagcactaacgacaacacctactttggctacagcaccccctgggggtattttgacttcaacagattccactgccacttctcaccacgtgactggcagcgactcatcaacaataactggggattccggcccaagagactcaacttcaagctcttcaacatccaggtcaaggaggtcacgcagaatgaaggcaccaagaccatcgccaataaccttaccagcacgattcaggtgtttacggactcggaataccagctcccgtacgtcctcggctctgcgcaccagggctgcctccctccgttcccggcggacgtcttcatgattcctcagtacgggtatctgaccctaaacaatggcagtcaggctgtgggccgttcctccttctactgcctggaatacttcccttctcaaatgctgaggacgggcaacaactttgaattcagctacaccttcgaggacgtgcctttccacagcagctacgcgcacagccagagcctggaccggctgatgaaccctctcatcgaccagtacctgtattacttatccagaactcagtccacaggaggaactcaaggtactcagcaattgttattttctcaagccgggcccgcaaacatgtcggctcaggccaagaactggctacctggaccgtgttaccgtcagcaacgagtttccacgacactgtcgcaaaacaacaacagcaattttgcttggaccggtgccaccaagtatcacctgaatggcagagactccctggttaatcccggcgttgccatggctacccacaaggacgacgaggagcgcttcttcccgtcaagcggagttctaatgtttggcaagcagggggctggaaaagacaatgtggactacagcagcgtgatgctcaccagcgaagaagaaattaaaactactaacccagtggctacagagcagtatggtgtggtggcagacaacctgcagcagaccaacggagctcccattgtgggaactgtcaacagccagggggccttacctggtatggtctggcaaaaccgggacgtgtacctgcagggccccatctgggccaaaattcctcacacggacggcaactttcatccttcgccgctgatgggaggctttggactgaaacacccgcctcctcagatcctggtgaaaaacactcctgttcctgcggatcctccgaccaccttcagccaggccaagctggcttcttttatcacgcagtacagcaccggacaggtcagcgtggaaatcgaatgggagctgcagaaagaaaacagcaagcgctggaacccagagattcagtatacttccaactactacaaatctacaaatgtggactttgctgtcaatactgagggtacttattcagagcctcgccccattggcactcgttatctcacccgtaatctgtaattgcttgttaatcaataaaccggttaattcgtttcagttgaactttggtctctgcgaagggcgaattc

SEQ ID NO: 82 - protein, 738 aa, Artificial Sequence
  Description of Artificial Sequence: Synthetic polypeptide
MAADGYLPDWLEDNLSEGIREWWDLKPGAPKPKANQQKQDDGRGLVLPGYKYLGPFNGLDKGEPVNAADAAALEHDKAYDQQLKAGDNPYLRYNHADAEFQERLQEDTSFGGNLGRAVFQAKKRVLEPLGLVEEGAKTAPGKKRPVEPSPQRSPDSSTGIGKKGHQPARKRLNFGQTGDSESVPDPQPIGEPPAGPSGLGSGTMAAGGGAPMADNNEGADGVGSSSGNWHCDSTWLGDRVITTSTRTWALPTYNNHLYKQISNGTSGGSTNDNTYFGYSTPWGYFDFNRFHCHFSPRDWQRLINNNWGFRPKRLNFKLFNIQVKEVTQNEGTKTIANNLTSTIQVFTDSEYQLPYVLGSAHQGCLPPFPADVFMIPQYGYLTLNNGSQAVGRSSFYCLEYFPSQMLRTGNNFEFSYTFEDVPFHSSYAHSQSLDRLMNPLIDQYLYYLSRTQSTGGTQGTQQLLFSQAGPANMSAQAKNWLPGPCYRQQRVSTTLSQNNNSNFAWTGATKYHLNGRDSLVNPGVAMATHKDDEERFFPSSGVLMFGKQGAGKDNVDYSSVMLTSEEEIKTTNPVATEQYGVVADNLQQTNGAPIVGTVNSQGALPGMVWQNRDVYLQGPIWAKIPHTDGNFHPSPLMGGFGLKHPPPQILVKNTPVPADPPTTFSQAKLASFITQYSTGQVSVEIEWELQKENSKRWNPEIQYTSNYYKSTNVDFAVNTEGTYSEPRPIGTRYLTRNL

SEQ ID NO: 83 - DNA, 3122 bp, Artificial Sequence
  Description of Artificial Sequence: Synthetic polynucleotide
gaattcgccctttctacggctgcgtcaactggaccaatgagaactttcccttcaacgattgcgtcgacaagatggtgatctggtgggaggagggcaagatgacggccaaggtcgtggagtccgccaaggccattctcggcggcagcaaggtgcgtgtggaccaaaagtgcaagtcttccgcccagatcgatcccacccccgtgatcgtcacctccaacaccaacatgtgcgccgtgattgacgggaacagcgccaccttcgagcaccagcagccgttgcaggaccggatgttcaaatttgaactcacccgccgtctggagcatgactttggcaaggtgacgaagcaggaagtcaaagagttcttccgctgggcgcaggatcacgtgaccgaggtggcgcatgagttccacgtcagaaagggtggagccaacaagagacccgcccccgatgacgcggatataagcgagcccaagcgggcctgcccctcagtcgcggatccatcgacgtcagacgcggaaggagctccggtggactttgccgacaggtaccaaaacaaatgttctcgtcacgcgggcatgcttcagatgctgtttccctgcaagacatgcgagagaatgaatcagaatttcaacatttgcttcacgcacgggaccagagactgttcagaatgtttccccggcgtgtcagaatctcaaccggtcgtcagaaagaggacgtatcggaaactctgtgcgattcatcatctgctggggcgggctcccgagattgcttgctcggcctgcgatctggtcaacgtggacctggatgactgtgtttctgagcaataaatgacttaaaccaggtatggctgccgatggttatcttccagattggctcgaggacaacctctctgagggcattcgcgagtggtgggacttgaaacctggagccccgaaacccaaagccaaccagcaaaagcaggacgacggccggggtctggtgcttcctggctacaagtacctcggacccttcaacggactcgacaagggggagcccgtcaacgcggcggacgcagcggccctcgagcacgacaaagcctacgaccagcagctcaaagcgggtgacaatccgtacctgcggtataatcacgccgacgccgagtttcaggagcgtctgcaagaagatacgtcttttgggggcaacctcgggcgagcagtcttccaggccaagaagcgggttctcgaacctctcggtctggttgaggaaggcgctaagacggctcctggaaagaagagactggtagagcagtcgccacaagagccagactcctcctcgggcatcggcaagacaggccagcagcccgctaaaaagagactcaattttggtcagactggcgactcagagtcagtccccgacccacaacctctcggagaacctccagcagccccctcaggtctgggacctaatacaatggcttcaggcggtggcgctccaatggcagacaataacgaaggcgccgacggagtgggtaattcctcgggaaattggcattgcgattccacatggctgggggacagagtcatcaccaccagcacccgaacctgggccctgcccacctacaacaaccacctctacaagcaaatctccaacggcacctcgggaggaagcaccaacgacaacacctattttggctacagcaccccctgggggtattttgacttcaacagattccactgtcacttttcaccacgtgactggcaacgactcatcaacaacaattggggattccggcccaaaagactcaacttcaagctgttcaacatccaggtcaaggaagtcacgacgaacgaaggcaccaagaccatcgccaataatctcaccagcaccgtgcaggtctttacggactcggagtaccagttaccgtacgtgctaggatccgctcaccagggatgtctgcctccgttcccggcggacgtcttcacggttcctcagtacggctatttaactttaaacaatggaagccaagccctgggacgttcctccttctactgtctggagtatttcccatcgcagatgctgagaaccggcaacaactttcagttcagctacaccttcgaggacgtgcctttccacagcagctacgcgcacagccagagcctggacaggctgatgaatcccctcatcgaccagtacctgtactacctggtcagaacgcaaacgactggaactggagggacgcagactctggcattcagccaagcgggtcctagctcaatggccaaccaggctagaaattgggtgcccggaccttgctaccggcagcagcgcgtctccacgacaaccaaccagaacaacaacagcaactttgcctggacgggagctgccaagtttaagctgaacggccgagactctctaatgaatccgggcgtggcaatggcttcccacaaggatgacgacgaccgcttcttcccttcgagcggggtcctgatttttggcaagcaaggagccgggaacgatggagtggattacagccaagtgctgattacagatgaggaagaaatcaaggctaccaaccccgtggccacagaagaatatggagcagtggccatcaacaaccaggccgccaatacgcaggcgcagaccggactcgtgcacaaccagggggtgattcccggcatggtgtggcagaatagagacgtgtacctgcagggtcccatctgggccaaaattcctcacacggacggcaactttcacccgtctcccctgatgggcggctttggactgaagcacccgcctcctcaaattctcatcaagaacacaccggttccagcggacccgccgcttaccttcaaccaggccaagctgaactctttcatcacgcagtacagcaccggacaggtcagcgtggaaatcgagtgggagctgcagaaagaaaacagcaaacgctggaatccagagattcaatacacttccaactactacaaatctacaaatgtggactttgctgtcaacacggaaggagtttatagcgagcctcgccccattggcacccgttacctcacccgcaacctgtaattacatgttaatcaataaaccggttaattcgtttcagttgaactttggtctctgcgaagggcgaattc

SEQ ID NO: 84 - protein, 736 aa, Artificial Sequence
  Description of Artificial Sequence: Synthetic polypeptide
MAADGYLPDWLEDNLSEGIREWWDLKPGAPKPKANQQKQDDGRGLVLPGYKYLGPFNGLDKGEPVNAADAAALEHDKAYDQQLKAGDNPYLRYNHADAEFQERLQEDTSFGGNLGRAVFQAKKRVLEPLGLVEEGAKTAPGKKRLVEQSPQEPDSSSGIGKTGQQPAKKRLNFGQTGDSESVPDPQPLGEPPAAPSGLGPNTMASGGGAPMADNNEGADGVGNSSGNWHCDSTWLGDRVITTSTRTWALPTYNNHLYKQISNGTSGGSTNDNTYFGYSTPWGYFDFNRFHCHFSPRDWQRLINNNWGFRPKRLNFKLFNIQVKEVTTNEGTKTIANNLTSTVQVFTDSEYQLPYVLGSAHQGCLPPFPADVFTVPQYGYLTLNNGSQALGRSSFYCLEYFPSQMLRTGNNFQFSYTFEDVPFHSSYAHSQSLDRLMNPLIDQYLYYLVRTQTTGTGGTQTLAFSQAGPSSMANQARNWVPGPCYRQQRVSTTTNQNNNSNFAWTGAAKFKLNGRDSLMNPGVAMASHKDDDDRFFPSSGVLIFGKQGAGNDGVDYSQVLITDEEEIKATNPVATEEYGAVAINNQAANTQAQTGLVHNQGVIPGMVWQNRDVYLQGPIWAKIPHTDGNFHPSPLMGGFGLKHPPPQILIKNTPVPADPPLTFNQAKLNSFITQYSTGQVSVEIEWELQKENSKRWNPEIQYTSNYYKSTNVDFAVNTEGVYSEPRPIGTRYLTRNL

SEQ ID NO: 85 - DNA, 3117 bp, Artificial Sequence
  Description of Artificial Sequence: Synthetic polynucleotide
gaattcgcccttggctgcgtcaactggaccaatgagaactttcccttcaacgattgcgtcgacaagatggtgatctggtgggaggagggcaagatgacggccaaggtcgtggagtccgccaaggccattctcggcggcagcaaggtgcgtgtggaccaaaagtgcaagtcttccgcccagatcgatcccacccccgtgatcgtcacctccaacaccaacatgtgcgccgtgattgacgggaacagcaccaccttcgagcaccagcagccgttgcaggaccggatgttcaaatttgaactcacccgccgtctggagcatgactttggcaaggtgacgaagcaggaagtcaaagagttcttccgctgggcgcaggatcacgtgaccgaggtggcgcatgagttccacgtcagaaagggtggagccaacaagagacccgcccccgatgacgcggatataagcgagcccaagcgggcctgcccctcagtcgcggatccatcgacgtcagacgcggaaggagctccggtggactttgccgacaggtaccaaaacaaatgttctcgtcacgcgggcatgcttcagatgctgtttccctgcaagacatgcgagagaatgaatcagaatttcaacatttgcttcacgcacgggaccagagactgttcagaatgtttccccggcgtgtcagaatctcaaccggtcgtcagaaagaggacgtatcggaaactctgtgcgattcatcatctgctggggcgggctcccgagattgcttgctcggcctgcgatctggtcaacgtggacctggatgactgtgtttctgagcaataaatgacttaaaccaggtatggctgccgatggttatcttccagattggctcgaggacaacctctctgagggcattcgcgagtggtgggacttgaaacctggagccccgaaacccaaagccaaccagcaaaagcaggacgacggccggggtctggtgcttcctggctacaagtacctcggacccttcaacggactcgacaagggggagcccgtcaacgcggcggacgcagcggccctcgagcacgacaaagcctacgaccagcagctcaaagcgggtgacaatccgtacctgcggtataatcacgccgacgccgagtttcaggagcgtctgcaagaagatacgtcttttgggggcaacctcgggcgagcagtcttccaggccaagaagcgggttctcgaacctctcggtctggttgaggaaggcgctaagacggctcctggaaagaagagaccggtagagcagtcgccacaagagccagactcctcctcgggcatcggcaagacaggccagcagcccgctaaaaagagactcaattttggtcagactggcgactcagagtcagtccccgacccacaacctctcggagaacctccagcagccccctcaggtctgggacctaatacaatggcttcaggcggtggcgctccaatggcagacaataacgaaggcgccgacggagtgggtaattcctcgggaaattggcattgcgattccacatggctgggggacagagtcatcaccaccagcacccgaacctgggccctgcccacctacaacaaccacctctacaagcaaatctccaacggcacctcgggaggaagcaccaacgacaacacctattttggctacagcaccccctgggggtattttgacttcaacagattccactgtcacttttcaccacgtgactggcaacgactcatcaacaacaattggggattccggcccaaaagactcaacttcaagctgttcaacatccaggtcaaggaagtcacgacgaacgaaggcaccaagaccatcgccaataatctcaccagcaccgtgcgggtctttacggactcggagtaccagttaccgtacgtgctaggatccgctcaccagggatgtctgcctccgttcccggcggacgtcttcatggttcctcagtacggctatttaactttaaacaatggaagccaagccctgggacgttcctccttctactgtctggagtatttcccatcgcagatgctgagaaccggcaacaactttcagttcagctacaccttcgaggacgtgcctttccacagcagctacgcgcacagccagagcctggacaggctgatgaatcccctcatcgaccagtacctgtactacctggtcagaacgcaaacgactggaactggagggacgcagactctggcattcagccaagcgggtcctagctcaatggccaaccaggctagaaattgggtgcccggaccttgctaccggcagcagcgcgtctccacgacaaccaaccagagcaacaacagcaactttgcctggacgggagctgccaagtttaagctgaacggccgagactctctaatgaatccgggcgtggcaatggcttcccacaaggatgacgacgaccgcttcttcccttcgagcggggtcctgatttttggcaagcaaggagccgggaacgatggagtggattacagccaagtgctgattacagatgaggaagaaatcaaggctaccaaccccgtggccacagaagaatatggagcagtggccatcaacaaccaggccgccaatacgcaggcgcagaccggactcgtgcacaaccagggggtgattcccggcatggtgtggcagaatagagacgtgtacctgcagggtcccatctgggccaaaattcctcacacggacggcaactttcacccgtctcccctgatgggcggctttggactgaagcacccgcctcctcaaattctcatcaagaacacaccggttccagcggacccgccgcttaccttcaaccaggccaagctgaactctttcatcacgcagtacagcaccggacaggtcagcgtggaaatcgagtgggagctgcagaaagaaaacagcaaacgctggaatccagagattcaatacacttccaactactacaaatctacaaatgtggactttgctgtcaacacggaaggagtttatagcgagcctcgccccattggcacccgttacctcacccgcaacctgtaattacatgttaatcaataaaccggttaattcgtttcagttgaactttggtctctgcgaagggcgaattc

SEQ ID NO: 86 - protein, 736 aa, Artificial Sequence
  Description of Artificial Sequence: Synthetic polypeptide
MAADGYLPDWLEDNLSEGIREWWDLKPGAPKPKANQQKQDDGRGLVLPGYKYLGPFNGLDKGEPVNAADAAALEHDKAYDQQLKAGDNPYLRYNHADAEFQERLQEDTSFGGNLGRAVFQAKKRVLEPLGLVEEGAKTAPGKKRPVEQSPQEPDSSSGIGKTGQQPAKKRLNFGQTGDSESVPDPQPLGEPPAAPSGLGPNTMASGGGAPMADNNEGADGVGNSSGNWHCDSTWLGDRVITTSTRTWALPTYNNHLYKQISNGTSGGSTNDNTYFGYSTPWGYFDFNRFHCHFSPRDWQRLINNNWGFRPKRLNFKLFNIQVKEVTTNEGTKTIANNLTSTVRVFTDSEYQLPYVLGSAHQGCLPPFPADVFMVPQYGYLTLNNGSQALGRSSFYCLEYFPSQMLRTGNNFQFSYTFEDVPFHSSYAHSQSLDRLMNPLIDQYLYYLVRTQTTGTGGTQTLAFSQAGPSSMANQARNWVPGPCYRQQRVSTTTNQSNNSNFAWTGAAKFKLNGRDSLMNPGVAMASHKDDDDRFFPSSGVLIFGKQGAGNDGVDYSQVLITDEEEIKATNPVATEEYGAVAINNQAANTQAQTGLVHNQGVIPGMVWQNRDVYLQGPIWAKIPHTDGNFHPSPLMGGFGLKHPPPQILIKNTPVPADPPLTFNQAKLNSFITQYSTGQVSVEIEWELQKENSKRWNPEIQYTSNYYKSTNVDFAVNTEGVYSEPRPIGTRYLTRNL

SEQ ID NO: 87 - DNA, 3121 bp, Artificial Sequence
  Description of Artificial Sequence: Synthetic polynucleotide
gaattcgcccttctacggctgcgtcaactggaccaatgagaactttcccttcaacgattgcgtcgacaagatggtgatctggtgggaggagggcaagatgacggccaaggtcgtggagtccgccaaggccattctcggcggcagcaaggtgcgtgtggaccaaaagtgcaagtcttccgcccagatcgatcccacccccgtgatcgtcacctccaacaccaacatgtgcgccgtgattgacgggaacagcaccaccttcgagcaccagcagccgttgcaggaccggatgttcaaatttgaactcacccgccgtctggagcatgactttggcaaggtgacgaagcaggaagtcaaagagttcttccgctgggcgcaggatcacgtgaccgaggtggcgcatgagttccacgtcagaaagggtggcgccaacaagagacccgcccccgatgacgcggatataagcgagcccaagcgggcctgcccctcagtcgcggatccatcgacgtcagacgcggaaggagctccggtggactttgccgacaggtaccaaaacaaatgttctcgtcacgcgggcatgcttcagatgctgtttccctgcaagacatgcgagagaatgaatcagaatttcaacatttgcttcacgcacgggaccagagactgttcagaatgtttccccggcgtgtcagaatctcaaccggtcgtcagaaagaggacgtatcggaaactctgtgcgattcatcatctgctggggcgggctcccgagattgcttgctcggcctgcgatctggtcaacgtggacctggatgactgtgtttctgagcaataaatgacttaaaccaggtatggctgccgatggttatcttccagattggctcgaggacaacctctctgagggcattcgcgagtggtgggacttgaaacctggagccccgaaacccaaagccaaccagcaaaagcaggacgacggccggggtctggtgcttcctggctacaagtacctcggacccttcaacggactcgacaagggggagcccgtcaacgcggcggacgcagcggccctcgagcacgacaaagcctacgaccagcagctcaaagcgggtgacaatccgtacctgcggtataatcacgccgacgccgagtttcaggagcgtctgcaagaagatacgtcctttgggggcaacctcgggcgagcagtcttccaggccaagaagcgggttctcgaacctctcggtctggttgaggaaggcgctaagacggctcctggaaagaagagaccggtagagcagtcgccacaagagccagactcctcctcgggcatcggcaagacaggccagcagcccgctaaaaagagactcaattttggtcagactggcgactcagagtcagtccccgacccacaacctctcggagaacctccagcagccccctcaggtctgggacctaatacaatggcttcaggcggtggcgctccaatggcagacaataacgaaggcgccgacggagtgggtaattcctcgggaaattggcattgcgattccacatggctgggggacagagtcatcaccaccagcacccgaacctgggccctgcccacctacaacaaccacctctacaagcaaatctccaacggcacctcgggaggaagcaccaacgacaacacctattttggctacagcaccccctgggggtattttgacttcaacagattccactgtcacttttcaccacgtgactggcaacgactcatcaacaacaattggggattccggcccaaaagactcaacttcaagctgttcaacatccaggtcaaggaagtcacgacgaacgaaggcaccaagaccatcgccaataatctcaccagcaccgtgcaggtctttacggacttggagtaccagttaccgtacgtgctaggatccgctcaccagggatgtctgcctccgttcccggcggacgtcttcatggttcctcagtacggctatttaactttaaacaatggaagccaagccctgggacgttcctccttctactgtctggagtatttcccatcgcagatgccgagaaccggcaacaactttcagttcagctacaccttcgaggacgtgcctttccacagcagctacgcgcacagccagagcctggacaggctgatgaatcccctcatcgaccagtacctgtactacctggtcagaacgcaaacgactggaactggagggacgcagactctggcattcagccaagcgggtcctagctcaatggccaaccaggctagaaattgggtgcccggaccttgctaccggcagcagcgcgtctccacgacaaccaaccagaacaacaacagcaactttgcctggacgggagctgccaagtttaagctgaacggccgagactctctaatgaatccgggcgtggcaatggcttcccacaaggatgacgacgaccgcttcttcccttcgagcggggtcctgatttttggcaagcaaggagccgggaacgatggagtggattacagccaagtgctgattacagatgaggaagaaatcaaggctaccaaccccgtggccacagaagaatatggagcagtggccatcaacaaccaggccgccaatacgcaggcgcagaccggactcgtgcacaaccagggggtgattcccggcatggtgtggcagaatagagacgtgtacctgcagggtcccatctgggccaaaattcctcacacggacggcaactttcacccgtctcccctgatgggcggctttggactgaagcacccgcctcctcaaattctcatcaagaacacaccggttccagcggacccgccgcttaccttcaaccaggccaagctgaactctttcatcacgcagtacagcaccggacaggtcagcgtggaaatcgagtgggagctgcagaaagaaaacagcaaacgctggaatccagagattcaatacacttccaactactacaaatctacaaatgtggactttgctgtcaacacggaaggagtttatagcgagcctcgccccattggcacccgttacctcacccgcaacctgtaattacatgttaatcaataaaccggttaattcgtttcagttgaactttggtctctgcgaagggcgaattc

SEQ ID NO: 88 - protein, 736 aa, Artificial Sequence
  Description of Artificial Sequence: Synthetic polypeptide
MAADGYLPDWLEDNLSEGIREWWDLKPGAPKPKANQQKQDDGRGLVLPGYKYLGPFNGLDKGEPVNAADAAALEHDKAYDQQLKAGDNPYLRYNHADAEFQERLQEDTSFGGNLGRAVFQAKKRVLEPLGLVEEGAKTAPGKKRPVEQSPQEPDSSSGIGKTGQQPAKKRLNFGQTGDSESVPDPQPLGEPPAAPSGLGPNTMASGGGAPMADNNEGADGVGNSSGNWHCDSTWLGDRVITTSTRTWALPTYNNHLYKQISNGTSGGSTNDNTYFGYSTPWGYFDFNRFHCHFSPRDWQRLINNNWGFRPKRLNFKLFNIQVKEVTTNEGTKTIANNLTSTVQVFTDLEYQLPYVLGSAHQGCLPPFPADVFMVPQYGYLTLNNGSQALGRSSFYCLEYFPSQMPRTGNNFQFSYTFEDVPFHSSYAHSQSLDRLMNPLIDQYLYYLVRTQTTGTGGTQTLAFSQAGPSSMANQARNWVPGPCYRQQRVSTTTNQNNNSNFAWTGAAKFKLNGRDSLMNPGVAMASHKDDDDRFFPSSGVLIFGKQGAGNDGVDYSQVLITDEEEIKATNPVATEEYGAVAINNQAANTQAQTGLVHNQGVIPGMVWQNRDVYLQGPIWAKIPHTDGNFHPSPLMGGFGLKHPPPQILIKNTPVPADPPLTFNQAKLNSFITQYSTGQVSVEIEWELQKENSKRWNPEIQYTSNYYKSTNVDFAVNTEGVYSEPRPIGTRYLTRNL

SEQ ID NO: 89 - DNA, 3122 bp, Artificial Sequence
  Description of Artificial Sequence: Synthetic polynucleotide
gaattcgccctttctacggctgcgtcaactggaccaatgagaactttcccttcaacgattgcgtcgacaagatggtgatctggtgggaggagggcaagatgacggccaaggtcgtggagtccgccaaggccattctcggcggcagcaaggtgcgtgtggaccaaaagtgcaagtcttccgcccagatcgatcccacccccgtgatcgtcacctccaacaccaacatgtgcgccgtgattgacgggaacagcaccaccttcgagcaccagcagccgttgcaggaccggatgttcaaatttgaactcacccgccgtctggagcatgactttggcaaggtgacgaagcaggaagtcaaagggttcttccgctgggcgcaggatcacgtgaccgaggtggcgcatgagttccacgtgcgagcccaagcgggcctgcccctcagtcgcggatccatcgacgtcagaccagaaagggtggagccaacaagagacccgcccccgatgacgcggatataagcggaaggagctccggtggactttgccgacaggtaccaaaacaaatgttctcgtcacgcgggcatgcttcagatgctgtttccctgcaagacatgcgagagaatgaatcagaatttcaacatttgcttcacgcacgggaccagagactgttcagaatgtttccccggcgtgtcagaatctcaaccggtcgtcagaaagaggacgtatcggaaactctgtgcgattcatcatctgctggggcgggctcccgagattgcttgctcggcctgcgatctggtcaacgtggacctggatgactgtgtttctgagcaataaatgacttaaaccaggtatggctgccgatggttatcttccagattggctcgaggacaacctctctgagggcattcgcgagtggtgggacttgaaacctggagccccgaaacccaaagccaaccagcaaaagcaggacgacggccggggtctggtgcttcctggctacaagtacctcggacccttcaacggactcgacaagggggagcccgtcaacgcggcggacgcagcggccctcgagcacgacaaagcctacgaccagcagctcaaagcgggtgacaatccgtacctgcggtataatcacgccgacgccgagtttcaggagcgtctgcaagaagatacgtcttttgggggcaacctcgggcgagcagtcttccaggccaagaagcgggttctcgaacctctcggtctggttgaggaaggcgctaagacggctcctggaaagaagagaccggtagagcagtcgccacaagagccagactcctcctcgggcatcggcaagacaggccagcagcccgctaaaaagagactcaattttggtcagactggcgactcagagtcagtccccgacccacaacctctcggagaacctccagcagccccctcaggtctgggacctaatacaatggcttcaggcggtggcgctccaatggcagacaataacgaaggcgccgacggagtgggtaattcctcgggaaattggcattgcgattccacatggctgggggacagagtcatcaccaccagcacccgaacctgggccctgcccacctacaacaaccacctctacaagcaaatctccaacggcacctcgggaggaagcaccaacgacaacacctattttggctacagcaccccctgggggtattttgacttcaacagattccactgtcacttttcaccacgtgactggcaacgactcatcaacaacaattggggattccggcccaaaagactcaacttcaagctgttcaacatccaggtcaaggaagtcacgacgaacgaaggcaccaagaccatcgccaataatctcaccagcaccgtgcaggtctttacggactcggagtaccagttaccgtacgtgctaggatccgctcaccagggatgtctgcctccgttcccggcggacgtcttcatggttcctcagtacggctatttaactttaaacaatggaagccaagccctgggacgttcctccttctactgtctggagtatttcccatcgcagatgctgagaaccggcaacaactttcagttcagctacaccttcgaggacgtgcctttccacagcagctacgcgcacagccagagcctggacaggctgatgaatcccctcatcgaccagtacctgtactacctggtcagaacgcaaacgactggaactggagggacgcagactctggcattcagccaagcgggtcctagctcaatggccaaccaggctagaaattgggtgcccggaccttgctaccggcagcagcgcgtctccacgacaaccaaccagaacaacaacagcaactttgcctggacgggagctgccaagtttaagctgaacggccgagactctctaatgaatccgggcgtggcaatggcttcccacaaggatgacgacgaccgcttcttcccttcgagcggggtcctgatttttggcaagcaaggagccgggaacgatggagtggattacagccaagtgctgattacagatgaggaagaaatcaaggctaccaaccccgtggccacagaagaatatggagcagtggccatcaacaaccaggccgccaatacgcaggcgcagaccggactcgtgcacaaccagggggtgattcccggcatggtgtggcagaatagagacgtgtacctgcagggtcccatctgggccaaaattcctcacacggacggcaactttcacccgtctcccctgatgggcggctttggactgaagcacccgcctcctcaaattctcatcaagaacacaccggttccagcggacccgccgcttaccttcaaccaggccaagctgaactctttcatcacgcagtacagcaccggacaggtcagcgtggaaatcgagtgggagctgcagaaagaaaacagcaaacgctggaatccagagattcaatacacttccaactactacaaatctacaaatgtggactttgctgtcaacacggagggggtttatagcgagcctcgccccattggcacccgttacctcacccgcaacctgtaattacatgttaatcaataaaccggttaattcgtttcagttgaactttggtctctgcgaagggcgaattc

SEQ ID NO: 90 - protein, 736 aa, Artificial Sequence
  Description of Artificial Sequence: Synthetic polypeptide
MAADGYLPDWLEDNLSEGIREWWDLKPGAPKPKANQQKQDDGRGLVLPGYKYLGPFNGLDKGEPVNAADAAALEHDKAYDQQLKAGDNPYLRYNHADAEFQERLQEDTSFGGNLGRAVFQAKKRVLEPLGLVEEGAKTAPGKKRPVEQSPQEPDSSSGIGKTGQQPAKKRLNFGQTGDSESVPDPQPLGEPPAAPSGLGPNTMASGGGAPMADNNEGADGVGNSSGNWHCDSTWLGDRVITTSTRTWALPTYNNHLYKQISNGTSGGSTNDNTYFGYSTPWGYFDFNRFHCHFSPRDWQRLINNNWGFRPKRLNFKLFNIQVKEVTTNEGTKTIANNLTSTVQVFTDSEYQLPYVLGSAHQGCLPPFPADVFMVPQYGYLTLNNGSQALGRSSFYCLEYFPSQMLRTGNNFQFSYTFEDVPFHSSYAHSQSLDRLMNPLIDQYLYYLVRTQTTGTGGTQTLAFSQAGPSSMANQARNWVPGPCYRQQRVSTTTNQNNNSNFAWTGAAKFKLNGRDSLMNPGVAMASHKDDDDRFFPSSGVLIFGKQGAGNDGVDYSQVLITDEEEIKATNPVATEEYGAVAINNQAANTQAQTGLVHNQGVIPGMVWQNRDVYLQGPIWAKIPHTDGNFHPSPLMGGFGLKHPPPQILIKNTPVPADPPLTFNQAKLNSFITQYSTGQVSVEIEWELQKENSKRWNPEIQYTSNYYKSTNVDFAVNTEGVYSEPRPIGTRYLTRNL

SEQ ID NO: 91 - DNA, 2370 bp, Artificial Sequence
  Description of Artificial Sequence: Synthetic polynucleotide
gaattcgccctttctacggctgcgtcaactggaccaatgagaactttcccttcaacgattgcgtcgacaagatggtgatctggtgggaggagggcaagatgacggccaaggtcgtggagtccgccaaggccattctcggcggcagcaaggtgcgcgtggaccaaaagtgcaagtcgtccgcccagatcgaccccacccccgtgatcgtcacctccaacaccaacatgtgcgccgtgattgacgggaacagcaccaccttcgagcaccagcagccgttgcaggaccggatgttcaagttcgaactcacccgccgtctggagcacgactttggcaaggtgaccaagcaggaagtcaaagagttcttccgctgggcgcaggatcacgtgaccgaggtggcgcatgagttctacgtcagaaagggcggagccagcaaaagacccgcccccgatgacgcggatataagcgagcccaagcgggcctgcccctcagtcgcggatccatcgacgtcagacgcggaaggagctccggtggactttgccgacaggtaccaaaacaaatgttctcgtcacgcgggcatgcttcagacgctgtttccctgcaaaacgtgcgagagaatgaatcagaatttcaacatttgcttcacgcacggggtcagagactgctcagaatgtttccccggtgcatcagaatctcaaccggtcgtcagaaaaaaaacgtatcagaaactgtgtgccattcatcatctgctggggcgggcacccgagattgcttgctcggcctgcgatctggtcaacgtggacctggacgactgtgtttctgagcaataaatgacttaaaccaggtatggctgccgatggttatcttccagattggcttgaggacaacctctctgagggcattcgcgagtggtgggacctgaaacctggagccccgaaacccaaagccaaccagcaaaagcaggacgacggccggggtctggtgcttcctggctacaagtacctcggacccttcaacggactcgacaagggggagcccgtcaacgcggcggacgcagcggccctcgagcacgacaaggcctacgaccagcagctcaaagcgggtgacaatccgtacctgcggtataaccacgccgacgccgagtttcaggagcgtctgcaagaagatacgtcttttgggggcaacctcgggcgagcagtcttccaggccaagaagcgggttctcgaacctctcggtctggttgaggaaggcgctaagacggctcctggaaagaagagaccggtagagccatcacctcagcgttcccccgactcctccacgggcatcggcaagaaaggccaccagcccgcgagaaagagactgaactttgggcagactggcgactcggagtcagtccccgaccctcaaccaatcggagaaccaccagcaggcccctctggtctgggatctggtacaatggctgcaggcggtggcgctccaatggcagacaataacgaaggcgccgacggagtgggtagttcctcaggaaattggcattgcgattccacatggctgggcgacagagtcatcaccaccagcacccgaacctgggccctgcccacctacaacaaccatctctacaagcaaatctccaacgggacatcgggaggaagcactaacgacaacacctactttggctacagcaccccctgggggtattttgacttcaacagattccactgccacttctcaccacgtgactggcagcgactcatcaacaataactggggattccggcccaagagactcaacttcaagctcttcaacatccaggtcaaggaggtcacgcagaatgaaggcaccaagaccatcgccaataaccttaccagcacgattcaggtgtttacggactcggaataccagctcccgtacgtcctcggctctgcgcaccagggctgcctccctccgttcccggcggacgtcttcatgattcctcagtacgggtatctgaccctaaacaatggcagtcaggctgtgggccgttcctccttctactgcctggaatacttcccttctcaaatgctgaggacgggcaacaactttgaattcagctacaccttcgaggacgtgcctttccacagcagctacgcgcacagccagagcctggaccggctgatgaaccctctcatcgaccagtacctgtattacttatccagaactcagtccacaggaggaactcaaggtactcagcaattgttattttctcaagccgggcccgcaaacatgtyggctcaggccaagaactggctacctggaccgtgttaccgtcagcaacgagtttccacgacactgtcgcaaaacaacaacagcaattttgctggaccggtgccacca

SEQ ID NO: 92 - protein, 738 aa, Artificial Sequence; identical to SEQ ID NO: 82
  Description of Artificial Sequence: Synthetic polypeptide

SEQ ID NO: 93 - DNA, 2205 bp, Artificial Sequence
  Description of Artificial Sequence: Synthetic polynucleotide
atgactgacggttaccttccagattggctagaggacaacctctctgaaggcgttcgagagtggtgggcgctgcaacctggagcccctaaacccaaggcaaatcaacaacatcaggacaacgctcggggtcttgtgcttccgggttacaaatacctcggacccggcaacggactcgacaagggggaacccgtcaacgcagcggacgcggcagccctcgagcacgacaaggcctacgaccagcagctcaaggccggtgacaacccctacctcaagtacaaccacgccgacgcggagttccagcagcggcttcagggcgacacatcgtttgggggcaacctcggcagagcagtcttccaggccaaaaagagggttcttgaacctcttggtctggttgagcaagcgggtgagacggctcctggaaagaagagaccgttgattgaatccccccagcagcccgactcctccacgggtatcggcaaaaaaggcaagcagccggctaaaaagaagctcgttttcgaagacgaaactggagcaggcgacggaccccctgagggatcaacttccggagccatgtctgatgacagtgagatgcgtgcagcagctggcggagctgcagtcgagggcggacaaggtgccgatggagtgggtaatgcctcgggtgattggcattgcgattccacctggtctgagggccacgtcacgaccaccagcaccagaacctgggtcttgcccacctacaacaaccacctctacaagcgactcggagagagcctgcagtccaacacctacaacggattctccaccccctggggatactttgacttcaaccgcttccactgccacttctcaccacgtgactggcagcgactcatcaacaacaactggggcatgcgacccaaagccatgcgggtcaaaatcttcaacatccaggtcaaggaggtcacgacgtcgaacggcgagacaacggtggctaataaccttaccagcacggttcagatctttgcggactcgtcgtacgaactgccgtacgtgatggatgcgggtcaagagggcagcctgcctccttttcccaacgacgtctttatggtgccccagtacggctactgtggactggtgaccggcaacacttcgcagcaacagactgacagaaatgccttctactgcctggagtactttccttcgcagatgctgcggactggcaacaactttgaaattacgtacagttttgagaaggtgcctttccactcgatgtacgcgcacagccagagcctggaccggctgatgaaccctctcatcgaccagtacctgtggggactgcaatcgaccaccaccggaaccaccctgaatgccgggactgccaccaccaactttaccaagctgcggcctaccaacttttccaactttaaaaagaactggctgcccgggccttcaatcaagcagcagggcttctcaaagactgccaatcaaaactacaagatccctgccaccgggtcagacagtctcatcaaatacgagacgcacagcactctggacggaagatggagtgccctgacccccggacctccaatggccacggctggacctgcggacagcaagttcagcaacagccagctcatctttgcggggcctaaacagaacggcaacacggccaccgtacccgggactctgatcttcacctctgaggaggagctggcagccaccaacgccaccgatacggacatgtggggcaacctacctggcggtgaccagagcaacagcaacctgccgaccgtggacagactgacagccttgggagccgtgcctggaatggtctggcaaaacagagacatttactaccagggtcccatttgggccaagattcctcataccgatggacactttcacccctcaccgctgattggtgggtttgggctgaaacacccgcctcctcaaatttttatcaagaacaccccggtacctgcgaatcctgcaacgaccttcagctctactccggtaaactccttcattactcagtacagcactggccaggtgtcggtgcagattgactgggagatccagaaggagcggtccaaacgctggaaccccgaggtccagtttacctccaactacggacagcaaaactctctgttgtgggctcccgatgcggctgggaaatacactgagcctagggctatcggtacccgctacctcacccaccacctgtaa

SEQ ID NO: 94 - protein, 734 aa, Artificial Sequence; identical to SEQ ID NO: 66
  Description of Artificial Sequence: Synthetic polypeptide

SEQ ID NO: 95 - DNA, 3128 bp, Artificial Sequence
  Description of Artificial Sequence: Synthetic polynucleotide
gaattcgccctttctacggctgcgtcaactggaccaatgagaactttcccttcaacgattgcgtcgacaagatgttgatctggtgggaggagggcaagatgacggccaaggtcgtggagtccgccaaggccattctcggcggcagcaaagtgcgcgtggaccaaaagtgcaagccgtccgcccagatcgaccccacccccgtgatcgtcacctccaacaccaacatgtgcgccgtgattgacgggaacagcaccaccttcgagcaccagcagccgttgcgggaccggatgttcaagtttgaactcacccgccgtctggagcacgactttggcaaggtgacaaagcaggaagtcagagagttcttccgctgggcgcaggatcacgtgaccgaggtggcgcacgagttctacgtcagaaagggtggagccaacaagagacccgcccccgatgacgcggataaaagcgagcccaagcgggcctgcccctcagtcgcggatccatcgacgtcagacgcggaaggagctccggtggactttgccgacaggtaccaaaacaaatgttctcgtcacgcgggcatgcttcagatgctgtttccctgcaaaacatgcgagagaatgaatcagaatttcaacatttgcttcacgcacgggaccagagactgttcagaatgtttccccggcgtgtcagaatctcaaccggtcgtcagaaaaaagacgtatcggaaactctgtgcgattcatcatctgctggggcgggcacccgagattgcttgctcggcctgcgatctggtcaacgtggacctagatgactgtgtttctgagcaataaatgacttaaaccaggtatggctgccgatggttatcttccagattggctcgaggacaacctctctgagggcattcgcgagtggtgggacttgaaacctggagccccgaaacccaaagccaaccagcaaaagcaggacgacggccggggtctggtgcttcctggctacaagtacctcggacccttcaacggactcgacaagggggagcccgtcaacgcggcggacgcagcggccctcgagcacgacaaggcctacgaccagcagctcaaagcgggtgacaatccgtacctgcggtataaccacgccgacgccgagtttcaggagcgtctgcaagaagatacgtcttttgggggcaacctcgggcgagcagtcttccaggccaagaagcgggttctcgaacctctcggtctggttgaggaaggcgctaagacggctcctggaaagaagagaccggtagagccatcaccccagcgttctccagactcctctacgggcatcggcaagaaaggccagcagcccgcgaaaaagagactcaactttgggcagactggcgactcagagtcagtgcccgaccctcaaccaatcggagaaccccccgcaggcccctctggtctgggatctggtacaatggctgcaggcggtggcgctccaatggcagacaataacgaaggcgccgacggagtgggtagttcctcaggaaattggcattgcgattccacatggctgggcgacagagtcatcaccaccagcacccgaacctgggccctccccacctacaacaaccacctctacaagcaaatctccaacgggacttcgggaggaagcaccaacgacaacacctacttcggctacagcaccccctgggggtattttgactttaacagattccactgccacttctcaccacgtgactggcagcgactcatcaacaacaactggggattccggcccaagagactcaacttcaagctcttcaacatccaggtcaaggaggtcacgcagaatgaaggcaccaagaccatcgccaataaccttaccagcacgattcaggtctttacggactcggaataccagctcccgtacgtcctcggctctgcgcaccagggctgcctgcctccgttcccggcggacgtcttcatgattcctcagtacgggtacctgactctgaacaatggcagtcaggccgtgggccgttcctccttctactgcctggagtactttccttctcaaatgctgagaacgggcaacaactttgagttcagctaccagtttgaggacgtgccttttcacagcagctacgcgcacagccaaagcctggaccggctgatgaaccccctcatcgaccagtacctgtactacctgtctcggactcagtccacgggaggtaccgcaggaactcagcagttgctattttctcaggccgggcctaataacatgtcggctcaggccaaaaactggctacccgggccctgctaccggcagcaacgcgtctccacgacactgtcgcaaaataacaacagcaactgtaaatcccggtgtcgctatggcaacccacaaggacgacgaagagcgattttgcctggaccggtgccaccaagtatcatctgaatggcagagactctctgttttccgtccagcggagtcttaatgtttgggaaacagggagctggaaaagacaacgtggactatagcagcgttatgctaaccagtgaggaagaaattaaaaccaccaacccagtggccacggaacagtacggcgtggtggccgataacctgcaacagcaaaacgccgctcctattgtaggggccgtcaacagtcaaggagccttacctggcatggtctggcagaaccgggacgtgtacctgcagggtcctatctgggccaagattcctcacacggacggaaactttcatccctcgccgctgatgggaggctttggactgaaacacccgcctcctcagatcctgattaagaatacacctgttcccgcggatcctccaactaccttcagtcaagctaagctggcgtcgttcatcacgcagtacagcaccggacaggtcagcgtggaaattgaatgggagctgcagaaagaaaacagcaaacgctggaacccagagattcaatacacttccaactactacaaatctacaaatgtggacttcgctgttaacacagatggcacttattctgagcctcgccccattggcacccgttacctcacccgtaatctgtaattgctcgttaatcaataaaccggttgattcgtttcagttgaactttggtctctgcgaagggcgaattc

SEQ ID NO: 96 - protein, 738 aa, Artificial Sequence; identical to SEQ ID NO: 16
  Description of Artificial Sequence: Synthetic polypeptide

SEQ ID NO: 97 - DNA, 3128 bp, Artificial Sequence
  Description of Artificial Sequence: Synthetic polynucleotide
gaattcgccctttctacggctgcgtcaactggaccaatgagaactttcccttcaacgattgcgtcgacaagatggtgatctggtgggaggagggcaagatgacggccaaggtcgtggagtccgccaaggccattctcggcggcagcaaagtgcgcgtggaccaaaagtgcaagtcgtccgcccagatcgaccccacccccgtgatcgtcacctccaacaccaacatgtgcgccgtgattgacgggaacagcaccaccttcgagcaccagcagccgttgcaggaccggatgttcaagtttgaactcacccgccgtctggagcacgactttggcaaggtgacaaagcaggaagtcagagagttcttccgctgggcgcaggatcacgtgaccgaggtggcgcacgagttctacgtcagaaagggtggagccaacaagagacccgcccccgatgacgcggataaaagcgagcccaagcgggcctgcccctcagtcgcggatccatcgacgtcagacgcggaaggagctccggtggactttgccgacaggtaccaaaacaaatgttctcgtcacgcgggcatgcttcagatgctgtttccctgcaaaacatgcgagagaatgaatcagaatttcaacatttgcttcacgcacgggaccagagactgttcagaatgtttccccggcgtgtcagaatctcaaccggttgtcagaaaaaagacgtatcggaaactctgtgcgattcatcatctgctggggcgggcacccgagattgcttgctcggcctgcgatctggtcaacgtggacctagatgactgtgtttctgagcaataaatgacttaaaccaggtatggctgccgatggttatcttccagattggctcgaggacaacctctctgagggcattcgcgagtggtgggacttgaaacctggagccccgaaacccaaagccaaccagcaaaagcaggacgacggccggggtctggtgcttcctggctacaagtacctcggacccttcaacggactcgacaagggggagcccgtcaacgcggcggacgcagcggccctcgagcacgacaaggcctacgaccagcagctcaaagcgggtgacaatccgtacctgcggtataaccacgccgacgccgagtttcaggagcgtctgcaagaagatacgtcttttgggggcaacctcgggcgagcagtcttccaggccaagaagcgggttctcgaacctctcggtctggttgaggaaggcgctaagacggctcctggaaagaagagaccggtagagccatcaccccagcgttctccagactcctctacgggcatcggcaagaaaggccagcagcccgcgaaaaagagactcaactttgggcagactggcgactcagagtcagtgcccgaccctcaaccaatcggagaaccccccgcaggcccctctggtctgggatctggtacaatggctgcaggcggtggcgctccaatggcagacaataacgaaggcgccgacggagtgggtagttcctcaggaaattggcattgcgattccacatggctgggcgacagagtcatcaccaccagcacccgaacctgggccctccccacctacaacaaccacctctacaagcaaatctccaacgggacttcgggaggaagcaccaacgacaacacctacttcggctacagcaccccctgggggtattttgactttaacagattccactgccacttctcaccacgtgactggcagcgactcatcaacaacaactggggattccggcccaagagacccaacttcaagctcttcaacatccaggtcaaggaggtcacgcagaatgaaggcaccaagaccatcgccaataaccttaccagcacgattcaggtctttacggactcggaataccagctcccgtacgtcctcggctctgcgcaccagggctgcctgcctccgttcccggcggacgtcttcatgattcctcagtacgggtacctgactctgaacaatggcagtcaggccgtgggccgttcctccttctactgcctggagtactttccttctcaaatgctgagaacgggcaacaactttgagttcagctaccagtttgaggacgtgccttttcacagcagctacgcgcacagccaaagcctggaccggctgatgaaccccctcatcgaccagtacctgtactacctgtctcggactcagtccacgggaggtaccgcaggaactcagcagttgctattttctcaggccgggcctaataacatgtcggctcaggccaaaaactggctacccgggccctgctaccggcagcaacgcgtctccacgacactgtcgcaaaataacaacagcaactttgcctggaccggtgccaccaagtatcatctgaatggcagagactctctggtaaatcccggtgtcgctatggcaacccacaaggacgacgaagagcgattttttccgtccagcggagtcttaatgtttgggaaacagggagctggaaaagacaacgtggactatagcagcgttatgctaaccagtgaggaagaaattaaaaccaccaacccagtggccacagaacagtacggcgtggtggccgataacctgcaacagcaaaacgccgctcctattgtaggggccgtcaacagtcaaggagccttacctggcatggtctggcagaaccgggacgtgtacctgcagggtcctatctgggccaagattcctcacacggacggaaactttcatccctcgccgctgatgggaggctttggactgaaacacccgcctcctcagatcctgattaagaatacacctgttcccgcggatcctccaactaccttcagtcaagctaagctggcgtcgttcatcacgcagtacagcaccggacaggtcagcgtggaaattgaatgggagctgcagaaagaaaacagcaaacgctggaacccagagattcaatacacttccaactactacaaatctacaaatgtggactttgctgttaacacagatggcacttattctgagcctcgccccattggcacccgttacctcacccgtaatctgtaattgcttgttaatcaataaaccggttgattcgtttcagttgaactttggtctctgcgaagggcgaattc

SEQ ID NO: 98 - protein, 738 aa, Artificial Sequence
  Description of Artificial Sequence: Synthetic polypeptide
MAADGYLPDWLEDNLSEGIREWWDLKPGAPKPKANQQKQDDGRGLVLPGYKYLGPFNGLDKGEPVNAADAAALEHDKAYDQQLKAGDNPYLRYNHADAEFQERLQEDTSFGGNLGRAVFQAKKRVLEPLGLVEEGAKTAPGKKRPVEPSPQRSPDSSTGIGKKGQQPAKKRLNFGQTGDSESVPDPQPIGEPPAGPSGLGSGTMAAGGGAPMADNNEGADGVGSSSGNWHCDSTWLGDRVITTSTRTWALPTYNNHLYKQISNGTSGGSTNDNTYFGYSTPWGYFDFNRFHCHFSPRDWQRLINNNWGFRPKRPNFKLFNIQVKEVTQNEGTKTIANNLTSTIQVFTDSEYQLPYVLGSAHQGCLPPFPADVFMIPQYGYLTLNNGSQAVGRSSFYCLEYFPSQMLRTGNNFEFSYQFEDVPFHSSYAHSQSLDRLMNPLIDQYLYYLSRTQSTGGTAGTQQLLFSQAGPNNMSAQAKNWLPGPCYRQQRVSTTLSQNNNSNFAWTGATKYHLNGRDSLVNPGVAMATHKDDEERFFPSSGVLMFGKQGAGKDNVDYSSVMLTSEEEIKTTNPVATEQYGVVADNLQQQNAAPIVGAVNSQGALPGMVWQNRDVYLQGPIWAKIPHTDGNFHPSPLMGGFGLKHPPPQILIKNTPVPADPPTTFSQAKLASFITQYSTGQVSVEIEWELQKENSKRWNPEIQYTSNYYKSTNVDFAVNTDGTYSEPRPIGTRYLTRNL

SEQ ID NO: 99 - protein, 738 aa, Artificial Sequence
  Description of Artificial Sequence: Synthetic polypeptide
MAADGYLPDWLEDNLSEGIREWWDLKPGAPKPKANQQKQDDGRGLVLPGYKYLGPFNGLDKGEPVNAADAAALEHDKAYDQQLKAGDNPYLRYNHADAEFQERLQEDTSFGGNLGRAVFQAKKRVLEPLGLVEEAAKTAPGKKRPVEPSPQRSPDSSTGIGKKGQQPAKKRLNFGQTGDSESVPDPQPIGEPPAGPSGLGSGTMAAGGGAPMADNNEGADGVGSSSGNWHCDSTWLGDRVITTSTRTWALPTYNNHLYKQISNGTSGGSTNDNTYFGYSTPWGYFDFNRFHCHFSPRDWQRLINNNWGFRPKRLSFKLFNIQVKEVTQNEGTKTIANNLTSTIQVFTDSEYQLPYVLGSAHQGCLPPFPADVFMIPQYGYLTLNNGSQAVGRSSFYCLEYFPSQMLRTGNNFEFSYTFEDVPFHSSYAHSQSLDRLMNPLIDQYLYYLSRTQSTGGTQGTQQLLFSQAGPANMSAQAKNWLPGPCYRQQRVSTTLSQNNNSNFAWTGATKYHLNGRDSLVNPGVAMATHKDDEERFFPSSGVLMFGKQGAGRDNVDYSSVMLTSEEEIKTTNPVATEQYGVVADNLQQTNTGPIVGNVNSQGALPGMVWQNRDVYLQGPIWAKIPHTDGNFHPSPLMGGFGLKHPPPQILIKNTPVPADPPTTFSQAKLASFITQYSTGQVSVEIEWELQKENSKRWNPEIQYTSNYYKSTNVDFAVNTEGTYSEPRPIGTRYLTRNL

SEQ ID NO: 100 - DNA, 2172 bp, Artificial Sequence
  Description of Artificial Sequence: Synthetic polynucleotide
atgtcttttgttgatcaccctccagattggttggaagaagttggtgaaggtcttcgcgagtttttgggccttgaagcgggcccaccgaaaccaaaacccaatcagcagcatcaagatcaagcccgtggtcttgtgctgcctggttataactatctcggacccggaaacggtctcgatcgaggagagcctgtcaacagggcagacgaggtcgcgcgagagcacgacatctcgtacaacgagcagcttgaggcgggagacaacccctacctcaagtacaaccacgcggacgccgagtttcaggagaagctcgccgacgacacatccttcgggggaaacctcggaaaggcagtctttcaggccaagaaaagggttctcgaaccttttggcctggttgaagagggtgctaagacggcccctaccggaaagcggatagacgaccactttccaaaaagaaagaaggctcggaccgaagaggactccaagccttccacctcgtcagacgccgaagctggacccagcggatcccagcagctgcaaatcccagcccaaccagcctcaagtttgggagctgatacaatgtctgcgggaggtggcggcccattgggcgacaataaccaaggtgccgatggagtgggcaatgcctcgggagattggcattgcgattccacgtggatgggggacagagtcgtcaccaagtccacccgaacctgggtgctgcccagctacaacaaccaccagtaccgagagatcaaaagcggctccgtcgacggaagcaacgccaacgcctactttggatacagcaccccctgggggtactttgactttaaccgcttccacagccactggagcccccgagactggcaaagactcatcaacaactactggggcttcagaccccggtccctcagagtcaaaatcttcaacattcaagtcaaagaggtcacggtgcaggactccaccaccaccatcgccaacaacctcacctccaccgtccaagtgtttacggacgacgactaccagctgccctacgtcgtcggcaacgggaccgagggatgcctgccggccttccctccgcaggtctttacgctgccgcagtacggttacgcgacgctgaaccgcgacaacacagaaaatcccaccgagaggagcagcttcttctgcctagagtactttcccagcaagatgctgagaacgggcaacaactttgagtttacctacaactttgaggaggtgcccttccactccagcttcgctcccagtcagaacctgttcaagctggccaacccgctggtggaccagtacttgtaccgcttcgtgagcacaaataacactggcggagtccagttcaacaagaacctggccgggagatacgccaacacctacaaaaactggttcccggggcccatgggccgaacccagggctggaacctgggctccggggtcaaccgcgccagtgtcagcgccttcgccacgaccaataggatggagctcgagggcgcgagttaccaggtgcccccgcagccgaacggcatgaccaacaacctccagggcagcaacacctatgccctggagaacactatgatcttcaacagccagccggcgaacccgggcaccaccgccacgtacctcgagggcaacatgctcatcaccagcgagagcgagacgcagccggtgaaccgcgtggcgtacaacgtcggcgggcagatggccaccaacaaccagagctccaccactgcccccgcgaccggcacgtacaacctccaggaaatcgtgcccggcagcgtgtggatggagagggacgtgtacctccaaggacccatctgggccaagatcccagagacgggggcgcactttcacccctctccggccatgggcggattcggactcaaacacccaccgcccatgatgctcatcaagaacacgcctgtgcccggaaatatcaccagcttctcggacgtgcccgtcagcagcttcatcacccagtacagcaccgggcaggtcaccgtggagatggagtgggagctcaagaaggaaaactccaagaggtggaacccagagatccagtacacaaacaactacaacgacccccagtttgtggactttgccccggacagcaccggggaatacagaaccaccagacctatcggaacccgataccttacccgacccctt

SEQ ID NO: 101 - protein, 720 aa, Artificial Sequence
  Description of Artificial Sequence: Synthetic polypeptide
MSFVDHPPDWLEEVGEGLREFLGLEAGPPKPKPNQQHQDQARGLVLPGYNYLGPGNGLDRGEPVNRADEVAREHDISYNEQLEAGDNPYLKYNHADAEFQEKLADDTSFGGNLGKAVFQAKKRVLEPFGLVEEGAKTAPTGKRIDDHFPKRKKARTEEDSKPSTSSDAEAGPSGSQQLQIPAQPASSLGADTMSAGGGGPLGDNNQGADGVGNASGDWHCDSTWMGDRVVTKSTRTWVLPSYNNHQYREIKSGSVDGSNANAYFGYSTPWGYFDFNRFHSHWSPRDWQRLINNYWGFRPRSLRVKIFNIQVKEVTVQDSTTTIANNLTSTVQVFTDDDYQLPYVVGNGTEGCLPAFPPQVFTLPQYGYATLNRDNTENPTERSSFFCLEYFPSKMLRTGNNFEFTYNFEEVPFHSSFAPSQNLFKLANPLVDQYLYRFVSTNNTGGVQFNKNLAGRYANTYKNWFPGPMGRTQGWNLGSGVNRASVSAFATTNRMELEGASYQVPPQPNGMTNNLQGSNTYALENTMIFNSQPANPGTTATYLEGNMLITSESETQPVNRVAYNVGGQMATNNQSSTTAPATGTYNLQEIVPGSVWMERDVYLQGPIWAKIPETGAHFHPSPAMGGFGLKHPPPMMLIKNTPVPGNITSFSDVPVSSFITQYSTGQVTVEMEWELKKENSKRWNPEIQYTNNYNDPQFVDFAPDSTGEYRTTRPIGTRYL

SEQ ID NO: 102 - protein, 724 aa, Adeno-associated virus 5
MSFVDHPPDWLEEVGEGLREFLGLEAGPPKPKPNQQHQDQARGLVLPGYNYLGPGNGLDRGEPVNRADEVAREHDISYNEQLEAGDNPYLKYNHADAEFQEKLADDTSFGGNLGKAVFQAKKRVLEPFGLVEEGAKTAPTGKRIDDHFPKRKKARTEEDSKPSTSSDAEAGPSGSQQLQIPAQPASSLGADTMSAGGGGPLGDNNQGADGVGNASGDWHCDSTWMGDRVVTKSTRTWVLPSYNNHQYREIKSGSVDGSNANAYFGYSTPWGYFDFNRFHSHWSPRDWQRLINNYWGFRPRSLRVKIFNIQVKEVTVQDSTTTIANNLTSTVQVFTDDDYQLPYVVGNGTEGCLPAFPPQVFTLPQYGYATLNRDNTENPTERSSFFCLEYFPSKMLRTGNNFEFTYNFEEVPFHSSFAPSQNLFKLANPLVDQYLYRFVSTNNTGGVQFNKNLAGRYANTYKNWFPGPMGRTQGWNLGSGVNRASVSAFATTNRMELEGASYQVPPQPNGMTNNLQGSNTYALENTMIFNSQPANPGTTATYLEGNMLITSESETQPVNRVAYNVGGQMATNNQSSTTAPATGTYNLQEIVPGSVWMERDVYLQGPIWAKIPETGAHFHPSPAMGGFGLKHPPPMMLIKNTPVPGNITSFSDVPVSSFITQYSTGQVTVEMEWELKKENSKRWNPEIQYTNNYNDPQFVDFAPDSTGEYRTTRPIGTRYLTRPL

SEQ ID NO: 103 - DNA, 2175 bp, Adeno-associated virus
atgtcttttgttgatcaccctccagattggttggaagaagttggtgaaggtcttcgcgagtttttgggccttgaagcgggcccaccgaaaccaaaacccaatcagcagcatcaagatcaagcccgtggtcttgtgctgcctggttataactatctcggacccggaaacggtctcgatcgaggagagcctgtcaacagggcagacgaggtcgcgcgagagcacgacatctcgtacaacgagcagcttgaggcgggagacaacccctacctcaagtacaaccacgcggacgccgagtttcaggagaagctcgccgacgacacatccttcgggggaaacctcggaaaggcagtctttcaggccaagaaaagggttctcgaaccttttggcctggttgaagagggtgctaagacggcccctaccggaaagcggatagacgaccactttccaaaaagaaagaaggctcggaccgaagaggactccaagccttccacctcgtcagacgccgaagctggacccagcggatcccagcagctgcaaatcccagcccaaccagcctcaagtttgggagctgatacaatgtctgcgggaggtggcggcccattgggcgacaataaccaaggtgccgatggagtgggcaatgcctcgggagattggcattgcgattccacgtggatgggggacagagtcgtcaccaagtccacccgaacctgggtgctgcccagctacaacaaccaccagtaccgagagatcaaaagcggctccgtcgacggaagcaacgccaacgcctactttggatacagcaccccctgggggtactttgactttaaccgcttccacagccactggagcccccgagactggcaaagactcatcaacaactactggggcttcagaccccggtccctcagagtcaaaatcttcaacattcaagtcaaagaggtcacggtgcaggactccaccaccaccatcgccaacaacctcacctccaccgtccaagtgtttacggacgacgactaccagctgccctacgtcgtcggcaacgggaccgagggatgcctgccggccttccctccgcaggtctttacgctgccgcagtacggttacgcgacgctgaaccgcgacaacacagaaaatcccaccgagaggagcagcttcttctgcctagagtactttcccagcaagatgctgagaacgggcaacaactttgagtttacctacaactttgaggaggtgcccttccactccagcttcgctcccagtcagaacctgttcaagctggccaacccgctggtggaccagtacttgtaccgcttcgtgagcacaaataacactggcggagtccagttcaacaagaacctggccgggagatacgccaacacctacaaaaactggttcccggggcccatgggccgaacccagggctggaacctgggctccggggtcaaccgcgccagtgtcagcgccttcgccacgaccaataggatggagctcgagggcgcgagttaccaggtgcccccgcagccgaacggcatgaccaacaacctccagggcagcaacacctatgccctggagaacactatgatcttcaacagccagccggcgaacccgggcaccaccgccacgtacctcgagggcaacatgctcatcaccagcgagagcgagacgcagccggtgaaccgcgtggcgtacaacgtcggcgggcagatggccaccaacaaccagagctccaccactgcccccgcgaccggcacgtacaacctccaggaaatcgtgcccggcagcgtgtggatggagagggacgtgtacctccaaggacccatctgggccaagatcccagagacgggggcgcactttcacccctctccggccatgggcggattcggactcaaacacccaccgcccatgatgctcatcaagaacacgcctgtgcccggaaatatcaccagcttctcggacgtgcccgtcagcagcttcatcacccagtacagcaccgggcaggtcaccgtggagatggagtgggagctcaagaaggaaaactccaagaggtggaacccagagatccagtacacaaacaactacaacgacccccagtttgtggactttgccccggacagcaccggggaatacagaaccaccagacctatcggaacccgataccttacccgacccctttaa

SEQ ID NO: 104 - DNA, 2208 bp, Artificial Sequence
  Description of Artificial Sequence: Synthetic polynucleotide
atggctgccgatggttatcttccagattggctcgaggacaacctctctgagggcattcgcgagtggtgggacttgaaacctggagccccgaaacccaaagccaaccagcaaaagcaggacgacggccggggtctggtgcttcctggctacaagtacctcggacccttcaacggactcgacaagggggagcccgtcaacgcggcggatgcagcggccctcgagcacgacaaggcctacgaccagcagctcaaagcgggtgacaatccgtacctgcggtataaccacgccgacgccgagtttcaggagcgtctgcaagaagatacgtcttttgggggcaacctcgggcgagcagtcttccaggccaagaagagggttctcgaaccttttggtctggttgaggaaggtgctaagacggctcctggaaagaaacgtccggtagagcagtcgccacaagagccagactcctcctcgggcattggcaagacaggccagcagcccgctaaaaagagactcaattttggtcagactggcgactcagagtcagtccccgacccacaacctctcggagaacctccagcaacccccgctgctgtgggacctactacaatggcttcaggcggtggcgcaccaatggcagacaataacgaaggcgccgacggagtgggtaatgcctcaggaaattggcattgcgattccacatggctgggcgacagagtcatcaccaccagcacccgaacatgggccttgcccacctataacaaccacctctacaagcaaatctccagtgcttcaacgggggccagcaacgacaaccactacttcggctacagcaccccctgggggtattttgatttcaacagattccactgccatttctcaccacgtgactggcagcgactcatcaacaacaattggggattccggcccaagagactcaacttcaagctcttcaacatccaagtcaaggaggtcacgacgaatgatggcgtcacgaccatcgctaataaccttaccagcacggttcaagtcttctcggactcggagtaccagttgccgtacgtcctcggctctgcgcaccagggctgcctccctccgttcccggcggacgtgttcatgattccgcagtacggctacctaacgctcaacaatggcagccaggcagtgggacggtcatccttttactgcctggaatatttcccatcgcagatgctgagaacgggcaataactttaccttcagctacaccttcgaggacgtgcctttccacagcagctacgcgcacagccagagcctggaccggctgatgaatcctctcatcgaccagtacctgtattacctgaacagaactcagaatcagtccggaagtgcccaaaacaaggacttgctgtttagccgggggtctccagctggcatgtctgttcagcccaaaaactggctacctggaccctgttaccggcagcagcgcgtttctaaaacaaaaacagacaacaacaacagcaactttacctggactggtgcttcaaaatataaccttaatgggcgtgaatctataatcaaccctggcactgctatggcctcacacaaagacgacaaagacaagttctttcccatgagcggtgtcatgatttttggaaaggagagcgccggagcttcaaacactgcattggacaatgtcatgatcacagacgaagaggaaatcaaagccactaaccccgtggccaccgaaagatttgggactgtggcagtcaatctccagagcagcagcacagaccctgcgaccggagatgtgcatgttatgggagccttacctggaatggtgtggcaagacagagacgtatacctgcagggtcctatttgggccaaaattcctcacacggatggacactttcacccgtctcctctcatgggcggctttggacttaagcacccgcctcctcagatcctcatcaaaaacacgcctgttcctgcgaatcctccggcagagttttcggctacaaagtttgcttcattcatcacccagtattccacaggacaagtgagcgtggagattgaatgggagctgcagaaagaaaacagcaaacgctggaatcccgaagtgcagtatacatctaactatgcaaaatctgccaacgttgatttcactgtggacaacaatggactttatactgagcctcgccccattggcacccgttacctcacccgtcccctg

SEQ ID NO: 105 - protein, 736 aa, Adeno-associated virus 6
MAADGYLPDWLEDNLSEGIREWWDLKPGAPKPKANQQKQDDGRGLVLPGYKYLGPFNGLDKGEPVNAADAAALEHDKAYDQQLKAGDNPYLRYNHADAEFQERLQEDTSFGGNLGRAVFQAKKRVLEPFGLVEEGAKTAPGKKRPVEQSPQEPDSSSGIGKTGQQPAKKRLNFGQTGDSESVPDPQPLGEPPATPAAVGPTTMASGGGAPMADNNEGADGVGNASGNWHCDSTWLGDRVITTSTRTWALPTYNNHLYKQISSASTGASNDNHYFGYSTPWGYFDFNRFHCHFSPRDWQRLINNNWGFRPKRLNFKLFNIQVKEVTTNDGVTTIANNLTSTVQVFSDSEYQLPYVLGSAHQGCLPPFPADVFMIPQYGYLTLNNGSQAVGRSSFYCLEYFPSQMLRTGNNFTFSYTFEDVPFHSSYAHSQSLDRLMNPLIDQYLYYLNRTQNQSGSAQNKDLLFSRGSPAGMSVQPKNWLPGPCYRQQRVSKTKTDNNNSNFTWTGASKYNLNGRESIINPGTAMASHKDDKDKFFPMSGVMIFGKESAGASNTALDNVMITDEEEIKATNPVATERFGTVAVNLQSSSTDPATGDVHVMGALPGMVWQDRDVYLQGPIWAKIPHTDGHFHPSPLMGGFGLKHPPPQILIKNTPVPANPPAEFSATKFASFITQYSTGQVSVEIEWELQKENSKRWNPEVQYTSNYAKSANVDFTVDNNGLYTEPRPIGTRYLTRPL

SEQ ID NO: 106 - protein, 623 aa, Adeno-associated virus 6
MPGFYEIVIKVPSDLDEHLPGISDSFVNWVAEKEWELPPDSDMDLNLIEQAPLTVAEKLQRDFLVQWRRVSKAPEALFFVQFEKGESYFHLHILVETTGVKSMVLGRFLSQIRDKLVQTIYRGIEPTLPNWFAVTKTRNGAGGGNKVVDECYIPNYLLPKTQPELQWAWTNMEEYISACLNLAERKRLVAHDLTHVSQTQEQNKENLNPNSDAPVIRSKTSARYMELVGWLVDRGITSEKQWIQEDQASYISFNAASNSRSQIKAALDNAGKIMALTKSAPDYLVGPAPPADIKTNRIYRILELNGYDPAYAGSVFLGWAQKRFGKRNTIWLFGPATTGKTNIAEAIAHAVPFYGCVNWTNENFPFNDCVDKMVIWWEEGKMTAKVVESAKAILGGSKVRVDQKCKSSAQIDPTPVIVTSNTNMCAVIDGNSTTFEHQQPLQDRMFKFELTRRLEHDFGKVTKQEVKEFFRWAQDHVTEVAHEFYVRKGGANKRPAPDDADKSEPKRACPSVADPSTSDAEGAPVDFADRYQNKCSRHAGMLQMLFPCKTCERMNQNFNICFTHGTRDCSECFPGVSESQPVVRKRTYRKLCAIHHLLGRAPEIACSACDLVNVDLDDCVSEQ

SEQ ID NO: 107 - DNA, 4683 bp, Adeno-associated virus 6
ttggccactccctctctgcgcgctcgctcgctcactgaggccgggcgaccaaaggtcgcccgacgcccgggctttgcccgggcggcctcagtgagcgagcgagcgcgcagagagggagtggccaactccatcactaggggttcctggaggggtggagtcgtgacgtgaattacgtcatagggttagggaggtcctgtattagaggtcacgtgagtgttttgcgacattttgcgacaccatgtggtcacgctgggtatttaagcccgagtgagcacgcagggtctccattttgaagcgggaggtttgaacgcgcagcgccatgccggggttttacgagattgtgattaaggtccccagcgaccttgacgagcatctgcccggcatttctgacagctttgtgaactgggtggccgagaaggaatgggagttgccgccagattctgacatggatctgaatctgattgagcaggcacccctgaccgtggccgagaagctgcagcgcgacttcctggtccagtggcgccgcgtgagtaaggccccggaggccctcttctttgttcagttcgagaagggcgagtcctacttccacctccatattctggtggagaccacgggggtcaaatccatggtgctgggccgcttcctgagtcagattagggacaagctggtgcagaccatctaccgcgggatcgagccgaccctgcccaactggttcgcggtgaccaagacgcgtaatggcgccggaggggggaacaaggtggtggacgagtgctacatccccaactacctcctgcccaagactcagcccgagctgcagtgggcgtggactaacatggaggagtatataagcgcgtgtttaaacctggccgagcgcaaacggctcgtggcgcacgacctgacccacgtcagccagacccaggagcagaacaaggagaatctgaaccccaattctgacgcgcctgtcatccggtcaaaaacctccgcacgctacatggagctggtcgggtggctggtggaccggggcatcacctccgagaagcagtggatccaggaggaccaggcctcgtacatctccttcaacgccgcctccaactcgcggtcccagatcaaggccgctctggacaatgccggcaagatcatggcgctgaccaaatccgcgcccgactacctggtaggccccgctccgcccgccgacattaaaaccaaccgcatttaccgcatcctggagctgaacggctacgaccctgcctacgccggctccgtctttctcggctgggcccagaaaaggttcggaaaacgcaacaccatctggctgtttgggccggccaccacgggcaagaccaacatcgcggaagccatcgcccacgccgtgcccttctacggctgcgtcaactggaccaatgagaactttcccttcaacgattgcgtcgacaagatggtgatctggtgggaggagggcaagatgacggccaaggtcgtggagtccgccaaggccattctcggcggcagcaaggtgcgcgtggaccaaaagtgcaagtcgtccgcccagatcgatcccacccccgtgatcgtcacctccaacaccaacatgtgcgccgtgattgacgggaacagcaccaccttcgagcaccagcagccgttgcaggaccggatgttcaaatttgaactcacccgccgtctggagcatgactttggcaaggtgacaaagcaggaagtcaaagagttcttccgctgggcgcaggatcacgtgaccgaggtggcgcatgagttctacgtcagaaagggtggagccaacaagagacccgcccccgatgacgcggataaaagcgagcccaagcgggcctgcccctcagtcgcggatccatcgacgtcagacgcggaaggagctccggtggactttgccgacaggtaccaaaacaaatgttctcgtcacgcgggcatgcttcagatgctgtttccctgcaaaacatgcgagagaatgaatcagaatttcaacatttgcttcacgcacgggaccagagactgttcagaatgtttccccggcgtgtcagaatctcaaccggtcgtcagaaagaggacgtatcggaaactctgtgccattcatcatctgctggggcgggctcccgagattgcttgctcggcctgcgatctggtcaacgtggatctggatgactgtgtttctgagcaataaatgacttaaaccaggtatggctgccgatggttatcttccagattggctcgaggacaacctctctgagggcattcgcgagtggtgggacttgaaacctggagccccgaaacccaaagccaaccagcaaaagcaggacgacggccggggtctggtgcttcctggctacaagtacctcggacccttcaacggactcgacaagggggagcccgtcaacgcggcggatgcagcggccctcgagcacgacaaggcctacgaccagcagctcaaagcgggtgacaatccgtacctgcggtataaccacgccgacgccgagtttcaggagcgtctgcaagaagatacgtcttttgggggcaacctcgggcgagcagtcttccaggccaagaagagggttctcgaaccttttggtctggttgaggaaggtgctaagacggctcctggaaagaaacgtccggtagagcagtcgccacaagagccagactcctcctcgggcattggcaagacaggccagcagcccgctaaaaagagactcaattttggtcagactggcgactcagagtcagtccccgacccacaacctctcggagaacctccagcaacccccgctgctgtgggacctactacaatggcttcaggcggtggcgcaccaatggcagacaataacgaaggcgccgacggagtgggtaatgcctcaggaaattggcattgcgattccacatggctgggcgacagagtcatcaccaccagcacccgaacatgggccttgcccacctataacaaccacctctacaagcaaatctccagtgcttcaacgggggccagcaacgacaaccactacttcggctacagcaccccctgggggtattttgatttcaacagattccactgccatttctcaccacgtgactggcagcgactcatcaacaacaattggggattccggcccaagagactcaacttcaagctcttcaacatccaagtcaaggaggtcacgacgaatgatggcgtcacgaccatcgctaataaccttaccagcacggttcaagtcttctcggactcggagtaccagttgccgtacgtcctcggctctgcgcaccagggctgcctccctccgttcccggcggacgtgttcatgattccgcagtacggctacctaacgctcaacaatggcagccaggcagtgggacggtcatccttttactgcctggaatatttcccatcgcagatgctgagaacgggcaataactttaccttcagctacaccttcgaggacgtgcctttccacagcagctacgcgcacagccagagcctggaccggctgatgaatcctctcatcgaccagtacctgtattacctgaacagaactcagaatcagtccggaagtgcccaaaacaaggacttgctgtttagccgggggtctccagctggcatgtctgttcagcccaaaaactggctacctggaccctgttaccggcagcagcgcgtttctaaaacaaaaacagacaacaacaacagcaactttacctggactggtgcttcaaaatataaccttaatgggcgtgaatctataatcaaccctggcactgctatggcctcacacaaagacgacaaagacaagttctttcccatgagcggtgtcatgatttttggaaaggagagcgccggagcttcaaacactgcattggacaatgtcatgatcacagacgaagaggaaatcaaagccactaaccccgtggccaccgaaagatttgggactgtggcagtcaatctccagagcagcagcacagaccctgcgaccggagatgtgcatgttatgggagccttacctggaatggtgtggcaagacagagacgtatacctgcagggtcctatttgggccaaaattcctcacacggatggacactttcacccgtctcctctcatgggcggctttggacttaagcacccgcctcctcagatcctcatcaaaaacacgcctgttcctgcgaatcctccggcagagttttcggctacaaagtttgcttcattcatcacccagtattccacaggacaagtgagcgtggagattgaatgggagctgcagaaagaaaacagcaaacgctggaatcccgaagtgcagtatacatctaactatgcaaaatctgccaacgttgatttcactgtggacaacaatggactttatactgagcctcgccccattggcacccgttacctcacccgtcccctgtaattgtgtgttaatcaataaaccggttaattcgtgtcagttgaactttggtctcatgtcgttattatcttatctggtcaccatagcaaccggttacacattaactgcttagttgcgcttcgcgaatacccctagtgatggagttgcccactccctctatgcgcgctcgctcgctcggtggggccggcagagcagagctctgccgtctgcggacctttggtccgcaggccccaccgagcgagcgagcgcgcatagagggagtgggcaa

SEQ ID NO: 108 - DNA, 2211 bp, Artificial Sequence
  Description of Artificial Sequence: Synthetic polynucleotide
atggctgccgatggttatcttccagattggctcgaggacaacctctctgagggcattcgcgagtggtgggacttgaaacctggagccccgaaacccaaagccaaccagcaaaagcaggacgacggccggggtctggtgcttcctggctacaagtacctcggacccttcaacggactcgacaagggggagcccgtcaacgcggcggatgcagcggccctcgagcacgacaaggcctacgaccagcagctcaaagcgggtgacaatccgtacctgcggtataaccacgccgacgccgagtttcaggagcgtctgcaagaagatacgtcttttgggggcaacctcgggcgagcagtcttccaggccaagaagagggttctcgaaccttttggtctggttgaggaaggtgctaagacggctcctggaaagaaacgtccggtagagcagtcgccacaagagccagactcctcctcgggcattggcaagacaggccagcagcccgctaaaaagagactcaattttggtcagactggcgactcagagtcagtccccgacccacaacctctcggagaacctccagcaacccccgctgctgtgggacctactacaatggcttcaggcggtggcgcaccaatggcagacaataacgaaggcgccgacggagtgggtaatgcctcaggaaattggcattgcgattccacatggctgggcgacagagtcatcaccaccagcacccgaacatgggccttgcccacctataacaaccacctctacaagcaaatctccagtgcttcaacgggggccagcaacgacaaccactacttcggctacagcaccccctgggggtattttgatttcaacagattccactgccatttctcaccacgtgactggcagcgactcatcaacaacaattggggattccggcccaagagactcaacttcaagctcttcaacatccaagtcaaggaggtcacgacgaatgatggcgtcacgaccatcgctaataaccttaccagcacggttcaagtcttctcggactcggagtaccagttgccgtacgtcctcggctctgcgcaccagggctgcctccctccgttcccggcggacgtgttcatgattccgcagtacggctacctaacgctcaacaatggcagccaggcagtgggacggtcatccttttactgcctggaatatttcccatcgcagatgctgagaacgggcaataactttaccttcagctacaccttcgaggacgtgcctttccacagcagctacgcgcacagccagagcctggaccggctgatgaatcctctcatcgaccagtacctgtattacctgaacagaactcagaatcagtccggaagtgcccaaaacaaggacttgctgtttagccgggggtctccagctggcatgtctgttcagcccaaaaactggctacctggaccctgttaccggcagcagcgcgtttctaaaacaaaaacagacaacaacaacagcaactttacctggactggtgcttcaaaatataaccttaatgggcgtgaatctataatcaaccctggcactgctatggcctcacacaaagacgacaaagacaagttctttcccatgagcggtgtcatgatttttggaaaggagagcgccggagcttcaaacactgcattggacaatgtcatgatcacagacgaagaggaaatcaaagccactaaccccgtggccaccgaaagatttgggactgtggcagtcaatctccagagcagcagcacagaccctgcgaccggagatgtgcatgttatgggagccttacctggaatggtgtggcaagacagagacgtatacctgcagggtcctatttgggccaaaattcctcacacggatggacactttcacccgtctcctctcatgggcggctttggacttaagcacccgcctcctcagatcctcatcaaaaacacgcctgttcctgcgaatcctccggcagagttttcggctacaaagtttgcttcattcatcacccagtattccacaggacaagtgagcgtggagattgaatgggagctgcagaaagaaaacagcaaacgctggaatcccgaagtgcagtatacatctaactatgcaaaatctgccaacgttgatttcactgtggacaacaatggactttatactgagcctcgccccattggcacccgttacctcacccgtcccctgtaa

SEQ ID NO: 109 - protein, 736 aa, Artificial Sequence; identical to SEQ ID NO: 105
  Description of Artificial Sequence: Synthetic polypeptide

SEQ ID NO: 110 - protein, 736 aa, Artificial Sequence
  Description of Artificial Sequence: Synthetic polypeptide
MAADGYLPDWLEDNLSEGIREWWDLKPGAPKPKANQQKQDDGRGLVLPGYKYLGPFNGLDKGEPVNAADAAALEHDKAYDQQLKAGDNPYLRYNHADAEFQERLQEDTSFGGNLGRAVFQAKKRVLEPFGLVEEGAKTAPGKKRPVEQSPQEPDSSSGIGKTGQQPAKKRLNFGQTGDSESVPDPQPLGEPPATPAAVGPTTMASGGGAPMADNNEGADGVGNASGNWHCDSTWLGDRVITTSTRTWALPTYNNHLYKQISSASTGASNDNHYFGYSTPWGYFDFNRFHCHFSPRDWQRLINNNWGFRPKRLNFKLFNIQVKEVTTNDGVTTIANNLTSTVQVFSDSEYQLPYVLGSAHQGCLPPFPADVFMIPQYGYLTLNNGSQAVGRSSFYCLEYFPSQMLRTGNNFTFSYTFEDVPFHSSYAHSQSLDRLMNPLIDQYLYYLNRTQNQSGSAQNKDLLFSRGSPAGMSVQPKNWLPGPCYRQQRVSKTKTDNNNSNFTWTGASKYNLNGRESIINPGTAMASHKDDEDKFFPMSGVMIFGKESAGASNTALDNVMITDEEEIKATNPVATERFGTVAVNLQSSSTDPATGDVHVMGALPGMVWQDRDVYLQGPIWAKIPHTDGHFHPSPLMGGFGLKHPPPQILIKNTPVPANPPAEFSATKFASFITQYSTGQVSVEIEWELQKENSKRWNPEVQYTSNYAKSANVDFTVDNNGLYTEPRPIGTRYLTRPL

SEQ ID NO: 111 - protein, 736 aa, Artificial Sequence
  Description of Artificial Sequence: Synthetic polypeptide
MAADGYLPDWLEDNLSEGIREWWDLKPGAPKPKANQQKQDDGRGLVLPGYKYLGPFNGLDKGEPVNAADAAALEHDKAYDQQLKAGDNPYLRYNHADAEFQERLQEDTSFGGNLGRAVFQAKKRVLEPLGLVEEGAKTAPGKKRPVEQSPQEPDSSSGIGKTGQQPAKKRLNFGQTGDSESVPDPQPLGEPPATPAAVGPTTMASGGGAPMADNNEGADGVGNASGNWHCDSTWLGDRVITTSTRTWALPTYNNHLYKQISSASTGASNDNHYFGYSTPWGYFDFNRFHCHFSPRDWQRLINNNWGFRPKRLNFKLFNIQVKEVTTNDGVTTIANNLTSTVQVFSDSEYQLPYVLGSAHQGCLPPFPADVFMIPQYGYLTLNNGSQAVGRSSFYCLEYFPSQMLRTGNNFTFSYTFEDVPFHSSYAHSQSLDRLMNPLIDQYLYYLNRTQNQSGSAQNKDLLFSRGSPAGMSVQPKNWLPGPCYRQQRVSKTKTDNNNSNFTWTGASKYNLNGRESIINPGTAMASHKDDEDKFFPMSGVMIFGKESAGASNTALDNVMITDEEEIKATNPVATERFGTVAVNLQSSSTDPATGDVHVMGALPGMVWQDRDVYLQGPIWAKIPHTDGHFHPSPLMGGFGLKHPPPQILIKNTPVPANPPAEFSATKFASFITQYSTGQVSVEIEWELQKENSKRWNPEVQYTSNYAKSANVDFTVDNNGLYTEPRPIGTRYLTRPL

SEQ ID NO: 112 - protein, 736 aa, Artificial Sequence
  Description of Artificial Sequence: Synthetic polypeptide
MAADGYLPDWLEDNLSEGIREWWDLKPGAPKPKANQQKQDDGRGLVLPGYKYLGPFNGLDKGEPVNAADAAALEHDKAYDQQLKAGDNPYLRYNHADAEFQERLQEDTSFGGNLGRAVFQAKKRVLEPLGLVEEGAKTAPGKKRPVEQSPQEPDSSSGIGKTGQQPAKKRLNFGQTGDSESVPDPQPLGEPPATPAAVGPTTMASGGGAPMADNNEGADGVGNASGNWHCDSTWLGDRVITTSTRTWALPTYNNHLYKQISSASTGASNDNHYFGYSTPWGYFDFNRFHCHFSPRDWQRLINNNWGFRPKRLNFKLFNIQVKEVTTNDGVTTIANNLTSTVQVFSDSEYQLPYVLGSAHQGCLPPFPADVFMIPQYGYLTLNNGSQAVGRSSFYCLEYFPSQMLRTGNNFTFSYTFEDVPFHSSYAHSQSLDRLMNPLIDQYLYYLNRTQNQSGSAQNKDLLFSRGSPAGMSVQPKNWLPGPCYRQQRVSKTKTDNNNSNFTWTGASKYNLNGRESIINPGTAMASHKDDKDKFFPMSGVMIFGKESAGASNTALDNVMITDEEEIKATNPVATERFGTVAVNLQSSSTDPATGDVHVMGALPGMVWQDRDVYLQGPIWAKIPHTDGHFHPSPLMGGFGLKHPPPQILIKNTPVPANPPAEFSATKFASFITQYSTGQVSVEIEWELQKENSKRWNPEVQYTSNYAKSANVDFTVDNNGLYTEPRPIGTRYLTRPL

SEQ ID NO: 113 - DNA, 2214 bp, Artificial Sequence
  Description of Artificial Sequence: Synthetic polynucleotide
atggctgccgatggttatcttccagattggctcgaggacaacctctctgagggcattcgcgagtggtgggacctgaaacctggagccccgaaacccaaagccaaccagcaaaagcaggacaacggccggggtctggtgcttcctggctacaagtacctcggacccttcaacggactcgacaagggggagcccgtcaacgcggcggacgcagcggccctcgagcacgacaaggcctacgaccagcagctcaaagcgggtgacaatccgtacctgcggtataaccacgccgacgccgagtttcaggagcgtctgcaagaagatacgtcatttgggggcaacctcgggcgagcagtcttccaggccaagaagcgggttctcgaacctctcggtctggttgaggaaggcgctaagacggctcctgcaaagaagagaccggtagagccgtcacctcagcgttcccccgactcctccacgggcatcggcaagaaaggccagcagcccgccagaaagagactcaatttcggtcagactggcgactcagagtcagtccccgaccctcaacctctcggagaacctccagcagcgccctctagtgtgggatctggtacagtggctgcaggcggtggcgcaccaatggcagacaataacgaaggtgccgacggagtgggtaatgcctcaggaaattggcattgcgattccacatggctgggcgacagagtcattaccaccagcacccgaacctgggccctgcccacctacaacaaccacctctacaagcaaatctccagtgaaactgcaggtagtaccaacgacaacacctacttcggctacagcaccccctgggggtattttgactttaacagattccactgccacttctcaccacgtgactggcagcgactcatcaacaacaactggggattccggcccaagaagctgcggttcaagctcttcaacatccaggtcaaggaggtcacgacgaatgacggcgttacgaccatcgctaataaccttaccagcacgattcaggtattctcggactcggaataccagctgccgtacgtcctcggctctgcgcaccagggctgcctgcctccgttcccggcggacgtcttcatgattcctcagtacggctacctgactctcaacaatggcagtcagtctgtgggacgttcctccttctactgcctggagtacttcccctctcagatgctgagaacgggcaacaactttgagttcagctacagcttcgaggacgtgcctttccacagcagctacgcacacagccagagcctggaccggctgatgaatcccctcatcgaccagtacttgtactacctggccagaacacagagtaacccaggaggcacagctggcaatcgggaactgcagttttaccagggcgggccttcaactatggccgaacaagccaagaattggttacctggaccttgcttccggcaacaaagagtctccaaaacgctggatcaaaacaacaacagcaactttgcttggactggtgccaccaaatatcacctgaacggcagaaactcgttggttaatcccggcgtcgccatggcaactcacaaggacgacgaggaccgctttttcccatccagcggagtcctgatttttggaaaaactggagcaactaacaaaactacattggaaaatgtgttaatgacaaatgaagaagaaattcgtcctactaatcctgtagccacggaagaatacgggatagtcagcagcaacttacaagcggctaatactgcagcccagacacaagttgtcaacaaccagggagccttacctggcatggtctggcagaaccgggacgtgtacctgcagggtcccatctgggccaagattcctcacacggatggcaactttcacccgtctcctttgatgggcggctttggacttaaacatccgcctcctcagatcctgatcaagaacactcccgttcccgctaatcctccggaggtgtttactcctgccaagtttgcttcgttcatcacacagtacagcaccggacaagtcagcgtggaaatcgagtgggagctgcagaaggaaaacagcaagcgctggaacccggagattcagtacacctccaactttgaaaagcagactggtgtggactttgccgttgacagccagggtgtttactctgagcctcgccctattggcactcgttacctcacccgtaatctgtaa

SEQ ID NO: 114 - protein, 738 aa, Artificial Sequence
  Description of Artificial Sequence: Synthetic polypeptide
MAADGYLPDWLEDNLSEGIREWWALKPGAPKPKANQQKQDDGRGLVLPGYKYLGPFNGLDKGEPVNAADAAALEHDKAYDQQLQAGDNPYLRYNHADAEFQERLQEDTSFGGNLGRAVFQAKKRVLEPLGLVEEGAKTAPGKKRPVEPSPQRSPDSSTGIGKKGQQPARKRLNFGQTGDSESVPDPQPLGEPPAAPSGVGPNTMAAGGGAPMADNNEGADGVGSSSGNWHCDSTWLGDRVITTSTRTWALPTYNNHLYKQISNGTSGGATNDNTYFGYSTPWGYFDFNRFHCHFSPRDWQRLINNNWGFRPKRLSFKLFNIQVKEVTQNEGTKTIANNLTSTIQVFTDSEYQLPYVLGSAHQGCLPPFPADVFMIPQYGYLTLNNGSQAVGRSSFYCLEYFPSQMLRTGNNFQFTYTFEDVPFHSSYAHSQSLDRLMNPLIDQYLYYLSRTQTTGGTANTQTLGFSQGGPNTMANQAKNWLPGPCYRQQRVSTTTGQNNNSNFAWTAGTKYHLNGRNSLANPGIAMATHKDDEERFFPSNGILIFGKQNAARDNADYSDVMLTSEEEIKTTNPVATEEYGIVADNLQQQNTAPQIGTVNSQGALPGMVWQNRDVYLQGPIWAKIPHTDGNFHPSPLMGGFGLKHPPPQILIKNTPVPADPPTTFNQSKLNSFITQYSTGQVSVEIEWELQKENSKRWNPEIQYTSNYYKSTSVDFAVNTEGVYSEPRPIGTRYLTRNL

SEQ ID NO: 115 - protein, 737 aa, Adeno-associated virus 7
MAADGYLPDWLEDNLSEGIREWWDLKPGAPKPKANQQKQDNGRGLVLPGYKYLGPFNGLDKGEPVNAADAAALEHDKAYDQQLKAGDNPYLRYNHADAEFQERLQEDTSFGGNLGRAVFQAKKRVLEPLGLVEEGAKTAPAKKRPVEPSPQRSPDSSTGIGKKGQQPARKRLNFGQTGDSESVPDPQPLGEPPAAPSSVGSGTVAAGGGAPMADNNEGADGVGNASGNWHCDSTWLGDRVITTSTRTWALPTYNNHLYKQISSETAGSTNDNTYFGYSTPWGYFDFNRFHCHFSPRDWQRLINNNWGFRPKKLRFKLFNIQVKEVTTNDGVTTIANNLTSTIQVFSDSEYQLPYVLGSAHQGCLPPFPADVFMIPQYGYLTLNNGSQSVGRSSFYCLEYFPSQMLRTGNNFEFSYSFEDVPFHSSYAHSQSLDRLMNPLIDQYLYYLARTQSNPGGTAGNRELQFYQGGPSTMAEQAKNWLPGPCFRQQRVSKTLDQNNNSNFAWTGATKYHLNGRNSLVNPGVAMATHKDDEDRFFPSSGVLIFGKTGATNKTTLENVLMTNEEEIRPTNPVATEEYGIVSSNLQAANTAAQTQVVNNQGALPGMVWQNRDVYLQGPIWAKIPHTDGNFHPSPLMGGFGLKHPPPQILIKNTPVPANPPEVFTPAKFASFITQYSTGQVSVEIEWELQKENSKRWNPEIQYTSNFEKQTGVDFAVDSQGVYSEPRPIGTRYLTRNL

SEQ ID NO: 116 - protein, 623 aa, Adeno-associated virus 7
MPGFYEIVIKVPSDLDEHLPGISDSFVNWVAEKEWELPPDSDMDLNLIEQAPLTVAEKLQRDFLVQWRRVSKAPEALFFVQFEKGESYFHLHVLVETTGVKSMVLGRFLSQIREKLVQTIYRGVEPTLPNWFAVTKTRNGAGGGNKVVDECYIPNYLLPKTQPELQWAWTNMEEYISACLNLAERKRLVAQHLTHVSQTQEQNKENLNPNSDAPVIRSKTSARYMELVGWLVDRGITSEKQWIQEDQASYISFNAASNSRSQIKAALDNAGKIMALTKSAPDYLVGPSLPADIKTNRIYRILELNGYDPAYAGSVFLGWAQKKFGKRNTIWLFGPATTGKTNIAEAIAHAVPFYGCVNWTNENFPFNDCVDKMVIWWEEGKMTAKVVESAKAILGGSKVRVDQKCKSSAQIDPTPVIVTSNTNMCAVIDGNSTTFEHQQPLQDRMFKFELTRRLEHDFGKVTKQEVKEFFRWASDHVTEVAHEFYVRKGGASKRPAPDDADISEPKRACPSVADPSTSDAEGAPVDFADRYQNKCSRHAGMIQMLFPCKTCERMNQNFNICFTHGVRDCLECFPGVSESQPVVRKKTYRKLCAIHHLLGRAPEIACSACDLVNVDLDDCVSEQ

SEQ ID NO: 117 - DNA, 4721 bp, Adeno-associated virus 7
ttggccactccctctatgcgcgctcgctcgctcggtggggcctgcggaccaaaggtccgcagacggcagagctctgctctgccggccccaccgagcgagcgagcgcgcatagagggagtggccaactccatcactaggggtaccgcgaagcgcctcccacgctgccgcgtcagcgctgacgtaaatcacgtcataggggagtggtcctgtattagctgtcacgtgagtgcttttgcgacattttgcgacaccacgtggccatttgaggtatatatggccgagtgagcgagcaggatctccattttgaccgcgaaatttgaacgagcagcagccatgccgggtttctacgagatcgtgatcaaggtgccgagcgacctggacgagcacctgccgggcatttctgactcgtttgtgaactgggtggccgagaaggaatgggagctgcccccggattctgacatggatctgaatctgatcgagcaggcacccctgaccgtggccgagaagctgcagcgcgacttcctggtccaatggcgccgcgtgagtaaggccccggaggccctgttctttgttcagttcgagaagggcgagagctacttccaccttcacgttctggtggagaccacgggggtcaagtccatggtgctaggccgcttcctgagtcagattcgggagaagctggtccagaccatctaccgcggggtcgagcccacgctgcccaactggttcgcggtgaccaagacgcgtaatggcgccggcggggggaacaaggtggtggacgagtgctacatccccaactacctcctgcccaagacccagcccgagctgcagtgggcgtggactaacatggaggagtatataagcgcgtgtttgaacctggccgaacgcaaacggctcgtggcgcagcacctgacccacgtcagccagacgcaggagcagaacaaggagaatctgaaccccaattctgacgcgcccgtgatcaggtcaaaaacctccgcgcgctacatggagctggtcgggtggctggtggaccggggcatcacctccgagaagcagtggatccaggaggaccaggcctcgtacatctccttcaacgccgcctccaactcgcggtcccagatcaaggccgcgctggacaatgccggcaagatcatggcgctgaccaaatccgcgcccgactacctggtggggccctcgctgcccgcggacattaaaaccaaccgcatctaccgcatcctggagctgaacgggtacgatcctgcctacgccggctccgtctttctcggctgggcccagaaaaagttcgggaagcgcaacaccatctggctgtttgggcccgccaccaccggcaagaccaacattgcggaagccatcgcccacgccgtgcccttctacggctgcgtcaactggaccaatgagaactttcccttcaacgattgcgtcgacaagatggtgatctggtgggaggagggcaagatgacggccaaggtcgtggagtccgccaaggccattctcggcggcagcaaggtgcgcgtggaccaaaagtgcaagtcgtccgcccagatcgaccccacccccgtgatcgtcacctccaacaccaacatgtgcgccgtgattgacgggaacagcaccaccttcgagcaccagcagccgttgcaggaccggatgttcaaatttgaactcacccgccgtctggagcacgactttggcaaggtgacgaagcaggaagtcaaagagttcttccgctgggccagtgatcacgtgaccgaggtggcgcatgagttctacgtcagaaagggcggagccagcaaaagacccgcccccgatgacgcggatataagcgagcccaagcgggcctgcccctcagtcgcggatccatcgacgtcagacgcggaaggagctccggtggactttgccgacaggtaccaaaacaaatgttctcgtcacgcgggcatgattcagatgctgtttccctgcaaaacgtgcgagagaatgaatcagaatttcaacatttgcttcacacacggggtcagagactgtttagagtgtttccccggcgtgtcagaatctcaaccggtcgtcagaaaaaagacgtatcggaaactctgcgcgattcatcatctgctggggcgggcgcccgagattgcttgctcggcctgcgacctggtcaacgtggacctggacgactgcgtttctgagcaataaatgacttaaaccaggtatggctgccgatggttatcttccagattggctcgaggacaacctctctgagggcattcgcgagtggtgggacctgaaacctggagccccgaaacccaaagccaaccagcaaaagcaggacaacggccggggtctggtgcttcctggctacaagtacctcggacccttcaacggactcgacaagggggagcccgtcaacgcggcggacgcagcggccctcgagcacgacaaggcctacgaccagcagctcaaagcgggtgacaatccgtacctgcggtataaccacgccgacgccgagtttcaggagcgtctgcaagaagatacgtcatttgggggcaacctcgggcgagcagtcttccaggccaagaagcgggttctcgaacctctcggtctggttgaggaaggcgctaagacggctcctgcaaagaagagaccggtagagccgtcacctcagcgttcccccgactcctccacgggcatcggcaagaaaggccagcagcccgccagaaagagactcaatttcggtcagactggcgactcagagtcagtccccgaccctcaacctctcggagaacctccagcagcgccctctagtgtgggatctggtacagtggctgcaggcggtggcgcaccaatggcagacaataacgaaggtgccgacggagtgggtaatgcctcaggaaattggcattgcgattccacatggctgggcgacagagtcattaccaccagcacccgaacctgggccctgcccacctacaacaaccacctctacaagcaaatctccagtgaaactgcaggtagtaccaacgacaacacctacttcggctacagcaccccctgggggtattttgactttaacagattccactgccacttctcaccacgtgactggcagcgactcatcaacaacaactggggattccggcccaagaagctgcggttcaagctcttcaacatccaggtcaaggaggtcacgacgaatgacggcgttacgaccatcgctaataaccttaccagcacgattcaggtattctcggactcggaataccagctgccgtacgtcctcggctctgcgcaccagggctgcctgcctccgttcccggcggacgtcttcatgattcctcagtacggctacctgactctcaacaatggcagtcagtctgtgggacgttcctccttctactgcctggagtacttcccctctcagatgctgagaacgggcaacaactttgagttcagctacagcttcgaggacgtgcctttccacagcagctacgcacacagccagagcctggaccggctgatgaatcccctcatcgaccagtacttgtactacctggccagaacacagagtaacccaggaggcacagctggcaatcgggaactgcagttttaccagggcgggccttcaactatggccgaacaagccaagaattggttacctggaccttgcttccggcaacaaagagtctccaaaacgctggatcaaaacaacaacagcaactttgcttggactggtgccaccaaatatcacctgaacggcagaaactcgttggttaatcccggcgtcgccatggcaactcacaaggacgacgaggaccgctttttcccatccagcggagtcctgatttttggaaaaactggagcaactaacaaaactacattggaaaatgtgttaatgacaaatgaagaagaaattcgtcctactaatcctgtagccacggaagaatacgggatagtcagcagcaacttacaagcggctaatactgcagcccagacacaagttgtcaacaaccagggagccttacctggcatggtctggcagaaccgggacgtgtacctgcagggtcccatctgggccaagattcctcacacggatggcaactttcacccgtctcctttgatgggcggctttggacttaaacatccgcctcctcagatcctgatcaagaacactcccgttcccgctaatcctccggaggtgtttactcctgccaagtttgcttcgttcatcacacagtacagcaccggacaagtcagcgtggaaatcgagtgggagctgcagaaggaaaacagcaagcgctggaacccggagattcagtacacctccaactttgaaaagcagactggtgtggactttgccgttgacagccagggtgtttactctgagcctcgccctattggcactcgttacctcacccgtaatctgtaattgcatgttaatcaataaaccggttgattcgtttcagttgaactttggtctcctgtgcttcttatcttatcggtttccatagcaactggttacacattaactgcttgggtgcgcttcacgataagaacactgacgtcaccgcggtacccctagtgatggagttggccactccctctatgcgcgctcgctcgctcggtggggcctgcggaccaaaggtccgcagacggcagagctctgctctgccggccccaccgagcgagcgagcgcgcatagagggagtggccaa

SEQ ID NO: 118 - DNA, 2214 bp, Artificial Sequence; identical to SEQ ID NO: 113
  Description of Artificial Sequence: Synthetic polynucleotide

SEQ ID NO: 119 - protein, 737 aa, Artificial Sequence; identical to SEQ ID NO: 115
  Description of Artificial Sequence: Synthetic polypeptide

SEQ ID NO: 120 - DNA, 2217 bp, Artificial Sequence
  Description of Artificial Sequence: Synthetic polynucleotide
atggctgccgatggttatcttccagattggctcgaggacaacctctctgagggcattcgcgagtggtgggcgctgaaacctggagccccgaagcccaaagccaaccagcaaaagcaggacgacggccggggtctggtgcttcctggctacaagtacctcggacccttcaacggactcgacaagggggagcccgtcaacgcggcggacgcagcggccctcgagcacgacaaggcctacgaccagcagctgcaggcgggtgacaatccgtacctgcggtataaccacgccgacgccgagtttcaggagcgtctgcaagaagatacgtcttttgggggcaacctcgggcgagcagtcttccaggccaagaagcgggttctcgaacctctcggtctggttgaggaaggcgctaagacggctcctggaaagaagagaccggtagagccatcaccccagcgttctccagactcctctacgggcatcggcaagaaaggccaacagcccgccagaaaaagactcaattttggtcagactggcgactcagagtcagttccagaccctcaacctctcggagaacctccagcagcgccctctggtgtgggacctaatacaatggctgcaggcggtggcgcaccaatggcagacaataacgaaggcgccgacggagtgggtagttcctcgggaaattggcattgcgattccacatggctgggcgacagagtcatcaccaccagcacccgaacctgggccctgcccacctacaacaaccacctctacaagcaaatctccaacgggacatcgggaggagccaccaacgacaacacctacttcggctacagcaccccctgggggtattttgactttaacagattccactgccacttttcaccacgtgactggcagcgactcatcaacaacaactggggattccggcccaagagactcagcttcaagctcttcaacatccaggtcaaggaggtcacgcagaatgaaggcaccaagaccatcgccaataacctcaccagcaccatccaggtgtttacggactcggagtaccagctgccgtacgttctcggctctgcccaccagggctgcctgcctccgttcccggcggacgtgttcatgattccccagtacggctacctaacactcaacaacggtagtcaggccgtgggacgctcctccttctactgcctggaatactttccttcgcagatgctgagaaccggcaacaacttccagtttacttacaccttcgaggacgtgcctttccacagcagctacgcccacagccagagcttggaccggctgatgaatcctctgattgaccagtacctgtactacttgtctcggactcaaacaacaggaggcacggcaaatacgcagactctgggcttcagccaaggtgggcctaatacaatggccaatcaggcaaagaactggctgccaggaccctgttaccgccaacaacgcgtctcaacgacaaccgggcaaaacaacaatagcaactttgcctggactgctgggaccaaataccatctgaatggaagaaattcattggctaatcctggcatcgctatggcaacacacaaagacgacgaggagcgtttttttcccagtaacgggatcctgatttttggcaaacaaaatgctgccagagacaatgcggattacagcgatgtcatgctcaccagcgaggaagaaatcaaaaccactaaccctgtggctacagaggaatacggtatcgtggcagataacttgcagcagcaaaacacggctcctcaaattggaactgtcaacagccagggggccttacccggtatggtctggcagaaccgggacgtgtacctgcagggtcccatctgggccaagattcctcacacggacggcaacttccacccgtctccgctgatgggcggctttggcctgaaacatcctccgcctcagatcctgatcaagaacacgcctgtacctgcggatcctccgaccaccttcaaccagtcaaagctgaactctttcatcacgcaatacagcaccggacaggtcagcgtggaaattgaatgggagctgcagaaggaaaacagcaagcgctggaaccccgagatccagtacacctccaactactacaaatctacaagtgtggactttgctgttaatacagaaggcgtgtactctgaaccccgccccattggcacccgttacctcacccgtaatctgtaa

SEQ ID NO: 121 - DNA, 2213 bp, Adeno-associated virus 8
atggctgccgatggttatcttccagattggctcgaggacaacctctctgagggcattcgcgagtggtgggcgctgaaacctggagccccgaagcccaaagccaaccagcaaaagcaggacgacggccggggtctggtgcttcctggctacaagtacctcggacccttcaacggactcgacaagggggagcccgtcaacgcggcggacgcagcggccctcgagcacgacaaggcctacgaccagcagctgcaggcgggtgacaatccgtacctgcggtataaccacgccgacgccgagtttcaggagcgtctgcaagaagatacgtcttttgggggcaacctcgggcgagcagtcttccaggccaagaagcgggttctcgaacctctcggtctggttgaggaaggcgctaagacggctcctggaaagaagagaccggtagagccatcaccccagcgttctccagactcctctacgggcatcggcaagaaaggccaacagcccgccagaaaaagactcaattttggtcagactggcgactcagagtcagttccagaccctcaacctctcggagaacctccagcagcgccctctggtgtgggacctaatacaatggctgcaggcggtggcgcaccaatggcagacaataacgaaggcgccgacggagtgggtagttcctcgggaaattggcattgcgattccacatggctgggcgacagagtcatcaccaccagcacccgaacctgggccctgcccacctacaacaaccacctctacaagcaaatctccaacgggacatcgggaggagccaccaacgacaacacctacttcggctacagcaccccctgggggtattttgactttaacagattccactgccacttttcaccacgtgactggcagcgactcatcaacaacaactggggattccggcccaagagactcagcttcaagctcttcaacatccaggtcaaggaggtcacgcagaatgaaggcaccaagaccatcgccaataacctcaccagcaccatccaggtgtttacggactcggagtaccagctgccgtacgttctcggctctgcccaccagggctgcctgcctccgttcccggcggacgtgttcatgattccccagtacggctacctaacactcaacaacggtagtcaggccgtgggacgctcctccttctactgcctggaatactttccttcgcagatgctgagaaccggcaacaacttccagtttacttacaccttcgaggacgtgcctttccacagcagctacgcccacagccagagcttggaccggctgatgaatcctctgattgaccagtacctgtactacttgtctcggactcaaacaacaggaggcacggcaaatacgcagactctgggcttcagccaaggtgggcctaatacaatggccaatcaggcaaagaactggctgccaggaccctgttaccgccaacaacgcgtctcaacgacaaccgggcaaaacaacaatagcaactttgcctggactgctgggaccaaataccatctgaatggaagaaattcattggctaatcctggcatcgctatggcaacacacaaagacgacgaggagcgtttttttcccagtaacgggatcctgatttttggcaaacaaaatgctgccagagacaatgcggattacagcgatgtcatgctcaccagcgaggaagaaatcaaaaccactaaccctgtggctacagaggaatacggtatcgtggcagataacttgcagcagcaaaacacggctcctcaaattggaactgtcaacagccagggggccttacccggtatggtctggcagaaccgggacgtgtacctgcagggtcccatctgggccaagattcctcacacggacggcaacttccacccgtctccgctgatgggcggctttggcctgaaacatcctccgcctcagatcctgatcaagaacacgcctgtacctgcggatcctccgaccaccttcaaccagtcaaagctgaactctttcatcacgcaatacagcaccggacaggtcagcgtggaaattgaatgggagctgcagaaggaaaacagcaagcgctggaaccccgagatccagtacacctccaactactacaaatctacaagtgtggactttgctgtaatacagaaggcgtgtactctgaaccccgccccattggcacccgttacctcacccgtaatctg

SEQ ID NO: 122 - DNA, 4393 bp, Adeno-associated virus 8
cagagagggagtggccaactccatcactaggggtagcgcgaagcgcctcccacgctgccgcgtcagcgctgacgtaaattacgtcataggggagtggtcctgtattagctgtcacgtgagtgcttttgcggcattttgcgacaccacgtggccatttgaggtatatatggccgagtgagcgagcaggatctccattttgaccgcgaaatttgaacgagcagcagccatgccgggcttctacgagatcgtgatcaaggtgccgagcgacctggacgagcacctgccgggcatttctgactcgtttgtgaactgggtggccgagaaggaatgggagctgcccccggattctgacatggatcggaatctgatcgagcaggcacccctgaccgtggccgagaagctgcagcgcgacttcctggtccaatggcgccgcgtgagtaaggccccggaggccctcttctttgttcagttcgagaagggcgagagctactttcacctgcacgttctggtcgagaccacgggggtcaagtccatggtgctaggccgcttcctgagtcagattcgggaaaagcttggtccagaccatctacccgcggggtcgagccccaccttgcccaactggttcgcggtgaccaaagacgcggtaatggcgccggcgggggggaacaaggtggtggacgagtgctacatccccaactacctcctgcccaagactcagcccgagctgcagtgggcgtggactaacatggaggagtatataagcgcgtgcttgaacctggccgagcgcaaacggctcgtggcgcagcacctgacccacgtcagccagacgcaggagcagaacaaggagaatctgaaccccaattctgacgcgcccgtgatcaggtcaaaaacctccgcgcgctatatggagctggtcgggtggctggtggaccggggcatcacctccgagaagcagtggatccaggaggaccaggcctcgtacatctccttcaacgccgcctccaactcgcggtcccagatcaaggccgcgctggacaatgccggcaagatcatggcgctgaccaaatccgcgcccgactacctggtggggccctcgctgcccgcggacattacccagaaccgcatctaccgcatcctcgctctcaacggctacgaccctgcctacgccggctccgtctttctcggctgggctcagaaaaagttcgggaaacgcaacaccatctggctgtttggacccgccaccaccggcaagaccaacattgcggaagccatcgcccacgccgtgcccttctacggctgcgtcaactggaccaatgagaactttcccttcaatgattgcgtcgacaagatggtgatctggtgggaggagggcaagatgacggccaaggtcgtggagtccgccaaggccattctcggcggcagcaaggtgcgcgtggaccaaaagtgcaagtcgtccgcccagatcgaccccacccccgtgatcgtcacctccaacaccaacatgtgcgccgtgattgacgggaacagcaccaccttcgagcaccagcagcctctccaggaccggatgtttaagttcgaactcacccgccgtctggagcacgactttggcaaggtgacaaagcaggaagtcaaagagttcttccgctgggccagtgatcacgtgaccgaggtggcgcatgagttttacgtcagaaagggcggagccagcaaaagacccgcccccgatgacgcggataaaagcgagcccaagcgggcctgcccctcagtcgcggatccatcgacgtcagacgcggaaggagctccggtggactttgccgacaggtaccaaaacaaatgttctcgtcacgcgggcatgcttcagatgctgtttccctgcaaaacgtgcgagagaatgaatcagaatttcaacatttgcttcacacacggggtcagagactgctcagagtgtttccccggcgtgtcagaatctcaaccggtcgtcagaaagaggacgtatcggaaactctgtgcgattcatcatctgctggggcgggctcccgagattgcttgctcggcctgcgatctggtcaacgtggacctggatgactgtgtttctgagcaataaatgacttaaaccaggtatggctgccgatggttatcttccagattggctcgaggacaacctctctgagggcattcgcgagtggtgggcgctgaaacctggagccccgaagcccaaagccaaccagcaaaagcaggacgacggccggggtctggtgcttcctggctacaagtacctcggacccttcaacggactcgacaagggggagcccgtcaacgcggcggacgcagcggccctcgagcacgacaaggcctacgaccagcagctgcaggcgggtgacaatccgtacctgcggtataaccacgccgacgccgagtttcaggagcgtctgcaagaagatacgtcttttgggggcaacctcgggcgagcagtcttccaggccaagaagcgggttctcgaacctctcggtctggttgaggaaggcgctaagacggctcctggaaagaagagaccggtagagccatcaccccagcgttctccagactcctctacgggcatcggcaagaaaggccaacagcccgccagaaaaagactcaattttggtcagactggcgactcagagtcagttccagaccctcaacctctcggagaacctccagcagcgccctctggtgtgggacctaatacaatggctgcaggcggtggcgcaccaatggcagacaataacgaaggcgccgacggagtgggtagttcctcgggaaattggcattgcgattccacatggctgggcgacagagtcatcaccaccagcacccgaacctgggccctgcccacctacaacaaccacctctacaagcaaatctccaacgggacatcgggaggagccaccaacgacaacacctacttcggctacagcaccccctgggggtattttgactttaacagattccactgccacttttcaccacgtgactggcagcgactcatcaacaacaactggggattccggcccaagagactcagcttcaagctcttcaacatccaggtcaaggaggtcacgcagaatgaaggcaccaagaccatcgccaataacctcaccagcaccatccaggtgtttacggactcggagtaccagctgccgtacgttctcggctctgcccaccagggctgcctgcctccgttcccggcggacgtgttcatgattccccagtacggctacctaacactcaacaacggtagtcaggccgtgggacgctcctccttctactgcctggaatactttccttcgcagatgctgagaaccggcaacaacttccagtttacttacaccttcgaggacgtgcctttccacagcagctacgcccacagccagagcttggaccggctgatgaatcctctgattgaccagtacctgtactacttgtctcggactcaaacaacaggaggcacggcaaatacgcagactctgggcttcagccaaggtgggcctaatacaatggccaatcaggcaaagaactggctgccaggaccctgttaccgccaacaacgcgtctcaacgacaaccgggcaaaacaacaatagcaactttgcctggactgctgggaccaaataccatctgaatggaagaaattcattggctaatcctggcatcgctatggcaacacacaaagacgacgaggagcgtttttttcccagtaacgggatcctgatttttggcaaacaaaatgctgccagagacaatgcggattacagcgatgtcatgctcaccagcgaggaagaaatcaaaaccactaaccctgtggctacagaggaatacggtatcgtggcagataacttgcagcagcaaaacacggctcctcaaattggaactgtcaacagccagggggccttacccggtatggtctggcagaaccgggacgtgtacctgcagggtcccatctgggccaagattcctcacacggacggcaacttccacccgtctccgctgatgggcggctttggcctgaaacatcctccgcctcagatcctgatcaagaacacgcctgtacctgcggatcctccgaccaccttcaaccagtcaaagctgaactctttcatcacgcaatacagcaccggacaggtcagcgtggaaattgaatgggagctgcagaaggaaaacagcaagcgctggaaccccgagatccagtacacctccaactactacaaatctacaagtgtggactttgctgttaatacagaaggcgtgtactctgaaccccgccccattggcacccgttacctcacccgtaatctgtaattgcctgttaatcaataaaccggttgattcgtttcagttgaactttggtctctgcg

SEQ ID NO: 123 - protein, 738 aa, Adeno-associated virus 8; identical to SEQ ID NO: 114

SEQ ID NO: 124 - protein, 737 aa, Adeno-associated virus 8
MAADGYLPDWLEDNLSEGIREWWALKPGAPKPKANQQKQDDGRGLVLPGYKYLGPFNGLDKGEPVNAADAAALEHDKAYDQQLQAGDNPYLRYNHADAEFQERLQEDTSFGGNLGRAVFQAKKRVLEPLGLVEEGAKTAPGKKRPVEPSPQRSPDSSTGIGKKGQQPARKRLNFGQTGDSESVPDPQPLGEPPAAPSGVGPNTMAAGGGAPMADNNEGADGVGSSSGNWHCDSTWLGDRVITTSTRTWALPTYNNHLYKQISNGTSGGATNDNTYFGYSTPWGYFDFNRFHCHFSPRDWQRLINNNWGFRPKRLSFKLFNIQVKEVTQNEGTKTIANNLTSTIQVFTDSEYQLPYVLGSAHQGCLPPFPADVFMIPQYGYLTLNNGSQAVGRSSFYCLEYFPSQMLRTGNNFQFTYTFEDVPFHSSYAHSQSLDRLMNPLIDQYLYYLSRTQTTGGTANTQTLGFSQGGPNTMANQAKNWLPGPCYRQQRVSTTTGQNNNSNFAWTAGTKYHLNGRNSLANPGIAMATHKDDEERFFPSNGILIFGKQNAARDNADYSDVMLTSEEEIKTTNPVATEEYGIVADNLQQQNTAPQIGTVNSQGALPGMVWQNRDVYLQGPIWAKIPHTDGNFHPSPLMGGFGLKHPPPQILIKNTPVPADPPTTFNQSKLNSFITQYSTGQVSVEIEWELQKENSKRWNPEIQYTSNYYKSTSVDFAVIQKACTLNPAPLAPVTSPVI

SEQ ID NO: 125 - DNA, 2217 bp, Artificial Sequence; identical to SEQ ID NO: 120
  Description of Artificial Sequence: Synthetic polynucleotide

SEQ ID NO: 126 - DNA, 2214 bp, Artificial Sequence
  Description of Artificial Sequence: Synthetic polynucleotide
atggctgccgatggttatcttccagattggctcgaggacaacctctctgagggcattcgcgagtggtgggcgctgaaacctggagccccgaagcccaaagccaaccagcaaaagcaggacgacggccggggtctggtgcttcctggctacaagtacctcggacccttcaacggactcgacaagggggagcccgtcaacgcggcggacgcagcggccctcgagcacgacaaggcctacgaccagcagctgcaggcgggtgacaatccgtacctgcggtataaccacgccgacgccgagtttcaggagcgtctgcaagaagatacgtcttttgggggcaacctcgggcgagcagtcttccaggccaagaagcgggttctcgaacctctcggtctggttgaggaaggcgctaagacggctcctggaaagaagagaccggtagagccatcaccccagcgttctccagactcctctacgggcatcggcaagaaaggccaacagcccgccagaaaaagactcaattttggtcagactggcgactcagagtcagttccagaccctcaacctctcggagaacctccagcagcgccctctggtgtgggacctaatacaatggctgcaggcggtggcgcaccaatggcagacaataacgaaggcgccgacggagtgggtagttcctcgggaaattggcattgcgattccacatggctgggcgacagagtcatcaccaccagcacccgaacctgggccctgcccacctacaacaaccacctctacaagcaaatctccaacgggacatcgggaggagccaccaacgacaacacctacttcggctacagcaccccctgggggtattttgactttaacagattccactgccacttttcaccacgtgactggcagcgactcatcaacaacaactggggattccggcccaagagactcagcttcaagctcttcaacatccaggtcaaggaggtcacgcagaatgaaggcaccaagaccatcgccaataacctcaccagcaccatccaggtgtttacggactcggagtaccagctgccgtacgttctcggctctgcccaccagggctgcctgcctccgttcccggcggacgtgttcatgattccccagtacggctacctaacactcaacaacggtagtcaggccgtgggacgctcctccttctactgcctggaatactttccttcgcagatgctgagaaccggcaacaacttccagtttacttacaccttcgaggacgtgcctttccacagcagctacgcccacagccagagcttggaccggctgatgaatcctctgattgaccagtacctgtactacttgtctcggactcaaacaacaggaggcacggcaaatacgcagactctgggcttcagccaaggtgggcctaatacaatggccaatcaggcaaagaactggctgccaggaccctgttaccgccaacaacgcgtctcaacgacaaccgggcaaaacaacaatagcaactttgcctggactgctgggaccaaataccatctgaatggaagaaattcattggctaatcctggcatcgctatggcaacacacaaagacgacgaggagcgtttttttcccagtaacgggatcctgatttttggcaaacaaaatgctgccagagacaatgcggattacagcgatgtcatgctcaccagcgaggaagaaatcaaaaccactaaccctgtggctacagaggaatacggtatcgtggcagataacttgcctgagcggacggcgatgagtcttccgggaactgtcaacagccagggggccttacccggtatggtctggcagaaccgggacgtgtacctgcagggtcccatctgggccaagattcctcacacggacggcaacttccacccgtctccgctgatgggcggctttggcctgaaacatcctccgcctcagatcctgatcaagaacacgcctgtacctgcggatcctccgaccaccttcaaccagtcaaagctgaactctttcatcacgcaatacagcaccggacaggtcagcgtggaaattgaatgggagctgcagaaggaaaacagcaagcgctggaaccccgagatccagtacacctccaactactacaaatctacaagtgtggactttgctgttaatacagaaggcgtgtactctgaaccccgccccattggcacccgttacctcacccgtaatctg

SEQ ID NO: 127 - protein, 738 aa, Artificial Sequence
  Description of Artificial Sequence: Synthetic polypeptide
MAADGYLPDWLEDNLSEGIREWWALKPGAPKPKANQQKQDDGRGLVLPGYKYLGPFNGLDKGEPVNAADAAALEHDKAYDQQLQAGDNPYLRYNHADAEFQERLQEDTSFGGNLGRAVFQAKKRVLEPLGLVEEGAKTAPGKKRPVEPSPQRSPDSSTGIGKKGQQPARKRLNFGQTGDSESVPDPQPLGEPPAAPSGVGPNTMAAGGGAPMADNNEGADGVGSSSGNWHCDSTWLGDRVITTSTRTWALPTYNNHLYKQISNGTSGGATNDNTYFGYSTPWGYFDFNRFHCHFSPRDWQRLINNNWGFRPKRLSFKLFNIQVKEVTQNEGTKTIANNLTSTIQVFTDSEYQLPYVLGSAHQGCLPPFPADVFMIPQYGYLTLNNGSQAVGRSSFYCLEYFPSQMLRTGNNFQFTYTFEDVPFHSSYAHSQSLDRLMNPLIDQYLYYLSRTQTTGGTANTQTLGFSQGGPNTMANQAKNWLPGPCYRQQRVSTTTGQNNNSNFAWTAGTKYHLNGRNSLANPGIAMATHKDDEERFFPSNGILIFGKQNAARDNADYSDVMLTSEEEIKTTNPVATEEYGIVADNLPERTAMSLPGTVNSQGALPGMVWQNRDVYLQGPIWAKIPHTDGNFHPSPLMGGFGLKHPPPQILIKNTPVPADPPTTFNQSKLNSFITQYSTGQVSVEIEWELQKENSKRWNPEIQYTSNYYKSTSVDFAVNTEGVYSEPRPIGTRYLTRNL

SEQ ID NO: 128 - DNA, 2214 bp, Artificial Sequence
  Description of Artificial Sequence: Synthetic polynucleotide
atggctgccgatggttatcttccagattggctcgaggacaacctctctgagggcattcgcgagtggtgggcgctgaaacctggagccccgaagcccaaagccaaccagcaaaagcaggacgacggccggggtctggtgcttcctggctacaagtacctcggacccttcaacggactcgacaagggggagcccgtcaacgcggcggacgcagcggccctcgagcacgacaaggcctacgaccagcagctgcaggcgggtgacaatccgtacctgcggtataaccacgccgacgccgagtttcaggagcgtctgcaagaagatacgtcttttgggggcaacctcgggcgagcagtcttccaggccaagaagcgggttctcgaacctctcggtctggttgaggaaggcgctaagacggctcctggaaagaagagaccggtagagccatcaccccagcgttctccagactcctctacgggcatcggcaagaaaggccaacagcccgccagaaaaagactcaattttggtcagactggcgactcagagtcagttccagaccctcaacctctcggagaacctccagcagcgccctctggtgtgggacctaatacaatggctgcaggcggtggcgcaccaatggcagacaataacgaaggcgccgacggagtgggtagttcctcgggaaattggcattgcgattccacatggctgggcgacagagtcatcaccaccagcacccgaacctgggccctgcccacctacaacaaccacctctacaagcaaatctccaacgggacatcgggaggagccaccaacgacaacacctacttcggctacagcaccccctgggggtattttgactttaacagattccactgccacttttcaccacgtgactggcagcgactcatcaacaacaactggggattccggcccaagagactcagcttcaagctcttcaacatccaggtcaaggaggtcacgcagaatgaaggcaccaagaccatcgccaataacctcaccagcaccatccaggtgtttacggactcggagtaccagctgccgtacgttctcggctctgcccaccagggctgcctgcctccgttcccggcggacgtgttcatgattccccagtacggctacctaacactcaacaacggtagtcaggccgtgggacgctcctccttctactgcctggaatactttccttcgcagatgctgagaaccggcaacaacttccagtttacttacaccttcgaggacgtgcctttccacagcagctacgcccacagccagagcttggaccggctgatgaatcctctgattgaccagtacctgtactacttgtctcggactcaaacaacaggaggcacggcaaatacgcagactctgggcttcagccaaggtgggcctaatacaatggccaatcaggcaaagaactggctgccaggaccctgttaccgccaacaacgcgtctcaacgacaaccgggcaaaacaacaatagcaactttgcctggactgctgggaccaaataccatctgaatggaagaaattcattggctaatcctggcatcgctatggcaacacacaaagacgacgaggagcgtttttttcccagtaacgggatcctgatttttggcaaacaaaatgctgccagagacaatgcggattacagcgatgtcatgctcaccagcgaggaagaaatcaaaaccactaaccctgtggctacagaggaatacggtatcgtggcagataacttgagttttagtcgtgcggttctttgtgatggaactgtcaacagccagggggccttacccggtatggtctggcagaaccgggacgtgtacctgcagggtcccatctgggccaagattcctcacacggacggcaacttccacccgtctccgctgatgggcggctttggcctgaaacatcctccgcctcagatcctgatcaagaacacgcctgtacctgcggatcctccgaccaccttcaaccagtcaaagctgaactctttcatcacgcaatacagcaccggacaggtcagcgtggaaattgaatgggagctgcagaaggaaaacagcaagcgctggaaccccgagatccagtacacctccaactactacaaatctacaagtgtggactttgctgttaatacagaaggcgtgtactctgaaccccgccccattggcacccgttacctcacccgtaatctg

SEQ ID NO: 129 - protein, 738 aa, Artificial Sequence
  Description of Artificial Sequence: Synthetic polypeptide
MAADGYLPDWLEDNLSEGIREWWALKPGAPKPKANQQKQDDGRGLVLPGYKYLGPFNGLDKGEPVNAADAAALEHDKAYDQQLQAGDNPYLRYNHADAEFQERLQEDTSFGGNLGRAVFQAKKRVLEPLGLVEEGAKTAPGKKRPVEPSPQRSPDSSTGIGKKGQQPARKRLNFGQTGDSESVPDPQPLGEPPAAPSGVGPNTMAAGGGAPMADNNEGADGVGSSSGNWHCDSTWLGDRVITTSTRTWALPTYNNHLYKQISNGTSGGATNDNTYFGYSTPWGYFDFNRFHCHFSPRDWQRLINNNWGFRPKRLSFKLFNIQVKEVTQNEGTKTIANNLTSTIQVFTDSEYQLPYVLGSAHQGCLPPFPADVFMIPQYGYLTLNNGSQAVGRSSFYCLEYFPSQMLRTGNNFQFTYTFEDVPFHSSYAHSQSLDRLMNPLIDQYLYYLSRTQTTGGTANTQTLGFSQGGPNTMANQAKNWLPGPCYRQQRVSTTTGQNNNSNFAWTAGTKYHLNGRNSLANPGIAMATHKDDEERFFPSNGILIFGKQNAARDNADYSDVMLTSEEEIKTTNPVATEEYGIVADNLSFSRAVLCDGTVNSQGALPGMVWQNRDVYLQGPIWAKIPHTDGNFHPSPLMGGFGLKHPPPQILIKNTPVPADPPTTFNQSKLNSFITQYSTGQVSVEIEWELQKENSKRWNPEIQYTSNYYKSTSVDFAVNTEGVYSEPRPIGTRYLTRNL

SEQ ID NO: 130 - DNA, 4385 bp, Adeno-associated virus 9
cagagagggagtggccaactccatcactaggggtaatcgcgaagcgcctcccacgctgccgcgtcagcgctgacgtagattacgtcataggggagtggtcctgtattagctgtcacgtgagtgcttttgcgacattttgcgacaccacatggccatttgaggtatatatggccgagtgagcgagcaggatctccattttgaccgcgaaatttgaacgagcagcagccatgccgggcttctacgagattgtgatcaaggtgccgagcgacctggacgagcacctgccgggcatttctgactcttttgtgaactgggtggccgagaaggaatgggagctgcccccggattctgacatggatcggaatctgatcgagcaggcacccctgaccgtggccgagaagctgcagcgcgacttcctggtccaatggcgccgcgtgagtaaggccccggaggccctcttctttgttcagttcgagaagggcgagagctactttcacctgcacgttctggtcgagaccacgggggtcaagtccatggtgctaggccgcttcctgagtcagattcgggagaagctggtccagaccatctaccgcgggatcgagccgaccctgcccaactggttcgcggtgaccaagacgcgtaatggcgccggcggggggaacaaggtggtggacgagtgctacatccccaactacctcctgcccaagactcagcccgagctgcagtgggcgtggactaacatggaggagtatataagcgcgtgcttgaacctggccgagcgcaaacggctcgtggcgcagcacctgacccacgtcagccagacgcaggagcagaacaaggagaatctgaaccccaattctgacgcgcccgtgatcaggtcaaaaacctccgcgcgctacatggagctggtcgggtggctggtggaccggggcatcacctccgagaagcagtggatccaggaggaccaggcctcgtacatctccttcaacgccgcctccaactcgcggtcccagatcaaggccgcgctggacaatgccggcaagatcatggcgctgaccaaatccgcgcccgactacctggtaggcccttcacttccggtggacattacgcagaaccgcatctaccgcatcctgcagctcaacggctacgaccctgcctacgccggctccgtctttctcggctgggcacaaaagaagttcgggaaacgcaacaccatctggctgtttgggccggccaccacgggaaagaccaacatcgcagaagccattgcccacgccgtgcccttctacggctgcgtcaactggaccaatgagaactttcccttcaacgattgcgtcgacaagatggtgatctggtgggaggagggcaagatgacggccaaggtcgtggagtccgccaaggccattctcggcggcagcaaggtgcgcgtggaccaaaagtgcaagtcgtccgcccagatcgaccccactcccgtgatcgtcacctccaacaccaacatgtgcgccgtgattgacgggaacagcaccaccttcgagcaccagcagcctctccaggaccggatgtttaagttcgaactcacccgccgtctggagcacgactttggcaaggtgacaaagcaggaagtcaaagagttcttccgctgggccagtgatcacgtgaccgaggtggcgcatgagttttacgtcagaaagggcggagccagcaaaagacccgcccccgatgacgcggataaaagcgagcccaagcgggcctgcccctcagtcgcggatccatcgacgtcagacgcggaaggagctccggtggactttgccgacaggtaccaaaacaaatgttctcgtcacgcgggcatgcttcagatgctgcttccctgcaaaacgtgcgagagaatgaatcagaatttcaacatttgcttcacacacggggtcagagactgctcagagtgtttccccggcgtgtcagaatctcaaccggtcgtcagaaagaggacgtatcggaaactctgtgcgattcatcatctgctggggcgggctcccgagattgcttgctcggcctgcgatctggtcaacgtggacctggatgactgtgtttctgagcaataaatgacttaaaccaggtatggctgccgatggttatcttccagattggctcgaggacaacctctctgagggcattcgcgagtggtgggcgctgaaacctggagccccgaagcccaaagccaaccagcaaaagcaggacgacggccggggtctggtgcttcctggctacaagtacctcggacccttcaacggactcgacaagggggagcccgtcaacgcggcggacgcagcggccctcgagcacggcaaggcctacgaccagcagctgcaggcgggtgacaatccgtacctgcggtataaccacgccgacgccgagtttcaggagcgtctgcaagaagatacgtcttttgggggcaacctcgggcgagcagtcttccaggccaagaagcgggttctcgaacctctcggtctggttgaggaaggcgctaagacggctcctggaaagaagagaccggtagagccatcaccccagcgttctccagactcctctacgggcatcggcaagaaaggccaacagcccgccagaaaaagactcaattttggtcagactggcgactcagagtcagttccagaccctcaacctctcggagaacctccagcagcgccctctggtgtgggacctaatacaatggctgcaggcggtggcgcaccaatggcagacaataacgaaggcgccgacggagtgggtaattcctcgggaaattggcattgcgattccacatggctgggggacagagtcatcaccaccagcacccgaacctgggcattgcccacctacaacaaccacctctacaagcaaatctccaatggaacatcgggaggaagcaccaacgacaacacctactttggctacagcaccccctgggggtattttgacttcaacagattccactgccacttctcaccacgtgactggcagcgactcatcaacaacaactggggattccggccaaagagactcaacttcaagctgttcaacatccaggtcaaggaggttacgacgaacgaaggcaccaagaccatcgccaataaccttaccagcaccgtccaggtctttacggactcggagtaccagctaccgtacgtcctaggctctgcccaccaaggatgcctgccaccgtttcctgcagacgtcttcatggttcctcagtacggctacctgacgctcaacaatggaagtcaagcgttaggacgttcttctttctactgtctggaatacttcccttctcagatgctgagaaccggcaacaactttcagttcagctacactttcgaggacgtgcctttccacagcagctacgcacacagccagagtctagatcgactgatgaaccccctcatcgaccagtacctatactacctggtcagaacacagacaactggaactgggggaactcaaactttggcattcagccaagcaggccctagctcaatggccaatcaggctagaaactgggtacccgggccttgctaccgtcagcagcgcgtctccacaaccaccaaccaaaataacaacagcaactttgcgtggacgggagctgctaaattcaagctgaacgggagagactcgctaatgaatcctggcgtggctatggcatcgcacaaagacgacgaggaccgcttctttccatcaagtggcgttctcatatttggcaagcaaggagccgggaacgatggagtcgactacagccaggtgctgattacagatgaggaagaaattaaagccaccaaccctgtagccacagaggaatacggagcagtggccatcaacaaccaggccgctaacacgcaggcgcaaactggacttgtgcataaccagggagttattcctggtatggtctggcagaaccgggacgtgtacctgcagggccctatttgggctaaaatacctcacacagatggcaactttcacccgtctcctctgatgggtggatttggactgaaacacccacctccacagattctaattaaaaatacaccagtgccggcagatcctcctcttaccttcaatcaagccaagctgaactctttcatcacgcagtacagcacgggacaagtcagcgtggaaatcgagtgggagctgcagaaagaaaacagcaagcgctggaatccagagatccagtatacttcaaactactacaaatctacaaatgtggactttgctgtcaataccaaaggtgtttactctgagcctcgccccattggtactcgttacctcacccgtaatttgtaattgcctgttaatcaataaaccggttaattcgtttcagttgaactttggtctctgcg

SEQ ID NO: 131 - DNA, 4382 bp, Adeno-associated virus 9
cagagagggagtggccaactccatcactaggggtaatcgcgaagcgcctcccacgctgccgcgtcagcgctgacgtagattacgtcataggggagtggtcctgtattagctgtcacgtgagtgcttttgcgacattttgcgacaccacatggccatttgaggtatatatggccgagtgagcgagcaggatctccattttgaccgcgaaatttgaacgagcagcagccatgccgggcttctacgagattgtgatcaaggtgccgagcgacctggacgagcacctgccgggcatttctgactcttttgtgaactgggtggccgagaaggaatgggagctgcccccggattctgacatggatcggaatctgatcgagcaggcacccctgaccgtggccgagaagctgtagcgcgacttcctggtccaatggcgccgcgtgagtaaggccccggaggccctcttctttgttcagttcgagaagggcgagagctactttcacctgcacgttctggtcgagaccacgggggtcaagtccatggtgctaggccgcttcctgagtcagattcgggagaagctggtccagaccatctaccgcgggatcgagccgaccctgcccaactggttcgcggtgaccaagacgcgtaatggcgccggcggggggaacaaggtggtggacgagtgctacatccccaactacctcctgcccaagactcagcccgagctgcagtgggcgtggactaacatggaggagtatataagcgcgtgcttgaacctggccgagcgcaaacggctcgtggcgcagcacctgacccacgtcagccagacgcaggagcagaacaaggagaatctgaaccccaattctgacgcgcccgtgatcaggtcaaaaacctccgcgcgctacatggagctggtcgggtggctggtggaccggggcatcacctccgagaagcagtggatccaggaggaccaggcctcgtacatctccttcaacgccgcctccaactcgcggtcccagatcaaggccgcgctggacaatgccggcaagatcatggcgctgaccaaatccgcgcccgactacctggtaggcccttcacttccggtggacattacgcagaaccgcatctaccgcatcctgcagctcaacggctacgaccctgcctacgccggctccgtctttctcggctgggcacaaaagaagttcgggaaacgcaacaccatctggctgtttgggccggccaccacgggaaagaccaacatcgcagaagccattgcccacgccgtgcccttctacggctgcgtcaactggaccaatgagaactttcccttcaacgattgcgtcgacaagatggtgatctggtgggaggagggcaagatgacggccaaggtcgtggagtccgccaaggccattctcggcggcagcaaggtgcgcgtggaccaaaagtgcaagtcgtccgcccagatcgaccccactcccgtgatcgtcacctccaacaccaacatgtgcgccgtgattgacgggaacagcaccaccttcgagcaccagcagcctctccaggaccggatgtttaagttcgaactcacccgccgtctggagcacgactttggcaaggtgacaaagcaggaagtcaaagagttcttccgctgggccagtgatcacgtgaccgaggtggcgcatgagttttacgtcagaaagggcggagccagcaaaagacccgcccccgatgacgcggataaaagcgagcccaagcgggcctgcccctcagtcgcggatccatcgacgtcagacgcggaaggagctccggtggactttgccgacaggtaccaaaacaaatgttctcgtcacgcgggcatgcttcagatgctgcttccctgcaaaacgtgcgagagaatgaatcagaatttcaacatttgcttcacacacggggtcagagactgctcagagtgtttccccggcgtgtcagaatctcaaccggtcgtcagaaagaggacgtatcggaaactctgtgcgattcatcatctgctggggcgggctcccgagattgcttgctcggcctgcgatctggtcaacgtggacctggatgactgtgtttctgagcaataaatgacttaaaccaggtatggctgccgatggttatcttccagattggctcgaggacaacctctctgagggcattcgcgagtggtgggacctgaaacctggagccccgaaacccaaagccaaccagcaaaagcaggacgacggccggggtctggtgcttcctggctacaagtacctcggacccttcaacggactcgacaagggggagcccgtcaacgcggcggacgcagcggccctcgagcacgacaaggcctacgaccagcagctcaaagcgggtgacaatccgtacctgcggtataaccacgccgacgccgagtttcaggagcgtctgcaagaagatacgtcttttgggggcaacctcgggcgagcagtcttccaggccaagaagcgggttctcgaacctctcggtctggttgaggaaggcgctaagacggctcctggaaagaagagaccggtagagcagtcaccccaagaaccagactcatcctcgggcatcggcaaatcaggccagcagcccgctaaaaagagactcaattttggtcagactggcgactcagagtcagtccccgacccacaacctctcggagaacctccagaagccccctcaggtctgggacctaatacaatggcttcaggcggtggcgctccaatggcagacaataacgaaggcgccgacggagtgggtaattcctcgggaaattggcattgcgattccacatggctgggggacagagtcatcaccaccagcacccgaacctgggcattgcccacctacaacaaccacctctacaagcaaatctccaatggaacatcgggaggaagcaccaacgacaacacctactttggctacagcaccccctgggggtattttgacttcaacagattccactgccacttctcaccacgtgactggcagcgactcatcaacaacaactggggattccggccaaagagactcaacttcaagctgttcaacatccaggtcaaggaggttacgacgaacgaaggcaccaagaccatcgccaataaccttaccagcaccgtccaggtctttacggactcggagtaccagctaccgtacgtcctaggctctgcccaccaaggatgcctgccaccgtttcctgcagacgtcttcatggttcctcagtacggctacctgacgctcaacaatggaagtcaagcgttaggacgttcttctttctactgtctggaatacttcccttctcagatgctgagaaccggcaacaactttcagttcagctacactttcgaggacgtgcctttccacagcagctacgcacacagccagagtctagatcgactgatgaaccccctcatcgaccagtacctatactacctggtcagaacacagacaactggaactgggggaactcaaactttggcattcagccaagcaggccctagctcaatggccaatcaggctagaaactgggtacccgggccttgctaccgtcagcagcgcgtctccacaaccaccaaccaaaataacaacagcaactttgcgtggacgggagctgctaaattcaagctgaacgggagagactcgctaatgaatcctggcgtggctatggcatcgcacaaagacgacgaggaccgcttctttccatcaagtggcgttctcatatttggcaagcaaggagccgggaacgatggagtcgactacagccaggtgctgattacagatgaggaagaaattaaagccaccaaccctgtagccacagaggaatacggagcagtggccatcaacaaccaggccgctaacacgcaggcgcaaactggacttgtgcataaccagggagttattcctggtatggtctggcagaaccgggacgtgtacctgcagggccctatttgggctaaaatacctcacacagatggcaactttcacccgtctcctctgatgggtggatttggactgaaacacccacctccacagattctaattaaaaatacaccagtgccggcagatcctcctcttaccttcaatcaagccaagctgaactctttcatcacgcagtacagcacgggacaagtcagcgtggaaatcgagtgggagctgcagaaagaaaacagcaagcgctggaatccagagatccagtatacttcaaactactacaaatctacaaatgtggactttgctgtcaataccgaaggtgtttactctgagcctcgccccattggtactcgttacctcacccgtaatttgtaattgcctgttaatcaataaaccggttaattcgtttcagttgaactttggtctctgcg

SEQ ID NO: 132 - protein, 736 aa, Adeno-associated virus 9
MAADGYLPDWLEDNLSEGIREWWALKPGAPQPKANQQHQDNARGLVLPGYKYLGPGNGLDKGEPVNAADAAALEHDKAYDQQLKAGDNPYLKYNHADAEFQERLKEDTSFGGNLGRAVFQAKKRLLEPLGLVEEAAKTAPGKKRPVEQSPQEPDSSAGIGKSGAQPAKKRLNFGQTGDTESVPDPQPIGEPPAAPSGVGSLTMASGGGAPVADNNEGADGVGSSSGNWHCDSQWLGDRVITTSTRTWALPTYNNHLYKQISNSTSGGSSNDNAYFGYSTPWGYFDFNRFHCHFSPRDWQRLINNNWGFRPKRLNFKLFNIQVKEVTDNNGVKTIANNLTSTVQVFTDSDYQLPYVLGSAHEGCLPPFPADVFMIPQYGYLTLNDGSQAVGRSSFYCLEYFPSQMLRTGNNFQFSYEFENVPFHSSYAHSQSLDRLMNPLIDQYLYYLSKTINGSGQNQQTLKFSVAGPSNMAVQGRNYIPGPSYRQQRVSTTVTQNNNSEFAWPGASSWALNGRNSLMNPGPAMASHKEGEDRFFPLSGSLIFGKQGTGRDNVDADKVMITNEEEIKTTNPVATESYGQVATNHQSAQAQAQTGWVQNQGILPGMVWQDRDVYLQGPIWAKIPHTDGNFHPSPLMGGFGMKHPPPQILIKNTPVPADPPTAFNKDKLNSFITQYSTGQVSVEIEWELQKENSKRWNPEIQYTSNYYKSNNVEFAVNTEGVYSEPRPIGTRYLTRNL

SEQ ID NO: 133 - protein, 736 aa, Adeno-associated virus 9
MAADGYLPDWLEDNLSEGIREWWDLKPGAPKPKANQQKQDDGRGLVLPGYKYLGPFNGLDKGEPVNAADAAALEHDKAYDQQLKAGDNPYLRYNHADAEFQERLQEDTSFGGNLGRAVFQAKKRVLEPLGLVEEGAKTAPGKKRPVEQSPQEPDSSSGIGKSGQQPAKKRLNFGQTGDSESVPDPQPLGEPPEAPSGLGPNTMASGGGAPMADNNEGADGVGNSSGNWHCDSTWLGDRVITTSTRTWALPTYNNHLYKQISNGTSGGSTNDNTYFGYSTPWGYFDFNRFHCHFSPRDWQRLINNNWGFRPKRLNFKLFNIQVKEVTTNEGTKTIANNLTSTVQVFTDSEYQLPYVLGSAHQGCLPPFPADVFMVPQYGYLTLNNGSQALGRSSFYCLEYFPSQMLRTGNNFQFSYTFEDVPFHSSYAHSQSLDRLMNPLIDQYLYYLVRTQTTGTGGTQTLAFSQAGPSSMANQARNWVPGPCYRQQRVSTTTNQNNNSNFAWTGAAKFKLNGRDSLMNPGVAMASHKDDEDRFFPSSGVLIFGKQGAGNDGVDYSQVLITDEEEIKATNPVATEEYGAVAINNQAANTQAQTGLVHNQGVIPGMVWQNRDVYLQGPIWAKIPHTDGNFHPSPLMGGFGLKHPPPQILIKNTPVPADPPLTFNQAKLNSFITQYSTGQVSVEIEWELQKENSKRWNPEIQYTSNYYKSTNVDFAVNTEGVYSEPRPIGTRYLTRNL

SEQ ID NO: 134 - protein, 623 aa, Adeno-associated virus 9
MPGFYEIVIKVPSDLDEHLPGISDSFVNWVAEKEWELPPDSDMDRNLIEQAPLTVAEKLQRDFLVQWRRVSKAPEALFFVQFEKGESYFHLHVLVETTGVKSMVLGRFLSQIREKLVQTIYRGIEPTLPNWFAVTKTRNGAGGGNKVVDECYIPNYLLPKTQPELQWAWTNMEEYISACLNLAERKRLVAQHLTHVSQTQEQNKENLNPNSDAPVIRSKTSARYMELVGWLVDRGITSEKQWIQEDQASYISFNAASNSRSQIKAALDNAGKIMALTKSAPDYLVGPSLPVDITQNRIYRILQLNGYDPAYAGSVFLGWAQKKFGKRNTIWLFGPATTGKTNIAEAIAHAVPFYGCVNWTNENFPFNDCVDKMVIWWEEGKMTAKVVESAKAILGGSKVRVDQKCKSSAQIDPTPVIVTSNTNMCAVIDGNSTTFEHQQPLQDRMFKFELTRRLEHDFGKVTKQEVKEFFRWASDHVTEVAHEFYVRKGGASKRPAPDDADKSEPKRACPSVADPSTSDAEGAPVDFADRYQNKCSRHAGMLQMLLPCKTCERMNQNFNICFTHGVRDCSECFPGVSESQPVVRKRTYRKLCAIHHLLGRAPEIACSACDLVNVDLDDCVSEQ

SEQ ID NO: 135 - DNA, 2211 bp, Artificial Sequence
  Description of Artificial Sequence: Synthetic polynucleotide
atggctgccgatggttatcttccagattggctcgaggacaaccttagtgaaggaattcgcgagtggtgggctttgaaacctggagcccctcaacccaaggcaaatcaacaacatcaagacaacgctcgaggtcttgtgcttccgggttacaaataccttggacccggcaacggactcgacaagggggagccggtcaacgcagcagacgcggcggccctcgagcacgacaaggcctacgaccagcagctcaaggccggagacaacccgtacctcaagtacaaccacgccgacgccgagttccaggagcggctcaaagaagatacgtcttttgggggcaacctcgggcgagcagtcttccaggccaaaaagaggcttcttgaacctcttggtctggttgaggaagcggctaagacggctcctggaaagaagaggcctgtagagcagtctcctcaggaaccggactcctccgcgggtattggcaaatcgggtgcacagcccgctaaaaagagactcaatttcggtcagactggcgacacagagtcagtcccagaccctcaaccaatcggagaacctcccgcagccccctcaggtgtgggatctcttacaatggcttcaggtggtggcgcaccagtggcagacaataacgaaggtgccgatggagtgggtagttcctcgggaaattggcattgcgattcccaatggctgggggacagagtcatcaccaccagcacccgaacctgggccctgcccacctacaacaatcacctctacaagcaaatctccaacagcacatctggaggatcttcaaatgacaacgcctacttcggctacagcaccccctgggggtattttgacttcaacagattccactgccacttctcaccacgtgactggcagcgactcatcaacaacaactggggattccggcctaagcgactcaacttcaagctcttcaacattcaggtcaaagaggttacggacaacaatggagtcaagaccatcgccaataaccttaccagcacggtccaggtcttcacggactcagactatcagctcccgtacgtgctcgggtcggctcacgagggctgcctcccgccgttcccagcggacgttttcatgattcctcagtacgggtatctgacgcttaatgatggaagccaggccgtgggtcgttcgtccttttactgcctggaatatttcccgtcgcaaatgctaagaacgggtaacaacttccagttcagctacgagtttgagaacgtacctttccatagcagctacgctcacagccaaagcctggaccgactaatgaatccactcatcgaccaatacttgtactatctctcaaagactattaacggttctggacagaatcaacaaacgctaaaattcagtgtggccggacccagcaacatggctgtccagggaagaaactacatacctggacccagctaccgacaacaacgtgtctcaaccactgtgactcaaaacaacaacagcgaatttgcttggcctggagcttcttcttgggctctcaatggacgtaatagcttgatgaatcctggacctgctatggccagccacaaagaaggagaggaccgtttctttcctttgtctggatctttaatttttggcaaacaaggaactggaagagacaacgtggatgcggacaaagtcatgataaccaacgaagaagaaattaaaactactaacccggtagcaacggagtcctatggacaagtggccacaaaccaccagagtgcccaagcacaggcgcagaccggctgggttcaaaaccaaggaatacttccgggtatggtttggcaggacagagatgtgtacctgcaaggacccatttgggccaaaattcctcacacggacggcaactttcacccttctccgctgatgggagggtttggaatgaagcacccgcctcctcagatcctcatcaaaaacacacctgtacctgcggatcctccaacggccttcaacaaggacaagctgaactctttcatcacccagtattctactggccaagtcagcgtggagatcgagtgggagctgcagaaggaaaacagcaagcgctggaacccggagatccagtacacttccaactattacaagtctaataatgttgaatttgctgttaatactgaaggtgtatatagtgaaccccgccccattggcaccagatacctgactcgtaatctgtaa

SEQ ID NO: 136 - protein, 736 aa, Artificial Sequence; identical to SEQ ID NO: 132
  Description of Artificial Sequence: Synthetic polypeptide

SEQ ID NO: 137 - DNA, 2460 bp, Artificial Sequence
  Description of Artificial Sequence: Synthetic polynucleotide
ggtaattcctccggaaattggcattgcgattccacatggctgggcgaccgagtcattaccaccagcacccggacttgggccctgcccacctacaacaaccacctctacaagcaaatctccagccaatcgggtgccaccaacgacaaccactacttcggctacagcaccccttgggggtattttgatttcaacagattccactgccatttctcaccacgtgactggcagcgactcatcaacaacaactggggattcatggctgccgatggttatcttccagattggctcgaggacactctctctgaaggaatcagacagtggtggaagctcaaacctggcccaccaccgccgaaacctaaccaacaacaccgggacgacagtaggggtcttgtgcttcctgggtacaagtacctcggacccttcaacggactcgacaaaggagagccggtcaacgaggcagacgccgcggccctcgagcacgacaaagcctacgaccaccagctcaagcaaggggacaacccgtacctcaaatacaaccacgcggacgctgaatttcaggagcgtcttcaagaagatacgtctttcgggggcaacctcgggcgagcagtcttccaggccaaaaagagggtactcgagcctcttggtctggttgaggaagctgttaagacggctcctggaaaaaagagacctatagagcagtctcctgcagaaccggactcttcctcgggcatcggcaaatcaggccagcagcccgctaagaaaagactcaattttggtcagactggcgacacagagtcagtcccagaccctcaaccaatcggagaaccccccgcagccccctctggtgtgggatctaatacaatggcttcaggcggtggggcaccaatggcagacaataacgaaggcgccgacggagtgggtaattcctcgggaaattggcattgcgattccacatggatgggcgacagagttatcaccaccagcacaagaacctgggccctccccacctacaataatcacctctacaagcaaatctccagcgaatcgggagccaccaacgacaaccactacttcggctacagcaccccctgggggtattttgactttaacagattccactgtcacttctcaccacgtgactggcagcgactcatcaacaacaactggggatttagacccaagaaactcaatttcaagctcttcaacatccaagtcaaggaggtcacgcagaatgatggaaccacgaccatcgccaataaccttaccagcacggtgcaggtcttcacagactctgagtaccagctgccctacgtcctcggttcggctcaccagggctgccttccgccgttcccagcagacgtcttcatgattcctcagtacggctacttgactctgaacaatggcagccaagcggtaggacgttcttcattctactgtctagagtattttccctctcagatgctgaggacgggaaacaacttcaccttcagctacacttttgaagacgtgcctttccacagcagctacgcgcacagccagagtctggatcggctgatgaatcctctcattgaccagtacctgtattacctgagcaaaactcagggtacaagtggaacaacgcagcaatcgagactgcagttcagccaagctgggcctagctccatggctcagcaggccaaaaactggctaccgggacccagctaccgacagcagcgaatgtctaagacggctaatgacaacaacaacagtgaatttgcttggactgcagccaccaaatattacctgaatggaagaaattctctggtcaatcccgggcccccaatggccagtcacaaggacgatgaggaaaagtatttccccatgcacggaaatctcatctttggaaaacaaggcacaggaactaccaatgtggacattgaatcagtgcttattacagacgaagaagaaatcagaacaactaatcctgtggctacagaacaatacggacaggttgccaccaaccatcagagtcagaacaccacagcttcctatggaagtgtggacagccagggaatcttacctggaatggtgtggcaggaccgcgatgtctatcttcaaggtcccatttgggccaaaactcctcacacggacggacactttcatccttctccgctcatgggaggctttggactgaaacaccctcctccccagatcctgatcaaaaacacacctgtgccagcgaatcccgcgaccactttcactcctggaaagtttgcttcgttcattacccagtattccaccggacaggtcagcgtggaaatagagtgggagctgcagaaagaaaacagcaaacgctggaacccagaaattcagtacacctccaactacaacaagtcggtgaatgtggagtttaccgtggacgcaaacggtgtttattctgaaccccgccctattggcactcgttaccttacccggaacttg

SEQ ID NO: 138 - DNA, 3123 bp, Artificial Sequence
  Description of Artificial Sequence: Synthetic polynucleotide
gaattcgccctttctacggctgcgtcaactggaccaatgaaaactttcccttcaacgattgcgtcgacaagatggtgatctggtgggaggagggaaagatgaccgccaaggtcgtggaatctgccaaagccattctgggtggaggcaaggttcgtgtggaccagaaatgcaagtcttcggcccagatcgacccgactccggtgattgtcacctctaacaccaacatgtgcgccgtgattgacggaaactcgaccaccttcgagcaccagcagccgttgcaagaccggatgttcaaatttgaacttacccgccgtttggatcatgactttgggaaggtcaccaagcaggaagtcaaagactttttccggtgggctcaagatcacgtgactgaggtggagcatgagttctacgtcaaaaagggtggagccaagaaaaggcccgcccccgatgatgtatatataaatgagcccaagcgggcgcgcgagtcagttgcgcagccatcgacgtcagacgcggaagcttcgataaactacgcggacaggtaccaaaacaaatgttctcgtcacgtgggcatgaatctgatgctgtttccctgtcgacaatgcgaaagaatgaatcagaattcaaatatctgcttcacacacgggcaaaaagactgtttggaatgctttcccgtgtcagaatctcaacccgtttctgtcgtcagaaaaacgtatcagaaactttgttacattcatcatatcatgggaaaagtaccagacgcctgcactgcctgcgacctggtaaatgtggacttggatgactgtatttctgagcaataaatgacttaaatcaggtatggctgctgacggttatcttccagattggctcgaggacactctctctgaaggaatcagacagtggtggaagctcaaacctggcccaccaccgccgaaacctaaccaacaacaccgggacgacagtaggggtcttgtgcttcctgggtacaagtacctcggacccttcaacggactcgacaaaggagagccggtcaacgaggcagacgccgcggccctcgagcacgacaaagcctacgaccaccagctcaagcaaggggacaacccgtacctcaaatacaaccacgcggacgctgaatttcaggagcgtcttcaagaagatacgtctttcgggggcaacctcgggcgagcagtcttccaggccaaaaagagggtactcgagcctcttggtctggttgaggaagctgttaagacggctcctggaaaaaagagacctatagagcagtctcctgcagaaccggactcttcctcgggcatcggcaaatcaggccagcagcccgctaagaaaagactcaattttggtcagactggcgacacagagtcagtcccaggccctcaaccaatcggagaaccccccgcagccccctctggtgtgggatctaatacaatggcttcaggcggtggggcaccaatggcagacaataacgaaggcgccgacggagtgggtaattcctcgggaaattggcattgcgattccacatggatgggcgacagagttatcaccaccagcacaagaacctgggccctccccacctacaataatcacctctacaagcaaatctccagcgaatcgggagccaccaacgacaaccactacttcggctacagcaccccctgggggtattttgactttaacagattccactgtcacttctcaccacgtgactggcagcgactcatcaacaacaactggggatttagacccaagaaactcaatttcaagctcttcaacatccaagtcaaggaggtcacgcagaatgatggaaccacgaccatcgccaataaccttaccagcgcggtgcaggtcttcacagactctgagtaccagctgccctacgtcctcggttcggctcaccagggctgccttccgccgttcccagcagacgtcttcatgattcctcagtacggctacttgactctgaacaatggcagccaagcggtaggacgttcttcattctactgtctagagtattttccctctcagatgctgaggacgggaaacaacttcaccttcagctacacttttgaagacgtgcctttccacagcagctacgcgcacagccagagtctggatcggctgatgaatcctctcattgaccagtacctgtattacctgagcaaaactcagggtacaagtggaacaacgcagcaatcgagactgcagttcagccaagctgggcctagctccatggctcagcaggccaaaaactggctaccgggacccagctaccgacagcagcgaatgtctaagacggctaatgacaacaacaacagtgaatttgcttggactgcagccaccaaatattacctgaatggaagaaattctctggtcaatcccgggcccccagtggccagtcacaaggacgatgaggaaaagtatttccccatgcacggaaatctcatctttggaaaacaaggcacaggaactaccaatgtggacattgaatcagtgcttattacagacgaagaagaaatcagaacaactaatcctgtggctacagaacaatacggacaggttgccaccaaccatcagagtcagaacaccacagcttcctatggaagtgtggacagccagggaatcttacctggaatggtgtggcaggaccgcgatgtctatcttcaaggtcccatttgggccaaaactcctcacacggacggacactttcatccttctccgctcatgggaggctttggactgaaacaccctcctccccagatcctgatcaaaaacacacctgtgccagcgaatcccgcgaccactttcactcctggaaagtttgcttcgttcattacccagtattccacctgacaggtcagcgtggaaatagagtgggagctgcagaaagaaaacagcaaacgctggaacccagaaattcagtacacctccaactacaacaagtcggtgaatgtggagtttaccgtggacgcaaacggtgtttattctgaaccccgccctattggcactcgttaccttacccggaacttgtaatttcctgttaatgaataagccgatttatgcgtttcagttgaactttggtctctgcgaagggcgaattcgtttaaacct

SEQ ID NO: 139 - protein, 735 aa, Artificial Sequence
  Description of Artificial Sequence: Synthetic polypeptide
MAADGYLPDWLEDTLSEGIRQWWKLKPGPPPPKPNQQHRDDSRGLVLPGYKYLGPFNGLDKGEPVNEADAAALEHDKAYDHQLKQGDNPYLKYNHADAEFQERLQEDTSFGGNLGRAVFQAKKRVLEPLGLVEEAVKTAPGKKRPIEQSPAEPDSSSGIGKSGQQPAKKRLNFGQTGDTESVPGPQPIGEPPAAPSGVGSNTMASGGGAPMADNNEGADGVGNSSGNWHCDSTWMGDRVITTSTRTWALPTYNNHLYKQISSESGATNDNHYFGYSTPWGYFDFNRFHCHFSPRDWQRLINNNWGFRPKKLNFKLFNIQVKEVTQNDGTTTIANNLTSAVQVFTDSEYQLPYVLGSAHQGCLPPFPADVFMIPQYGYLTLNNGSQAVGRSSFYCLEYFPSQMLRTGNNFTFSYTFEDVPFHSSYAHSQSLDRLMNPLIDQYLYYLSKTQGTSGTTQQSRLQFSQAGPSSMAQQAKNWLPGPSYRQQRMSKTANDNNNSEFAWTAATKYYLNGRNSLVNPGPPVASHKDDEEKYFPMHGNLIFGKQGTGTTNVDIESVLITDEEEIRTTNPVATEQYGQVATNHQSQNTTASYGSVDSQGILPGMVWQDRDVYLQGPIWAKTPHTDGHFHPSPLMGGFGLKHPPPQILIKNTPVPANPATTFTPGKFASFITQYSTGQVSVEIEWELQKENSKRWNPEIQYTSNYNKSVNVEFTVDANGVYSEPRPIGTRYLTRNL

SEQ ID NO: 140 - DNA, 3123 bp, Artificial Sequence
  Description of Artificial Sequence: Synthetic polynucleotide
gaattcgccctttctacggctgcgtcaactggaccaatgaaaactttcccttcaacgattgcgtcgacaagatggtgatctggtgggaggagggaaagatgaccgccaaggtcgtggaatctgccaaagccattctgggtggaagcaaggttcgtgtggaccagaaatgcaagtcttcggcccagatcgacccgactccggtgattgtcacctctaacaccaacatgtgcgccgtgattgacggaaactcgaccaccttcgagcaccagcagccgttgcaagaccggatgttcaaatttgaacttacccgccgtttggatcatgactttgggaaggtcaccaagcaggaagtcaaagactttttccggtgggctcaagatcacgtgactgaggtggagcatgagttctacgtcaaaaagggtggagccaagaaaaggcccgcccccgatgatgtatatataaatgagcccaagcgggcgcgcgagtcagttgcgcagccatcgacgtcagacgcggaagcttcgataaactacgcgggcaggtaccaaaacaaatgttctcgtcacgtgggcatgaatctgatgctgtttccctgtcgacaatgcgaaagaatgaatcagaattcaaatatctgcttcacacacgggcaaaaagactgtttggaatgctttcccgtgtcagaatctcaacccgtttctgtcgtcagaaaaacgtatcagaaactttgttacattcatcatatcatgggaaaagaaccagacgcctgcactgcctgcgacctggtaaatgtggacttggatgactgtatttctgagcaataaatgacttaaatcaggtatggctgctgacggttatcttccagattggctcgaggacactctctctgaaggaatcagacagtggtggaagctcaaacctggcccaccaccgccgaaacctaaccaacaacaccgggacgacagtaggggtcttgtgcttcctgggtacaagtacctcggacccttcaacggactcgacaaaggagagccggtcaacgaggcagacgccgcggccctcgagcacgacaaagcctacgaccaccagctcaagcaaggggacaacccgtacctcaaatacaaccacgcggacgctgaatttcaggagcgtcttcaagaagatacgtctttcgggggcaacctcgggcgagcagtcttccaggccaaaaagagggtactcgagcctcttggtctggttgaggaagctgttaagacggctcctggaaaaaagagacctatagagcagtctcctgcagaaccggactcttcctcgggcatcggcgaatcaggccagcagcccgctaagaaaagactcaattttggtcagactggcgacacagagtcagtcccagaccctcaaccaatcggagaaccccccgcagccccctctggtgtgggatctaatacaatggcttcaggcggtggggcaccaatggcagacgataacgaaggcgccgacggagtgggtaattcctcgggaaattggcattgcgattccacatggatgggcgacagagttatcaccaccagcacaagaacctgggccctccccacctacaataatcacctctacaagcaaatctccagcgaatcgggagccaccaacgacaaccactacttcggctacagcaccccctgggggtattttgactttaacagattccactgtcacttctcaccacgtgactggcagcgactcatcaacaacaactggggatttagacccaagaaactcaatttcaagctcttcaacatccaagtcaaggaggtcacgcagaatgatggaaccacgaccatcgccaataaccttaccagcacggtgcaggtcttcacagactctgagtaccagctgccctacgtcctcggttcggctcaccagggctgccttccgccgttcccagcagacgtcttcatgattcctcagtacggctacttgactctgaacaatggcagccaagcggtaggacgttcttcattctactgtctagagtattttccctctcagatgctgaggacgggaaacaacttcaccttcagctacacttttgaagacgtgcctttccacagcagctacgcgcacagccagagtctggatcggctgatgaatcctctcattgaccagtacctgtattacctgagcaaaactcagggtacaagtggaacaacgcagcaatcgagactgcagttcagccaagctgggcctagctccatggctcagcaggccaaaaactggctaccgggacccagctaccgacagcagcgaatgtctaagacggctaatgacaacaacaacagtgaatttgcttggactgcagccaccaaatattacctgaatggaagaaattctctggtcaatcccgggcccccaatggccagtcacaaggacgatgaggaaaagtatttccccatgcacggaaatctcatctttggaaaacaaggcacaggaactaccaatgtggacattgaatcagtgcttattacagacgaagaagaaatcagaacaactaatcctgtggctacagaacaatacggacaggttgccaccaaccatcagagtcaggacaccacagcttcctatggaagtgtggacagccagggaatcttacctggaatggtgtggcaggaccgcgatgtctatcttcaaggtcccatttgggccaaaactcctcacacggacggacactttcatccttctccgctcatgggaggctttggactgaaacaccctcctccccagatcctgatcaaaaacacacctgtgccagcgaatcccgcgaccactttcactcctggaaagtttgcttcgttcattacccagtattccaccggacaggtcagcgtggaaatagagtgggagctgcagaaagaaaacagcaaacgctggaacccagaaattcagtacacctccaactacaacaagtcggtgaatgtggagtttaccgtggacgcaaacggtgtttattctgaaccccgccctattggcactcgttaccttacccggaacttgtaatttcctgttaatgaataaaccgatttatgcgtttcagttgaactttggtctctgcgaagggcgaattcgcggccgcta

SEQ ID NO: 141 - protein, 735 aa, Artificial Sequence
  Description of Artificial Sequence: Synthetic polypeptide
MAADGYLPDWLEDTLSEGIRQWWKLKPGPPPPKPNQQHRDDSRGLVLPGYKYLGPFNGLDKGEPVNEADAAALEHDKAYDHQLKQGDNPYLKYNHADAEFQERLQEDTSFGGNLGRAVFQAKKRVLEPLGLVEEAVKTAPGKKRPIEQSPAEPDSSSGIGESGQQPAKKRLNFGQTGDTESVPDPQPIGEPPAAPSGVGSNTMASGGGAPMADDNEGADGVGNSSGNWHCDSTWMGDRVITTSTRTWALPTYNNHLYKQISSESGATNDNHYFGYSTPWGYFDFNRFHCHFSPRDWQRLINNNWGFRPKKLNFKLFNIQVKEVTQNDGTTTIANNLTSTVQVFTDSEYQLPYVLGSAHQGCLPPFPADVFMIPQYGYLTLNNGSQAVGRSSFYCLEYFPSQMLRTGNNFTFSYTFEDVPFHSSYAHSQSLDRLMNPLIDQYLYYLSKTQGTSGTTQQSRLQFSQAGPSSMAQQAKNWLPGPSYRQQRMSKTANDNNNSEFAWTAATKYYLNGRNSLVNPGPPMASHKDDEEKYFPMHGNLIFGKQGTGTTNVDIESVLITDEEEIRTTNPVATEQYGQVATNHQSQDTTASYGSVDSQGILPGMVWQDRDVYLQGPIWAKTPHTDGHFHPSPLMGGFGLKHPPPQILIKNTPVPANPATTFTPGKFASFITQYSTGQVSVEIEWELQKENSKRWNPEIQYTSNYNKSVNVEFTVDANGVYSEPRPIGTRYLTRNL

SEQ ID NO: 142 - DNA, 3113 bp, Artificial Sequence
  Description of Artificial Sequence: Synthetic polynucleotide
gaattcgccctttctacggctgcgtcaactggaccaatgaaaactttcccttcaacgattgcgtcgacaagatggtgatctggtgggaggagggaaagatgaccgccaaggtcgtggaatctgccaaagccattctgggtggaagcaaggttcgtgtggaccagaaatgcaagtcttcggcccagatcgacccgactccggtgattgtcacctctaacaccaacatgtgcgccgtgattgacggaaactcgaccaccttcgagcaccagcagccgttgcaagaccggatgttcaaatttgaacttacccgccgtttggatcatgactttgggaaggtcaccaagcaggaagtcaaagactttttccggtgggctcaagatcacgtgactgaggtggagcatgagttctacgtcaaaaagggtggagccaagaaaaggcccgcccccgatgatgtatatataaatgagcccaagcgggcgcgcgagtcagttgcgcagccatcgacgtcagacgcggaagcttcgataaactacgcggacaggtaccaaaacaaatgttctcgtcacgtgggcatgaatctgatgctgtttccctgtcgacaatgcgaaagaatgaatcagaattcaaatatctgcttcacacacgggcaaaaagactgtttggaatgctttcccgtgtcagaatctcaacccgttcctgtcgtcagaaaaacgtatcagaaactttgttacattcatcatatcatgggaaaagtaccagacgcctgcactgcctgcgacctggtaaatgtggacttggatgactgtatttctgagcaataaatgacttaaatcaggtatggctgctgacggttatcttccagattggctcgaggacactctctctgaaggaatcagacagtggtggaagctcaaacctggcccaccaccgccgaaacctaaccaacaacaccgggacgacagtaggggtcttgtgcttcctgggtacaagtacctcggacccttcaacggactcgacaaaggagagccggtcaacgaggcagacgccgcggccctcgagcacgacaaagcctacgaccaccagctcaagcaaggggacaacccgtacctcaaatacaaccacgcggacgctgaatttcaggagcgtcttcaagaagatacgtctttcgggggcaacctcgggcgagcagtcttccaggccaaaaagagggtactcgagcctcttggtctggttgaggaagctgttaagacggctcctggaaaaaagagacctatagagcagtctcctgcagaaccggactcttcctcgggcatcggcaaatcaggccagcagcccgctaagaaaagactcaattttggtcagactggcgacacagagtcagtcccagaccctcaaccaatcggagaaccccccgcagccccctctggtgtgggatctaatacaatggcttcaggcggtggggcaccaatggcagacaataacgaaggcgccgacggagtgggtaattcctcgggaaattggcattgcgattccacatggatgggcgacagagttatcaccaccagcacaagaacctgggccctccccacctacaataatcacctctacaagcaaatctccagcgaatcgggagccaccaacgacaaccactacttcggctacagcaccccctgggggtattttgactttaacagattccactgtcacttctcaccacgtgactggcagcgactcatcaataacaactggggatttagacccaagaaactcaatttcaagctcttcaacatccaagtcaaggaggtcacgcagaatgatggaaccacgaccatcgccaataaccttaccagcacggtgcaggtcttcacagactctgagtaccagctgccctacgtcctcggttcggctcaccagggctgccttccgccgttcccagcagacgtcttcatgattcctcagtacggctacttgactctgaacaatggcagccaagcggtaggacgttcttcattctactgtctagagtattttccctctcagatgctgaggacgggaaacaacttcaccttcagctacacttttgaagacgtgcctttccacagcagctacgcgcacagccagagtctggatcggctgatgaatcctctcattgaccagtacctgtattacctgagcaaaactcagggtacaagtggaacaacgcagcaatcgagactgcagttcaaccaagctgggcctagctccatggctcagcaggccaaaaactggctaccgggacccagctaccgacagcagcgaatgtctaagacggctaatgacaacaacaacagtgaatttgcttggactgcagccaccaaatattacccgaatggaagaaattctctggtcaatcccgggcccccaatggccagtcacaaggacgatgaggaaaagtatttccccatgcacggaaatctcatctttggaaaacaaggcacaggaactaccaatgtggacattgaatcagtgcttattacagacgaagaagaaatcagaacgactaatcctgtggctacagaacaatacggacaggttgccaccaaccgtcagagtcagaacaccacagcttcctatggaagtgtggacagccagggaatcttacctggaatggtgtggcaggaccgcgatgtctatcttcaaggtcccatttgggccaaaactcctcacacggacggacactttcatccttctccgctcatgggaggctttggactgaaacaccctcctccccagatcctgatcaaaaacacacctgtgccagcgaatcccgcgaccactttcactcctggaaagtttgcttcgttcattacccagtattccaccggacaggtcagcgtggaaatagagtgggagctgcagaaagaaaacagcaaacgctggaacccggaaattcagtacacctccaactacaacaagtcggtgaatgtggagtttaccgtggacgcaaacggtgtttattctgaaccccgccctattggcactcgttaccttacccggaacttgtaatttcctgttaatgaataaaccgatttatgcgtttcagttgaactttggtctctgcgaagggcgaattc

SEQ ID NO: 143 - protein, 735 aa, Artificial Sequence
  Description of Artificial Sequence: Synthetic polypeptide
MAADGYLPDWLEDTLSEGIRQWWKLKPGPPPPKPNQQHRDDSRGLVLPGYKYLGPFNGLDKGEPVNEADAAALEHDKAYDHQLKQGDNPYLKYNHADAEFQERLQEDTSFGGNLGRAVFQAKKRVLEPLGLVEEAVKTAPGKKRPIEQSPAEPDSSSGIGKSGQQPAKKRLNFGQTGDTESVPDPQPIGEPPAAPSGVGSNTMASGGGAPMADNNEGADGVGNSSGNWHCDSTWMGDRVITTSTRTWALPTYNNHLYKQISSESGATNDNHYFGYSTPWGYFDFNRFHCHFSPRDWQRLINNNWGFRPKKLNFKLFNIQVKEVTQNDGTTTIANNLTSTVQVFTDSEYQLPYVLGSAHQGCLPPFPADVFMIPQYGYLTLNNGSQAVGRSSFYCLEYFPSQMLRTGNNFTFSYTFEDVPFHSSYAHSQSLDRLMNPLIDQYLYYLSKTQGTSGTTQQSRLQFNQAGPSSMAQQAKNWLPGPSYRQQRMSKTANDNNNSEFAWTAATKYYPNGRNSLVNPGPPMASHKDDEEKYFPMHGNLIFGKQGTGTTNVDIESVLITDEEEIRTTNPVATEQYGQVATNRQSQNTTASYGSVDSQGILPGMVWQDRDVYLQGPIWAKTPHTDGHFHPSPLMGGFGLKHPPPQILIKNTPVPANPATTFTPGKFASFITQYSTGQVSVEIEWELQKENSKRWNPEIQYTSNYNKSVNVEFTVDANGVYSEPRPIGTRYLTRNL

SEQ ID NO: 144 - DNA, 3122 bp, Artificial Sequence
  Description of Artificial Sequence: Synthetic polynucleotide
agcggccgcgaattcgccctttctacggctgcgtcaactggaccaatgaaaactttcccttcaacgattgcgtcgacaagatggtgatctggtgggaggagggaaagatgaccgccaaggtcgtggaatctgccaaagccattctgggtggaagcaaggttcgtgtggaccagaaatgcaggtcttcggcccagatcgacccgactccggtgattgtcacctctaacaccaacatgtgcgccgtgattgacggaaactcgaccaccttcgagcaccagcagccgttgcaagaccggatgttcaaatttgaacttacccgccgtttggatcatgactttgggaaggtcaccaagcaggaagtcaaagactttttccggtgggctcaagatcacgtgactgaggtggagcatgagttctacgtcaaaaagggtggagccaagaaaaggcccgcccccgatgatgtatatataaatgagcccaagcgggcgcgcgagtcagttgcgcagccatcgacgtcagacgcggaagcttcgataaactacgcggacaggtaccaaaacaaatgttctcgtcacgtgggcatgaatctgatgctgtttccctgtcgacaatgcgaaagaatgaatcagaattcaaatatctgcttcacacacgggcaaaaagactgtttggaatgctttcccgtgtcagaatctcaacccgtttctgtcgtcagaaaaacgtatcagaaactttgttacattcatcatatcatgggaaaagtaccagacgcctgcactgcctgcgacctggtaaatgtggacttggatgactgtatttctgagcaataaatgacttaaatcaggtatggctgctgacggttatcttccagattggctcgaggacactctctctgaaggaatcagacagtggtggaagctcaaacctggcccaccaccgccgaaacctaaccaacaacaccgggacgacagtaggggtcttgtgcttcctgggtacaagtacctcggacccttcaacggactcgacaaaggagagccggtcaacgaggcagacgccgcggccctcgagcacgacaaagcctacgaccaccagctcaagcaaggggacaacccgtacctcaaatacaaccacgcggacgctgaatttcaggagcgtcttcaagaagatacgtctttcgggggcaacctcgggcgagcagtcttccaggccaaaaagagggtactcgagcctcttggtctggttgaggaagctgttaagacggctcctggaaaaaagagacctatagagcagtctcctgcagaaccggactcttcctcgggcatcggcaaatcaggccagcagcccgctaagaaaagactcaattttggtcagactggcgacacagagtcagtcccagaccctcaaccaatcggagaaccccccgcagccccctctggtgtgggatctaatacaatggcttcaggcggtggggcaccaatggcagacaataacgaaggcgccgacggagtgggtaattcctcgggaaattggcattgcgattccacatggatgggcgacagagttatcaccaccagcacaagaacctgggccctccccacctacaataatcgcctctacaagcaaatctccagcgaatcgggagccaccaacgacaaccactacttcggctacagcaccccctgggggtattttgactttaacagattccactgtcacttctcaccacgtgactggcagcgactcatcaacaacaactggggatttagacccaagaaactcaatttcaagctcttcaacatccaagtcaaggaggtcacgcagaatgatggaaccacgaccatcgccaataaccttaccagcacggtgcaggtcttcacagactctgagtaccagctgccctacgtcctcggttcggctcaccagggctgccttccgccgttcccagcagacgtcttcatgattcctcagtacggctacttgactctgaacaatggcagccaagcggtaggacgttcttcattctactgtctagagtattttccctctcagatgctgaggacgggaaacaacttcaccttcagctacacttttgaagacgtgcctttccacagcagctacgcgcacagccagagtctggatcggctgatgaatcctctcattgaccagtacctgtattacctgagcaaaactcagggtacaagtggaacaacgcagcaatcgagactgcagttcagccaagctgggcctagctccatggctcagcaggccaaaaactggctaccgggacccagctaccgacagcagcgaatgtctaagacggctaatgacaacaacaacagtgaatttgcttggactgcagccaccaaatattacctgaatggaagaaattctctggtcaatcccgggcccccaatggccagtcacaaggacgatgaggaaaagtatttccccatgcacggaaatctcatctttggaaaacaaggcacaggaactaccaatgtggacattgaatcagtgcttattacagacgaagaagaaatcagaacaactaatcctgtggctacagaacaatacggacaggttgccaccaaccatcagagtcagaacaccacagcttcctatggaagtgtggacagccagggaatcttacctggaatggtgtggcaggaccgcgatgtctatcttcaaggtcccatttgggccaaaactcctcacacggacggacactttcatccttctccgctcatgggaggctttggactgaaacaccctcctccccagatcctgatcaaaaacacacctgtgccagcgaatcccgcgaccactttcactcctggaaagtttgcttcgttcattacccagtattccaccggacaggtcagcgtggaaatagagtgggagctgcagaaagaaaacagcaaacgctggaacccagaaattcagtacacctccaactacaacaagtcggtgaatgtggagtttaccgtggacgcaaacggtgtttattctgaaccccgccctattggcactcgttaccttacccggaacttgtaatttcctgttaatgaataaaccgatttatgcgtttcagttgaactttggtctctgcgaagggcgaattc

SEQ ID NO: 145 - protein, 735 aa, Artificial Sequence
  Description of Artificial Sequence: Synthetic polypeptide
MAADGYLPDWLEDTLSEGIRQWWKLKPGPPPPKPNQQHRDDSRGLVLPGYKYLGPFNGLDKGEPVNEADAAALEHDKAYDHQLKQGDNPYLKYNHADAEFQERLQEDTSFGGNLGRAVFQAKKRVLEPLGLVEEAVKTAPGKKRPIEQSPAEPDSSSGIGKSGQQPAKKRLNFGQTGDTESVPDPQPIGEPPAAPSGVGSNTMASGGGAPMADNNEGADGVGNSSGNWHCDSTWMGDRVITTSTRTWALPTYNNRLYKQISSESGATNDNHYFGYSTPWGYFDFNRFHCHFSPRDWQRLINNNWGFRPKKLNFKLFNIQVKEVTQNDGTTTIANNLTSTVQVFTDSEYQLPYVLGSAHQGCLPPFPADVFMIPQYGYLTLNNGSQAVGRSSFYCLEYFPSQMLRTGNNFTFSYTFEDVPFHSSYAHSQSLDRLMNPLIDQYLYYLSKTQGTSGTTQQSRLQFSQAGPSSMAQQAKNWLPGPSYRQQRMSKTANDNNNSEFAWTAATKYYLNGRNSLVNPGPPMASHKDDEEKYFPMHGNLIFGKQGTGTTNVDIESVLITDEEEIRTTNPVATEQYGQVATNHQSQNTTASYGSVDSQGILPGMVWQDRDVYLQGPIWAKTPHTDGHFHPSPLMGGFGLKHPPPQILIKNTPVPANPATTFTPGKFASFITQYSTGQVSVEIEWELQKENSKRWNPEIQYTSNYNKSVNVEFTVDANGVYSEPRPIGTRYLTRNL

SEQ ID NO: 146 - DNA, 3121 bp, Artificial Sequence
  Description of Artificial Sequence: Synthetic polynucleotide
gaattcgcccttcgcagagaccaaagttcaactgaaacgaatcaaccggtttattgattaacaagcaattacagattacgggtgaggtaacgggtgccgatggggcgaggctcagaataagtgccatctgtgttaacagcaaagtccacatttgtagatttgtagtagttggaagtgtattgaatctctgggttccagcgtttgctgttttctttctgcagctcccattcaatttccacgctgacctgtccggtgctgtactgcgtgatgaacgacgccagcttagcttgactgaaggtagttggaggatccgcgggaacaggtgtattcttaatcaggatctgaggaggcgggtgtttcagtccaaagccccccatcagcggcgagggatgaaagtttccgtccgtgtgaggaatcttggcccagataggaccctgcaggtacacgtcccggttctgccagaccatgccaggtaaggctccttgactgttgacggcccctacaataggagcggcgttttgctgttgcaggttatcggccaccacgccgtactgttctgtggccactgggttggtggttttaatttcttcctcactggttagcataacgctgctatagtccacgttgccttttccagctccctgtttcccaaacattaagactccgctggacggaaaaaatcgctcttcgtcgtccttgtgggttgccatagcgacaccgggatttaccagagagtctctgccattcagatgatacttggtggcaccggtccaggcaaagttgctgttgttattttgcgacagtgtcgtggagacgcgttgctgccggtagcagggcccgggtagccagtttttggcctgagccgacatgttattaggcccggcctgagaaaatagcaactgctgagttcctgcggtacctcccgtggactgagtccgagacaggtagtacaggtactggtcgatgagggggttcatcagccggtccaggctttggctgtgcgcgtagctgctgtgaaaaggcacgtcctcaaactggtagctgaactcaaagttgttgcccgttctcagcatttgagaaggaaagtactccaggcagtagaaggaggaacggcccacggcctgactgccattgttcagagtcaggtacccgtactgaggaatcatgaagacgtccgccgggaacggaggcaggcagccctggcgcgcagagccgaggacgtacgggagctggtattccgagtccgtaaagacctgaatcgtgctggtaaggttattggcgatggtcttggtgccttcattctgcgtgacctccttgacctggatgttgaagagcttgaagttgagtctcttgggccggaatccccagttgttgttgatgagtcgctgccagtcacgtggtgagaagtggcagtggaatctgttaaagtcaaaatacccccagggggtgctgtagccgaagtaggtgttgtcgttggtgcttcctcccgaagtcccgttggagatttgcttgtagaggtggttgttgtaggtggggagggcccaggttcgggtgctggtggtgatgactctgtcgcccagccatgtggaatcgcaatgccaatttcctgaggaactacccactccgtcggcgccttcgttattgtctgccattggagcgccaccgcctgcagccattgtaccagatcccagaccagaggggcctgcggggggttctccgattggttgagggtcgggcactgactctgagtcgccagtctgcccaaagttgagtctctttttcgcgggctgctggcctttcttgccgatgcccgtagtggagtctggagaacgctggggtgatggctctaccggtctcttctttccaggagccgtcttagcgccttcctcaaccagaccgagaggttcgagaacccgcttcttggcctggaagactgctcgtccgaggttgcccccaaaagacgtatcttcttgcagacgctcctgaaactcggcgtcggcgtggttataccgcaggtacggattgtcacccgctttgagctgctggtcgtaggccttgtcgtgctcgagggccgctgcgtccgccgcgttgacgggctcccccttgtcgagtccgttgaagggtccgaggtacttgtagccaggaagcaccagaccccggccgtcgtcctgcttttgctggttggctttgggcttcggggctccaggtttcagcgcccaccactcgcgaatgccctcagagaggttgtcctcgagccaatctggaagataaccatcggcagccatacctgatctaaatcatttattgttcaaagatgcagtcatccaaatccacattgaccagatcgcaggcagtgcaagcgtctggcacctttcccatgatatgatgaatgtagcacagtttctgatacgcctttttgacgacagaaacgggttgagattctgacacgggaaagcactctaaacagtctttctgtccgtgagtgaagcagatatttgaattctgattcattctctcgcattgtctgcagggaaacagcatcagattcatgcccacgtgacgagaacatttgttttggtacctgtccgcgtagttgatcgaagcttccgcgtctgacgtcgatggctgcgcaactgactcgcgcacccgtttgggctcacttatatctgcgtcactgggggcgggtcttttcttggctccaccctttttgacgtagaattcatgctccacctcaaccacgtgatcctttgcccaccggaaaaagtctttgacttcctgcttggtgaccttcccaaagtcatgatccagacggcgggtgagttcaaatttgaacatccggtcttgcaacggctgctggtgttcgaaggtcgttgagttcccgtcaatcacggcgcacatgttggtgttggaggtgacgatcacgggagtcgggtctatctgggccgaggacttgcatttctggtccacgcgcaccttgcttcctccgagaatggctttggccgactccacgaccttggcggtcatcttcccctcctcccaccagatcaccatcttgtcgacacagtcgttgaagggaaagttctcattggtccagttgacgcagccgtagaagggcgaattc

SEQ ID NO: 147 - protein, 733 aa, Artificial Sequence
  Description of Artificial Sequence: Synthetic polypeptide
MAADGYLPDWLEDNLSEGIREWWDLKPGAPKLKANQQKQDDGRGLVLPGYKYLGPFHGLDKGEPVNAADAAALEHDKAYDQQLKAGDNPYLRYNHADAEFQERLQEDTSFGGNLGRAVFQAKKRVLEPLGLVEEGAKTAPGKKRPLESPQEPDSSSGIGKKGKQPAKKRLNFEEDTGAGDGPPEGSDTSAMSSDIEMRAAPGGNAVDAGQGSDGVGNASGDWHCDSTWSEGKVTTTSTRTWVLPTYNNHLYLRLGTTSNSNTYNGFSTPWGYFDFNRFHCHFSPRDWQRLINNNWGLRPKAMRVKIFNIQVKEVTTSNGETTVANNLTSTVQIFADSSYELPYVMDAGQEGSLPPFPNDVFMVPQYGYCGIVTGENQNQTDRNAFYCLEYFPSQMLRTGNNFEMAYNFEKVPFHSMYAHSQSLDRLMNPLLDQYLWHLQSTTSGETLNQGNAATTFGKIRSGDFAFYRKNWLPGPCVKQQRFSKTASQNYKIPASGGNALLKYDTHYTLNNRWSNIAPGPPMATAGPSDGDFSNAQLIFPGPSVTGNTTTSANNLLFTSEGEIAATNPRDTDMFGQIADNNQNATTAPITGNVTAMGVLPGMVWQNRDIYYQGPIWAKIPHADGHFHPSPLIGGFGLKHPPPQIFIKNTPVPANPATTFTAARVDSFITQYSTGQVAVQIEWEIEKERSKRRNPEVQFTSNYGNQSSMLWAPDTTGKYTEPRVIGSRYLTNHL

SEQ ID NO: 148 - protein, 735 aa, Artificial Sequence
  Description of Artificial Sequence: Synthetic polypeptide
MAADGYLPDWLEDTLSEGIRQWWKLKPGPPPPKPNQQHRDDSRGLVLPGYKYLGPFNGLDKGEPVNEADAAALEHDKAYDHQLKQGDNPYLKYNHADAEFQERLQEDTSFGGNLGRAVFQAKKRVLEPLGLVEEAVKTAPGKKRPIEQSPAEPDSSSGIGKSGQQPAKKRLNFGQTGDTESVPDPQPIGEPPAAPSGVGSNTMASGGGAPMADNNEGADGVGNSSGNWHCDSTWMGDRVITTSTRTWALPTYNNHLYKQISSESGATNDNHYFGYSTPWGYFDFNRFHCHFSPRDWQRLINNNWGFRPKKLNFKLFNIQVKEVTQNDGTTTIANNLTSTVQVFTDSEYQLPYVLGSAHQGCLPPFPADVFMIPQYGYLTLNNGSQAVGRSSFYCLEYFPSQMLRTGNNFTFSYTFEDVPFHSSYAHSQSLDRLMNPLIDQYLYYLSKTQGTSGTTQQSRLQFSQAGPSSMAQQAKNWLPGPSYRQQRMSKTANDNNNSEFAWTAATKYYLNGRNSLVNPGPPMASHKDDEEKYFPMHGNLIFGKQGTGTTNVDIESVLITDEEEIRTTNPVATEQYGQVATNHQSQNTTASYGSVDSQGILPGMVWQDRDVYLQGPIWAKIPHTDGHFHPSPLMGGFGLKHPPPQILIKNTPVPANPATTFTPGKFASFITQYSTGQVSVEIEWELQKENSKRWNPEIQYTSNYNKSVNVEFTVDANGVYSEPRPIGTRYLTRNL

SEQ ID NO: 149 - DNA, 3127 bp, Artificial Sequence
  Description of Artificial Sequence: Synthetic polynucleotide
gcggccgcgaattcgcccttcgcagagaccaaagttcaactgaaacgaatcaaccggtttattgattaacatgcaattacagattacgggtgaggtaacgagtgccaatagggcgaggctcagagtaaacaccctggctgtcaacggcaaagtccacaccagtctgcttttcaaagttggaggtgtactgaatctccgggtcccagcgcttgctgttttccttctgcagctcccactcgatttccacgctgacttgtccggtgctgtactgtgtgatgaacgaagcaaacttggcaggagtaaacacctccggaggattagcgggaacgggagtgttcttgatcaggatctgaggaggcggatgtttaagtccaaagccgcccatcaaaggagacgggtgaaagttgccatccgtgtgaggaatcttggcccagatgggaccctgcaggtacacgtcccggttctgccagaccatgccaggtaaggctccctggttgttgacaacttgtgtctgggctgcagtattagccgcttgtaagttgctgctgactatcccgtattcttccgtggctacaggattagtaggacgaatttcttcttcatttgtcattaacacattttccaatgtagttttgttagttgctccagtttttccaaaaatcaggactccgctggatgggaaaaagcggtcctcgtcgtccttgtgagttgccatggcgacgccgggattaaccaacgagtttctgccgttcaggtgatatttggtggcaccagtccaagcaaagttgctgttgttgttttgatccagcgttttggagaccctttgttgccggaagcagggtccaggtaaccaattcttggcttgttcggccatagttgaaggcccgccctggtaaaactgcagttcccgattgccagctgtgcctcctgggtcactctgtgttctggccaggtagtacaagtactggtcgatgaggggattcatcagccggtccaggctctggctgtgtgcgtagctgctgtggaaaggcacgtcctcgaagctgtagctgaactcaaagttgttgcccgttctcagcatctgagaggggaagtactccaggcagtagaaggaggaacgtcccacagactgactgccattgttgagagtcaggtagccgtactgaggaatcatgaagacgtccgccgggaacggaggcaggcagccctggtgcgcagagccgaggacgtacggcagctggtattccgagtccgagaatacctgaatcgtgctggtaaggttattagcgatggtcgtaacgccgtcattcgtcgtgacctccttgacctggatgttgaagagcttgaaccgcagcttcttgggccggaatccccagttgttgttgatgagtcgctgccagtcacgtggtgagaagtggcagtggaatctgttaaagtcaaaatacccccagggggtgctgtagccgaagtaggtgttgtcgttggtactacctgcagtttcactggagatttgctcgtagaggtggttgttgtaggtgggcagggcccaggttcgggtgctggtggtaatgactctgtcgcccagccatgtggaatcgcaatgccaatttcctgaggcattacccactccgtcggcaccttcgttattgtctgccattggtgcgccaccgcctgcagccactgtaccagatcccacactagagggcgctgctggaggttctccgagaggttgagggtcggggactgactctgagtcgccagtctgaccgaaattgagtctctttctggcgggctgctggcccttcttgccgatgcccgtggaggagtcgggggaacgctgaggtgacggctctaccggtctcttctttgcaggagccgtcttagcgccttcctcaaccagaccgagaggttcgagaacccgcttcttggcctggaagactgctcgcccgaggttgcccccaaatgacgtatcttcttgcagacgctcctgaaactcggcgtcggcgtggttataccgcaggtacgggttgtcacccgcattgagctgctggtcgtaggccttgtcgtgctcgagggccgctgcgtccgccgcgttgacgggctcccccttgtcgagtccgttgaagggtccgaggtacttgtagccaggaagcaccagaccccggccgttgtcctgcttttgctggttggctttgggtttcggggctccaggtttcaggtcccaccactcgcgaatgccctcagagaggttgtcctcgagccaatctggaagataaccatcggcagccatacctgatttaaatcatttattgttcaaagatgcagtcatccaaatccacattgaccagatcgcaggcagtgcaagcgtctggcacctttcccatgatatgatgaatgtagcacagtttctgatacgcctttttgacgacagaaacgggtttagattctgacacgggaaagcactctaaacagtctttctgtccgtgagtgaagcagatatttgaattctgattcattctctcgcattgtctgcagggaaacagcatcagattcatgcccacgtgacgagaacatttgttttggtacctgtctgcgtagttgatcgaagcttccgcgtctgacgtcgatggctgcgcaactgactcgcgcacccgtttgggctcacttatatctgcgtcactgggggcgggtcttttcttggctccaccctttttgacgtagaattcatgctccacctcaaccacgtaatcctttgcccaccggaaaaagtctttgacttcctgcttggtgaccttcccaaagtcatgatccagacggcgggtgagttcaaatttgaacatccggtcttgcaacggctgctggtgttcgaaggtcgttgagttcccgtcgatcacggcgcacatgttggtgttggagatgacgatcgcgggagtcgggtctatctgggccgaggacttgcatttctggtccacgcgcaccttgcttcctccgagaatggctttggccgactccacgaccttggcggtcatcttcccctcctcccaccagatcaccatcttgtcgacacagtcgttgaagggaaagttctcattggtccagttgacgcagccgtagaaagggcgaattc

SEQ ID NO: 150 - protein, 728 aa, Artificial Sequence
  Description of Artificial Sequence: Synthetic polypeptide
MAADGYLPDWLEDNLSEGIREWWDLKPGAPKPKANQQKQDDGRGLVLPGYKYLRPFNGLDKGEPVNEADAAALEHDKAYDKQLEQGDNPYLKYNHADAEFQERLQEDTSFGGNLGRAVFQAKKRVLEPLGLVEEVAKTAPGKKRPIESPDSSTGIGKKGQQPAKKKLNFGQTGDSESVPDPQPLGEPPAAPSGLGSGTMAAGGGAPMADNNEGADGVGNASGNWHCDSTWLGDRVITTSTRTWALPTYNNHLYKQISSQSGATNDNHFFSYSTPWGYFDFNRFHCHFSPRDWQRLINNNWGFRPRKLRFKLFNIQVKEVTTNDGVTTIANNLTSTIQVFSDSEYQLPYVLGSAHQGCLPPFPADVFMIPQYGYLTLNNGSQSVGRSSFYCLEYFPSQMLRTGNNFEFSYTFEEVPFHSSYVHSQSLDRLMNPLIDQYLYYLARTQSTTGSTRELQFHQAGPNTMAEQSKNWLPGPCYRQQRLSKNIDSNNNSNFAWTGATKYHLNGRNSLTNPGVAMATNKDDEDQFFPINGVLVFGKTGAANKTTLENVLMTSEEEIKTTNPVATEEYGVVSSNLQSSTAGPQTQTVNSQGALPGMVWQNRDVCLQGPIWAKIPHTDGNFHPSPLMGGFGLKHPPPQILIKNTPVPANPPEVFTPAKFASFITQYSTGQVSVEIEWELQKENSKRWNPEIQYTSNYAKSNNVEFAVNNEGVYTEPRPIGTRYLTRNL

SEQ ID NO: 151 - DNA, 3106 bp, Artificial Sequence
  Description of Artificial Sequence: Synthetic polynucleotide
gcggccgcgaattcgcccttcgcagagaccaaagttcaactgaaacgaatcaaccggtttattgattaacaagtaattacaggttacgggtgaggtaacgggtgccaatggggcgaggctcagtataaaccccttcgttgttgacagcaaattccacattattagacttggcataatttgaggtgtactgaatctctggattccagcgtttgctgttttctttctgcagttcccactcgatctccacgctgacctggccggtgctgtactgcgtgataaatgaggcaaacttggcaggagtaaacacctctggaggattagcaggtaccggggtgtttttgatgagaatttgaggaggcgggtgtttgagtccaaatccgcccatcaggggagacgggtgaaagttgccgtccgtgtgaggaattttggcccagatgggaccctgcaggcacacgtcccggttctgccagaccatgccgggcagagccccctggctgttgacagtctgtgtctggggtccggccgtagacgattgcaggttgctggagaccacaccgtattcttctgtagccacgggattggtggttttgatctcctcctcgctggtcattagcacgttttccagcgttgtcttgttggcagcccccgttttgccaaaaaccagcactccgttgatgggaaagaactggtcctcgtcgtccttgttggtggccatggctacgcccgggttggttaatgaatttctaccattcagatggtatttagtggccccggtccaggcaaagttactgttgttgttgctgtctatgttttttgacagtctctgctgccgataacagggtccgggcagccagttctttgattgctcggccatggtgttgggcccagcctgatggaactgcagctcccttgtggaccccgtagtgctctgggtccgggccaggtagtacaggtactggtcgatgaggggattcatcagccggtctaggctctggctgtgcacatagctgctgtggaaaggcacttcctcaaaggtgtagctgaattcaaagttattgcccgttctcagcatctgagaaggaaagtactccaggcagtagaaggaggaacgtcccacagactgactgccgttgtttagagtcagatatccgtactgaggaatcatgaacacgtccgcagggaacggagggaggcagccctggtgcgcagagccgaggacgtacggcagttggtactccgagtccgagaagacctgaatcgtgctggtaaggttattagcgatggtcgtaacgccgtcgttcgtcgtgacctccttgacctggatgttgaacaacttgaaccgcagctttctgggccggaatccccagttgttgttgatgagtcgctgccagtcacgtggtgagaagtggcagtggaatctgttgaagtcaaaatagccccagggggtgctgtagctgaagaagtggttgtcgttggtagccccgctctgacttgatatctgcttgtagaggtggttgttgtaggtgggcagggcccaggtgcgggtgctggtggtgatgactctgtcgcccagccatgtggaatcgcaatgccaatttccggaggcattacccactccgtcggcgccttcgttattgtctgccattggtgcgccaccgcctgcagccattgtaccagatcccagacctgagggcgcggcgggaggttctccgagaggttgggggtcgggcactgactctgagtcgccagtctgcccaaagttgagcttctttttagcgggctgctggcctttcttgccgatgcccgtggaggagtcgggggattctatgggtctcttctttccaggagccgtcttagcgacttcctcaaccagaccgagaggttcgagaacccgcttcttggcctggaagactgctcgcccgaggttgcccccaaaagacgtatcttcttgaagacgctcctgaaactcggcgtcggcgtggttgtacttgaggtacgggttgtccccctgctcgagctgcttgtcgtaggccttgtcgtgctcgagggccgcggcgtctgcctcgttgaccggctctcccttgtcgagtccgttgaagggtctgaggtacttgtagccaggaagcaccagaccccggccgtcgtcctgcttttgctggttggctttgggtttcggggctccaggtttcaagtcccaccactcgcgaatgccctcagagaggttgtcctcgagccaatctggaagataaccatcggcagccatacctggtttaagtcatttattgctcagaaacacagtcatccaggtccacgttgaccagatcgcaggccgagcaagcaatctcgggagcccgccccagcagatgatgaatggcacagagtttccgatacgtcctctttctgacgaccggttgagattctgacacgccggggaaacattctgaacagtctctggtcccgtgcgtgaagcaaatgttgaaattctgattcactctctcgcatgtcttgcagggaaacagcatctgaagcatgcccgcgtgacgagaacatttgttttggtacctgtcggcaaagtccaccggagctccttccgcgtctgacgtcgatggattcgcgactgaggggcaggcccgcttgggctcgcttttatccgcgtcatcgggggcgggtctcttgttggccccaccctttctgacgtagaacccatgcgccacctcggtcacgtgatcctgcgcccagcggaagaaccttttgacttcctgctttgtcaccttgccaaagttatgctccagacggcgggtgggttcaaatttgaacatccggtcctgcaacggctgctggtgctcgaaggtggcgctgttcccgtcaatcacggcgcacatgttggtgttggaggtgacggtcacgggggtggggtcgatctgggcggacgacttgcacttttggtccacgcgcaccttgctgccgccgagaatggccttggcggactccacgaccttggccgtcatcttgccctcctcccaccagatcaccatcttgtcggcgcaatcgttgaagggaaagttctcattggtccagttgacgcagccgtagaaagggcgaattc

SEQ ID NO: 152 - protein, 728 aa, Artificial Sequence
  Description of Artificial Sequence: Synthetic polypeptide
MAADGYLPDWLEDNLSEGIREWWDLKPGAPKPKANQQKQDDGRGLVLPGYKYLGPFNGLDKGEPVNEADAAALEHDKAYDKQLEQGDNPYLKYNHADAEFQERLQEDTSFGGNLGRAVFQAKKRVLEPLGLVEEGAKTASGKKRPIESPDSSTGIGKKGQQPAKKKLNFGQTGDSESVPDPQPLGEPPAAPSGLGSGTMAAGGGAPMADNNEGADGVGNASGNWHCDSTWLGDRVITTSTRTWALPTYNNHLYKQISSQSGATNDNHFFGYSTPWGYFDFNRFHCHFSPRDWQRLINNNWGFRPRKLRFKLFNIQVKEVTTNDGVTTIANNLTSTIQVFSDSEYQLPYVLGSAHQGCLPPFPADVFMIPQYGYLTLNNGSQSVGRSSFCCLEYFPSQMLRTGNNFEFSYTFEEVPFHSSYAHSQSLDRLMNPLIDQYLYYLARTQSTTGSTRELQFHQAGPNTVAEQSKNWLPGPCYRQQRLSKNIDSNNNSNFAWTGATKYHLNGRNSLTNPGVAMATNKDDEDQFLPINGVLVFGKTGAANKTTLENVLMTSEEEIKTTNPVATEEYGVVSSNLQSSTAGPRTQTVNSQGALPGMVWQNRDVYLQGPIWAEIPHTDGNFHPSPLMGGFGLKHPPPQILIKNTPVPANPPEVFTPAKFASFITQYSTGQVSVEIEWELQKENSKRWNPEIQYTSNYAKSNNVEFAVNNEGVYTEPRPIGTRYLTRNL

SEQ ID NO: 153 - DNA, 3102 bp, Artificial Sequence
  Description of Artificial Sequence: Synthetic polynucleotide
gcggccgcgaattcgcccttcgcagagaccaaagttcaactgaaacgaatcaaccggtttattgattaacaagtaattacaggttacgggtgaggtaacgggtgccaatggggcgaggctcagtataaaccccttcgttgttgacagcaaattccacattattagacttggcataatttgaggtgtactgaatctctggattccagcgtttgctgttttctttctgcagttcccactcgatctccacgctgacctggccggtgctgtactgcgtgataaatgaggcaaacttggcaggagtaaacacctctggaggattagcaggtaccggggtgtttttgatgagaatttgaggaggcgggtgtttgagtccaaatccgcccatcaggggagacgggtgaaagttgccgtccgtgtgaggaatttcggcccagatgggaccctgcaggtacacgtcccggttctgccagaccatgccgggcagagccccctggctgttgacagtctgtgtccggggtccggccgtagacgattgcaggttgctggagaccacaccgtattcttctgtagccacgggattggtggttttgatctcctcctcgctggtcattagcacgttttccagcgttgtcttgttggcagcccccgttttgccaaaaaccagcactccgttgatgggaaggaactggtcctcgtcgtccttgttggtggccatggctacgcccgggttggttaatgaatttctaccattcagatggtatttagtggccccggtccaggcaaagttactgttgttgttgctgtctatgttttttgacagtctctgctgccgataacagggtccgggcagccagttctttgattgctcggccacggtgttgggcccagcctgatggaactgcagctcccttgtggaccccgtagtgctctgggtccgggccaggtagtacaggtactggtcgatgaggggattcatcagccggtccaggctctggctgtgcgcatagctgctgtggaaaggcacttcctcaaaggtgtagctgaattcaaagttattgcccgttctcagcatctgagaaggaaagtactccaggcagcagaaggaggaacgtcccacagactgactgccgttgtttagagtcagatatccgtactgaggaatcatgaacacgtccgcagggaacggagggaggcagccctggtgcgcagagccgaggacgtacggcagttggtactccgagtccgagaagacctgaatcgtgctggtaaggttattagcgatggtcgtaacgccgtcgttcgtcgtgacctccttgacctggatgttgaacaacttgaaccgcagctttctgggccggaatccccagttgttgttgatgagtcgctgccagtcacgtggtgagaagtggcagtggaatctgttgaagtcaaaatagccccagggggtgctgtagccgaagaagtggttgtcgttggtagccccgctctgacttgatatctgcttgtagaggtggttgttgtaggtgggcagggcccaggtgcgggtgctggtggtgatgactctgtcgcccagccatgtggaatcgcaatgccaatttccggaggcattacccactccgtcggcgccttcgttattgtctgccattggtgcgccaccgcctgcagccattgtaccagatcccagacctgagggcgcggcgggaggttctccgagaggttgggggtcgggcactgactctgagtcgccagtctgcccaaagttgagcttctttttagcgggctgctggcctttcttgccgatgcccgtggaggagtcgggggattctatgggtctcttctttccggaagccgtcttagcgccttcctcaaccagaccgagaggttcgagaacccgcttcttggcctggaagactgctcgcccgaggttgcccccaaaagacgtatcttcttgaagacgctcctgaaactcggcgtcggcgtggttgtacttgaggtacgggttgtccccctgctcgagctgcttgtcgtaggccttgtcgtgctcgagggccgcggcgtctgcctcgttgaccggctctcccttgtcgagtccgttgaagggtccgaggtacttgtagccaggaagcaccagaccccggccgtcgtcctgcttttgctggttggctttgggtttcggggctccaggtttcaagtcccaccactcgcgaatgccctcagagaggttgtcctcgagccaatctggaagataaccatcggcagccatacctggtttaagtcatttattgctcagaaacacagtcatccaggtccacgttgaccagatcgcaggccgagcaagcaatctcgggagcccgccccagcagatgatgaatggcacagagtttccgatacgtcctctttctgacgaccggttgagattctgacacgccggggaaacattctgaacagtctctggtcccgtgcgtgaagcaaatgttgaaattctgattcattctctcgcatgtcttgcagggaaacagcatctgaagcatgcccgcgtgacgagaacatttgttttggtacctgtcggcaaagtccaccggagctccttccgcgtctgacgtcgatggatccgcgactgaggggcaagcccgcttgggctcgcttttatccgcgtcatcgggggcgggtctcttgttggctccaccctttctgacgtagaactcatgcgccacctcggtcacgtgatcctgcgcccagcggaagaactctttgacttcctgctttgtcaccttgccaaagtcatgctccagacggcgggtgagttcaaatttgaacatccggtcttgtaacggctgctggtgctcgaaggtggtgctgttcccgtcaatcacggcgcacatgttggtgttggaagtgacgatcacgggggtgggatcgatctgggcggacgacttgcacttttggtccacgcgcaccttgctgccgccgagaatggccttggcggactccacgaccttggccgtcatcttgccctcctcccaccagatcaccatcttgtcgacgcaatcgttgaagggaaagttctcattggtccagttgacgcagccgaagggcgaattc

SEQ ID NO: 154 - protein, 728 aa, Artificial Sequence
  Description of Artificial Sequence: Synthetic polypeptide
MAADGYLPDWLEDNLSEGIREWWDLKPGAPKPKANQQKQDDGRGLVLPGYRYLGPFNGLDKGEPVNEADAAALEHDKAYDKQLEQGDNPYLKYNHADAEFQERLQEDTSFGGNLGRAVFQAKKRVLEPLGLVEEGAKTAPGKKRPIESPDSSTGIGKNGQPPAKKKLNFGQTGDSESVPDPQPLGEPPAAPSGLGSGTMAAGGGAPMADNNEGADGVGNASGNWHCDSTWLGDRVITTSTRTWALPTYNNHLYKQISSQSGATNDNHFFGYSTPWGYFDFNRFHCHFSPRDWQRLINNNWGFRPRKLRFKLFNIQVKEVTTNDGVTTIANNLTSTIQVFSDSEYQLPYVLGSAHQGCLPPFPADVFMIPQYGYLTLNNGSQSVGRSSFYCLEYFPSQMLRTGNNFEFSYTFEEVPFHSSYAHSQSLDRLMNPLIDQYLYYLARTQSTTGSTRELQFHQAGPNTMAEQSKNWLPGPCYRQQRLSKNIDSNNNSNFAWTGATKYHLNGRNSLTNPGVAMATNKDDEDQFFPINGVLVFGKTGAANKTTLENVLMTSEEEIKTTNPVATEEYGVVSSNLQSSTAGPQTQTVNSQGALPGMVWQNRDVYLQGPIWAKIPHTDGNFHPSPLMGGFGLKHPPPQILIKNTPVPANPPEVFTPAKFASFITQYSTGQVSVEIEWELQKENSKRWNPEIQYTSNYAKSNNVEFAVNNEGVYTEPRPIGTRYLTRNL

SEQ ID NO: 155 - protein, 728 aa, Artificial Sequence
  Description of Artificial Sequence: Synthetic polypeptide
MAADGYLPDWLEGNLSEGIREWWDLKPGAPKPKANQQKQDDGRGLVLPGYRYLGPFNGLDKGEPVNEADAAALEHDKAYDKQLEQGDNPYLKYNHADAEFQERLQEDTSFGGNLGRAVFQAKKRVLEPLGLVEEGAKTAPGKKRPIESPDSSTGIGKNGQPPAKKKLNFGQTGDSESVPDPQPLGEPPAAPSGLGSGTMAAGGGAPMADNNEGADGVGNASGNWHCDSTWLGDRVITTSTRTWALPTYNNHLYKQISSQSGATNDNHFFGYSTPWGYFDFNRFHCHFSPRDWQRLINNNWGFRPRKLRFKLFNIQVKEVTTNDGVTTIANNLTSTIQVFSDSEYQLPYVLGSAHQGCLPPFPADVFMIPQYGYLTLNNGSQSVGRSSFYCLEYFPSQMLRTGDNFEFSYTFEEVPFHSSYAHSQSLDRLMNPLIDQYLYYLARTQSTTGSTRELQFHQAGPNTMAEQSKNWLPGPCYRQQRLSKNIDSNNNSNFAWTGATKYHLNGRNSLTNPGVAMATNKDDEDQFFPINGVLVFGKTGAANKTTLENVLMTSEEEIKTTNPVATEEYGVVSSNLQSSTAGPQTQTVNSQGALPGMVWQNRDVYLQGPIWAKIPHTDGNFHPSPLMGGFGLKHPPPQILIKNTPVPANPPEVFTPAKFASFITQYSTGQVSVEIEWELQKENSKRWNPEIQYTSNYAKSNNVEFAVNNEGVYTEPRPIGTRYLTRNL

SEQ ID NO: 156 - DNA, 3106 bp, Artificial Sequence
  Description of Artificial Sequence: Synthetic polynucleotide
gcggccgcgaattcgcccttcgcagagaccaaagttcaactgaaacgaatcagccggtttattgattaacaagtaattacaggttacgggtgaggtaacgggtgccaatggggcgaggctcagtataaaccccttcgttgttgacagcaaattccacattattagacttggcataatttgaggtgtactgaatctctggattccagcgtttgctgttttctttctgcagttcccactcgatctccacgctgacctggccggtgctgtactgcgtgataaatgaggcaaacttggcaggagtaaacacctctggaggattagcaggtaccggggtgtttttgatgagaatttgaggaggcgggtgtttgagtccaaatccgcccatcaggggagacgggtgaaagttgccgtccgtgtgaggaattttggcccagatgggaccctgcaggtacacgtcccggttctgccagaccatgccgggcagagccccctggctgttgacagtctgtgtctggggtccggccgtagacgattgcaggttgctggagaccacaccgtattcttctgtagccacgggattggtggttttgatctcctcctcgctggtcattagcacgttttccagcgttgtcttgttggcagcccccgttttgccaaaaaccagcactccgttgatgggaaagaactggtcctcgtcgtccttgttggtggccatggctacgcccgggttggttaatgaatttctaccattcagatggtatttagtggccccggtccaggcaaagttactgttgttgttgctgtctatgttttttgacagtctctgctgccgataacagggtccgggcagccagttctttgattgctcggccatggtgttgggcccagcctgatggaactgcagctcccttgtggaccccgtagtgctctgggtccgggccaggtagtacaggtactggtcgatgaggggattcatcagccggtccaggctctggctgtgcgcatagctgctgtggaaaggcacttcctcaaaggtgtagctgaattcaaagttatcgcccgttctcagcatctgagaaggaaagtactccaggcagtagaaggaggaacgtcccacagactgactgccgttgtttagagtcagatatccgtactgaggaatcatgaacacgtccgcagggaacggagggaggcagccctggtgcgcagagccgaggacgtacggcagttggtactccgagtccgagaagacctgaatcgtgctggtaaggttattagcgatggtcgtaacgccgtcgttcgtcgtgacctccttgacctggatgttgaacaacttgaaccgcagctttctgggccggaatccccagttgttgttgatgagtcgctgccagtcacgtggtgagaagtggcagtggaatctgttgaagtcaaaatagccccagggggtgctgtagccgaagaagtggttgtcgttggtagccccgctctgacttgatatctgcttgtagaggtggttgttgtaggtgggcagggcccaggtgcgggtgctggtggtgatgactctgtcgcccagccatgtggaatcgcaatgccaatttccggaggcattacccactccgtcggcgccttcgttattgtctgccattggtgcgccaccgcctgcagccattgtaccagatcccagacctgagggcgcggcgggaggttctccgagaggttgggggtcgggcactgactctgagtcgccagtctgcccaaagttgagcttctttttagcgggcggctggccgttcttgccgatgcccgtggaggagtcgggggattctatgggtctcttctttccaggagccgtcttagcgccttcctcaaccagaccgagaggttcgagaacccgcttcttggcctggaagactgctcgcccgaggttgcccccaaaagacgtatcttcttgaagacgctcctgaaactcggcgtcggcgtggttgtacttgaggtacgggttgtccccctgctcgagctgcttgtcgtaggccttgtcgtgctcgagggccgcggcgtctgcctcgttgaccggctctcccttgtcgagtccgttgaagggtccgaggtacctgtagccaggaagcaccagaccccggccgtcgtcctgcttttgctggttggctttgggtttcggggctccaggtttcaagtcccaccactcgcgaatgccctcagagaggttgccctcgagccaatctggaagataaccatcggcagccatacctggtttaagtcatttattgctcagaaacacagtcatccaggtccacgttggccagatcgcaggccgagcaagcaatctcgggagcccgccccagcagatgatgaatggcacagagtttccgatacgtcctctttctgacgaccggttgagattctgacacgccggggaaacattctgaacagtctctggtcccgtgcgtgaagcaaatgttgaaattctgattcattctctcgcatgtcttgcaggggaacagcatctgaagcatgcccgcgtgacgagaacatttgttttggtacctgtcggcaaagtccaccggagctccttccgcgtctgacgtcgatggatccgcgactgaggggcaggcccgcttgggctcgcttttatccgcgtcatcgggggcgggtctcttgttggctccaccctttctgacgtagaactcatacgccacctcggtcacgtgatcctgcgcccagcggaagaactctttgacttcctgctttgtcaccttgccaaagtcatgctccagacggcgggtgagttcaaatttgaacatccggtcttgtaacggctgctggtgctcgaaggtggtgctgttcccgtcaatcacggcgcacatgttggtgttggaagtgacgatcacgggggtgggatcgatctgggcggacgacttgcacttttggtccacgcgcaccttgctgccgccgagaatggccttggcggactccacgaccttggccgtcatcctgccctcctcccaccagatcaccatcttgtcgacgcaatcgttgaagggaaagttctcattggtccagttgacgcagccgtagaaagggcgaattc

SEQ ID NO: 157 - protein, 728 aa, Artificial Sequence
  Description of Artificial Sequence: Synthetic polypeptide
MAADGYLPDWLEDNLSEGIREWWDLKPGAPKPKANQQKQDDGRGLVLPGYKYLGPFNGLDKGEPVNEADAAALEHDKAYDKQLEQGDNPYLKYNHADAEFQERLQEDTSFGGNLGRAVFQAKKRVLEPLGLVEEGAKTAPGKKRPIESPDSSTGIGKKGQQPAKKKLNFGQTGDSESVPDPQPLGEPPAAPSGLGSGTMAAGGGAPMADNNEGADGVGNASGNWHCDSTWLGDRVITTSTRTWALPTYNNHLYKQISSQSGATNDNHFFGYSTPWGYFDFNRFHCHFSPRDWQRLINNNWGFRPRKLRFKLFNIQVKEVTTNDGVTTIANNLTSTIQVFSDSEYQLPYVLGSAHQGCLPPFPADVFMIPQYGYLTLNNGSQSMGRSSFYCLEYFPSQMLRTGNNFEFSYTFEEVPFHSSYAHSQSLDRLMNPLIDQYLYYLARTQSTTGSTRELQFHQAGPNTMAEQSKNWLPGPCYRQQRLSKNIDSNNNSNFAWTGATKYHLNGRNSLTNPGVAMATNKDDEGQFFPINGVLVFGKTGAANKTTLENVLMTSEEEIKTTNPVATEEYGVVSSNLQSSTAGPQTQTVNSQGALPGMVWQNRDVYLQGPIWAKIPHTDGNFHPSPLMGGFGLKHPPPQILIKNTPVPANPPGVFTPALFASFITQYSTGQVSVEIEWELQKENSKRWNPEIQYTSNYAKSNNVEFAVNNEGVYTEPRPIGTRYLTRNL

SEQ ID NO: 158 - DNA, 3098 bp, Artificial Sequence
  Description of Artificial Sequence: Synthetic polynucleotide
gaattcgcccttcgcagagaccaaagttcaactgaaacgaatcaaccggtttattgattaacaagtaattacaggttacgggtgaggtaacgggtgccaatggggcgaggctcagtataaaccccttcgttgttgacagcaaattccacattattagacttggcataatttgaggtgtactgaatctctggattccagcgtttgctgttttctttctgcagttcccactcgatctccacgctgacctggccggtgctgtactgcgtgataaatgaggcaaactaggcaggagtaaacacccctggaggattagcaggtaccggggtgtttttgatgagaatttgaggaggcgggtgtttgagtccaaatccgcccatcaggggagacgggtgaaagttgccgtccgtgtgaggaattttggcccagatgggaccctgcaggtacacgtcccggttctgccagaccatgccgggcagagccccctggctgttgacagtctgtgtctggggtccggccgtagacgattgcaggttgctggagaccacaccgtattcttctgtagccacgggattggtggttttgatctcctcctcgctggtcattagcacgttttccagcgttgtcttgttggcagcccccgttttgccaaaaaccagcactccgttgatgggaaagaactggccctcgtcgtccttgttggtggccatggctacgcccgggttggttaatgaatttctaccattcagatggtatttagtggccccggtccaggcaaagttactgttgttgttgctgtctatgttttttgacagtctctgctgccgataacagggtccgggcagccagttctttgattgctcggccatggtgttgggcccagcctgatggaactgcagctcccttgtggaccccgtagtgctctgggtccgggccaggtagtacaggtactggtcgatgaggggattcatcagccggtccaggctctggctgtgcgcatagctgctgtggaaaggcacttcctcaaaggtgtagctgaattcaaagttattgcccgttctcagcatctgagaaggaaagtactccaggcagtagaaggaggaacgtcccatagactgactgccgttgtttagagtcagatatccgtactgaggaatcatgaacacgtccgcagggaacggagggaggcagccctggtgcgcagagccgaggacgtacggcagttggtactccgagtccgagaagacctgaatcgtgctggtaaggttattagcgatggtcgtaacgccgtcgttcgtcgtgacctccttgacctggatgttgaacaacttgaaccgcagctttctgggccggaatccccagttgttgttgatgagtcgctgccagtcacgtggtgagaagtggcagtggaatctgttgaagtcaaaatagccccagggggtgctgtagccgaagaagtggttgtcgttggtagccccgctctgacttgatatctgcttgtagaggtggttgttgtaggtgggcagggcccaggtgcgggtgctggtggtgatgactctgtcgcccagccatgtggaatcgcaatgccaatttccggaggcattacccactccgtcggcgccttcgttattgtctgccattggtgcgccaccgcctgcagccattgtaccagatcccagacctgagggcgcggcgggaggttctccgagaggttgggggtcgggcactgactctgagtcgccagtctgcccaaagttgagcttctttttagcgggctgctggcctttcttgccgatgcccgtggaggagtcgggggattctatgggtctcttctttccaggagccgtcttagcgccttcctcaaccagaccgagaggttcgagaacccgcttcttggcctggaagactgctcgcccgaggttgcccccaaaagacgtatcttcttgaagacgctcctgaaactcagcgtcggcgtggttgtacttgaggtacgggttgtccccctgctcgagctgcttgtcgtaggccttgtcgtgctcgagggccgcggcgtctgcctcgttgaccggctctcccttgtcgagtccgttgaagggtccgaggtacttgtagccaggaagcaccagaccccggccgtcgtcctgcttttgctggttggctttgggtttcggggctccaggtttcaagtcccaccactcgcgaatgccctcagagaggttgtcctcgagccaatctggaagataaccatcggcagccatacctggtttaagtcatttattgctcagaaacacagtcatccaggtccacgttgaccagatcgcaggccgagcaagcaatctcgggagcccgccccagcagatgatgaatggcacagagtttccgatacgtcctctttctgacgaccggttgagattctgacacgccggggaaacattctgaacagtctctggtcccgtgcgtgaagcaaatgttgaaattctgattcattctctcgcatgtcttgcagggaaacagcatctgaagcatgcccgcgtgacgagaacatttgttttggtacctgtcggcaaagtccaccggagctccttccgcgtctgacgtcgatggatccgcgactgaggggcaggcccgcttgggctcgcttttatccgcgtcatcgggggcgggcctcttgttggctccaccctttctgacgtagaactcatgcgccacctcggtcacgtgatcctgcgcccagcggaagaactctttgacttcctgctttgtcaccttgccaaagtcctgctccagacggcgggtgagttcaaatttgaacatccggtcttgtaacggctgctggtgctcgaaggtggtgctgttcccgtcaatcacggcgcacatgttggtgttggaagtgacgatcacgggggtgggatcgatctgggcggacgacttgcacttttggtccacgcgcaccttgctgccgccgagaatggccttggcggactccacgaccttggccgtcatcttgccctcctcccaccagatcaccatcttgtcgacgcaatcgttgaagggaaagttctcattggtccagttgacgcagccgtagaaagggcgaattc

SEQ ID NO: 159 - DNA, 2187 bp, Artificial Sequence
  Description of Artificial Sequence: Synthetic polynucleotide
atggctgccgatggttatcttccagattggctcgagggcaacctctctgagggcattcgcgagtggtgggacttgaaacctggagccccgaaacccaaagccaaccagcaaaagcaggacgacggccggggtctggtgcttcctggctacaggtacctcggacccttcaacggactcgacaagggagagccggtcaacgaggcagacgccgcggccctcgagcacgacaaggcctacgacaagcagctcgagcagggggacaacccgtacctcaagtacaaccacgccgacgccgagtttcaggagcgtcttcaagaagatacgtcttttgggggcaacctcgggcgagcagtcttccaggccaagaagcgggttctcgaacctctcggtctggttgaggaaggcgctaagacggctcctggaaagaagagacccatagaatcccccgactcctccacgggcatcggcaagaacggccagccgcccgctaaaaagaagctcaactttgggcagactggcgactcagagtcagtgcccgacccccaacctctcggagaacctcccgccgcgccctcaggtctgggatctggtacaatggctgcaggcggtggcgcaccaatggcagacaataacgaaggcgccgacggagtgggtaatgcctccggaaattggcattgcgattccacatggctgggcgacagagtcatcaccaccagcacccgcacctgggccctgcccacctacaacaaccacctctacaagcagatatcaagtcagagcggggctaccaacgacaaccacttcttcggctacagcaccccctggggctattttgacttcaacagattccactgccacttctcaccacgtgactggcagcgactcatcaacaacaactggggattccggcccagaaagctgcggttcaagttgttcaacatccaggtcaaggaggtcacgacgaacgacggcgttacgaccatcgctaataaccttaccagcacgattcaggtcttctcggactcggagtaccaactgccgtacgtcctcggctctgcgcaccagggctgcctccctccgttccctgcggacgtgttcatgattcctcagtacggatatctgactctaaacaacggcagtcagtctgtgggacgttcctccttctactgcctggagtactttccttctcagatgctgagaacgggcgataactttgaattcagctacacctttgaggaagtgcctttccacagcagctatgcgcacagccagagcctggaccggctgatgaatcccctcatcgaccagtacctgtactacctggcccggacccagagcactacggggtccacaagggagctgcagttccatcaggctgggcccaacaccatggccgagcaatcaaagaactggctgcccggaccctgttatcggcagcagagactgtcaaaaaacatagacagcaacaacaacagtaactttgcctggaccggggccactaaataccatctgaatggtagaaattcattaaccaacccgggcgtagccatggccaccaacaaggacgacgaggaccagttctttcccatcaacggagtgctggtttttggcaaaacgggggctgccaacaagacaacgctggaaaacgtgctaatgaccagcgaggaggagatcaaaaccaccaatcccgtggctacagaagaatacggtgtggtctccagcaacctgcaatcgtctacggccggaccccagacacagactgtcaacagccagggggctctgcccggcatggtctggcagaaccgggacgtgtacctgcagggtcccatctgggccaaaattcctcacacggacggcaactttcacccgtctcccctgatgggcggatttggactcaaacacccgcctcctcaaattctcatcaaaaacaccccggtacctgctaatcctccagaggtgtttactcctgccaagtttgcctcatttatcacgcagtacagcaccggccaggtcagcgtggagatcgagtgggaactgcagaaagaaaacagcaaacgctggaatccagagattcagtacacctcaaattatgccaagtctaataatgtggaatttgctgtcaacaacgaaggggtttatactgagcctcgccccattggcacccgttacctcacccgtaacctgtaa

SEQ ID NO: 160 - protein, 728 aa, Artificial Sequence; identical to SEQ ID NO: 155
  Description of Artificial Sequence: Synthetic polypeptide

SEQ ID NO: 161 - protein, 728 aa, Artificial Sequence
  Description of Artificial Sequence: Synthetic polypeptide
MAADGYLPDWLEDNLSEGIREWWDLKPGAPKPKANQQKQDDGRGLVLPGYRYLGPFNGLDKGEPVNEADAAALEHDKAYDKQLEQGDNPYLKYNHADAEFQERLQEDTSFGGNLGRAVFQAKKRVLEPLGLVEEGAKTAPGKKRPIESPDSSTGIGKNGQPPAKKKLNFGQTGDSESVPDPQPLGEPPAAPSGLGSGTMAAGGGAPMADNNEGADGVGNASGNWHCDSTWLGDRVITTSTRTWALPTYNNHLYKQISSQSGATNDNHFFGYSTPWGYFDFNRFHCHFSPRDWQRLINNNWGFRPRKLRFKLFNIQVKEVTTNDGVTTIANNLTSTIQVFSDSEYQLPYVLGSAHQGCLPPFPADVFMIPQYGYLTLNNGSQSVGRSSFYCLEYFPSQMLRTGDNFEFSYTFEEVPFHSSYAHSQSLDRLMNPLIDQYLYYLARTQSTTGSTRELQFHQAGPNTMAEQSKNWLPGPCYRQQRLSKNIDSNNNSNFAWTGATKYHLNGRNSLTNPGVAMATNKDDEDQFFPINGVLVFGKTGAANKTTLENVLMTSEEEIKTTNPVATEEYGVVSSNLQSSTAGPQTQTVNSQGALPGMVWQNRDVYLQGPIWAKIPHTDGNFHPSPLMGGFGLKHPPPQILIKNTPVPANPPEVFTPAKFASFITQYSTGQVSVEIEWELQKENSKRWNPEIQYTSNYAKSNNVEFAVNNEGVYTEPRPIGTRYLTRNL

SEQ ID NO: 162 - protein, 728 aa, Artificial Sequence; identical to SEQ ID NO: 154
  Description of Artificial Sequence: Synthetic polypeptide

SEQ ID NO: 163 - protein, 728 aa, Artificial Sequence
  Description of Artificial Sequence: Synthetic polypeptide
MAADGYLPDWLEDNLSEGIREWWDLKPGAPKPKANQQKQDDGRGLVLPGYKYLGPFNGLDKGEPVNEADAAALEHDKAYDKQLEQGDNPYLKYNHADAEFQERLQEDTSFGGNLGRAVFQAKKRVLEPLGLVEEGAKTAPGKKRPIESPDSSTGIGKNGQPPAKKKLNFGQTGDSESVPDPQPLGEPPAAPSGLGSGTMAAGGGAPMADNNEGADGVGNASGNWHCDSTWLGDRVITTSTRTWALPTYNNHLYKQISSQSGATNDNHFFGYSTPWGYFDFNRFHCHFSPRDWQRLINNNWGFRPRKLRFKLFNIQVKEVTTNDGVTTIANNLTSTIQVFSDSEYQLPYVLGSAHQGCLPPFPADVFMIPQYGYLTLNNGSQSVGRSSFYCLEYFPSQMLRTGNNFEFSYTFEEVPFHSSYAHSQSLDRLMNPLIDQYLYYLARTQSTTGSTRELQFHQAGPNTMAEQSKNWLPGPCYRQQRLSKNIDSNNNSNFAWTGATKYHLNGRNSLTNPGVAMATNKDDEDQFFPINGVLVFGKTGAANKTTLENVLMTSEEEIKTTNPVATEEYGVVSSNLQSSTAGPQTQTVNSQGALPGMVWQNRDVYLQGPIWAKIPHTDGNFHPSPLMGGFGLKHPPPQILIKNTPVPANPPEVFTPAKFASFITQYSTGQVSVEIEWELQKENSKRWNPEIQYTSNYAKSNNVEFAVNNEGVYTEPRPIGTRYLTRNL

SEQ ID NO: 164 - protein, 728 aa, Artificial Sequence
  Description of Artificial Sequence: Synthetic polypeptide
MAADGYLPDWLEDNLSEGIREWWDLKPGAPKPKANQQKQDDGRGLVLPGYKYLGPFNGLDKGEPVNEADAAALEHDKAYDKQLEQGDNPYLKYNHADAEFQERLQEDTSFGGNLGRAVFQAKKRVLEPLGLVEEGAKTAPGKKRPIESPDSSTGIGKKGQQPAKKKLNFGQTGDSESVPDPQPLGEPPAAPSGLGSGTMAAGGGAPMADNNEGADGVGNASGNWHCDSTWLGDRVITTSTRTWALPTYNNHLYKQISSQSGATNDNHFFGYSTPWGYFDFNRFHCHFSPRDWQRLINNNWGFRPRKLRFKLFNIQVKEVTTNDGVTTIANNLTSTIQVFSDSEYQLPYVLGSAHQGCLPPFPADVFMIPQYGYLTLNNGSQSVGRSSFYCLEYFPSQMLRTGNNFEFSYTFEEVPFHSSYAHSQSLDRLMNPLIDQYLYYLARTQSTTGSTRELQFHQAGPNTMAEQSKNWLPGPCYRQQRLSKNIDSNNNSNFAWTGATKYHLNGRNSLTNPGVAMATNKDDEDQFFPINGVLVFGKTGAANKTTLENVLMTSEEEIKTTNPVATEEYGVVSSNLQSSTAGPQTQTVNSQGALPGMVWQNRDVYLQGPIWAKIPHTDGNFHPSPLMGGFGLKHPPPQILIKNTPVPANPPEVFTPAKFASFITQYSTGQVSVEIEWELQKENSKRWNPEIQYTSNYAKSNNVEFAVNNEGVYTEPRPIGTRYLTRNL

SEQ ID NO: 165 - DNA, 2215 bp, Artificial Sequence
  Description of Artificial Sequence: Synthetic polynucleotide
atggctgccgatggttatcttccagattggctcgaggacactctctctgaaggaataagacagtggtggaagctcaaacctggcccaccaccaccaaagcccgcagagcggcataaggacgacagcaggggtcttgtgcttcctgggtacaagtacctcggacccttcaacggactcgacaagggagagccggtcaacgaggcagacgccgcggccctcgagcacgacaaagcctacgaccggcagctcgacagcggagacaacccgtacctcaagtacaaccacgccgacgccgagttccaggagcggctcaaagaagatacgtcttttgggggcaacctcgggcgagcagtcttccaggccaaaaagaggcttcttgaacctcttggtctggttgaggaagcggctaagacggctcctggaaagaagaggcctgtagagcactctcctgtggagccagactcctcctcgggaaccggaaaggcgggccagcagcctgcaagaaaaagattgaattttggtcagactggagacgcagactcagtcccagaccctcaaccaatcggagaacctcccgcagccccctcaggtgtgggatctcttacaatggctgcaggcggtggcgcaccaatggcagacaataacgagggcgccgacggagtgggtaattcctcgggaaattggcattgcgattccacatggatgggcgacagagtcatcaccaccagcacccgaacctgggccctgcccacctacaacaaccacctctacaagcaaatctccaacagcacatctggaggatcttcaaatgacaacgcctacttcggctacagcaccccctgggggtattttgactttaacagattccactgccacttttcaccacgtgactggcagcgactcatcaacaacaactggggattccggcccaagagactcagcttcaagctcttcaacatccaggtcaaggaggtcacgcagaatgaaggcaccaagaccatcgccaataacctcaccagcaccatccaggtgtttacggactcggagtaccagctgccgtacgttctcggctctgcccaccagggctgcctgcctccgttcccggcggacgtgttcatgattccccagtacggctacctaacactcaacaacggtagtcaggccgtgggacgctcctccttctactgcctggaatactttccttcgcagatgctgagaaccggcaacaacttccagtttacttacaccttcgaggacgtgcctttccacagcagctacgcccacagccagagcttggaccggctgatgaatcctctgattgaccagtacctgtactacttgtctcggactcaaacaacaggaggcacgacaaatacgcagactctgggcttcagccaaggtgggcctaatacaatggccaatcaggcaaagaactggctgccaggaccctgttaccgccagcagcgagtatcaaagacatctgcggataacaacaacagtgaatactcgtggactggagctaccaagtaccacctcaatggcagagactctctggtgaatccgggcccggccatggcaagccacaaggacgatgaagaaaagtttttttcctcagagcggggttctcatctttgggaagcaaggctcagagaaaacaaatgtggacattgaaaaggtcatgattacagacgaagaggaaatcaggacaaccaatcccgtggctacggagcagtatggttctgtatctaccaacctccagagaggcaacagacaagcagctaccgcagatgtcaacacacaaggcgttcttccaggcatggtctggcaggacagagatgtgtaccttcaggggcccatctgggcaaagattccacacacggacggacattttcacccctctcccctcatgggtggattcggacttaaacaccctccgcctcagatcctgatcaagaacacgcctgtacctgcggatcctccgaccaccttcaaccagtcaaagctgaactctttcatcacccagtattctactggccaagtcagcgtggagatcgagtgggagctgcagaaggaaaacagcaagcgctggaaccccgagatccagtacacctccaactactacaaatctacaagtgtggactttgctgttaatacagaaggcgtgtactctgaaccccgccccattggcacccgttacctcacccgtaatctgtaa

SEQ ID NO: 166 - protein, 737 aa, Artificial Sequence
  Description of Artificial Sequence: Synthetic polypeptide
MAADGYLPDWLEDTLSEGIRQWWKLKPGPPPPKPAERHKDDSRGLVLPGYKYLGPFNGLDKGEPVNEADAAALEHDKAYDRQLDSGDNPYLKYNHADAEFQERLKEDTSFGGNLGRAVFQAKKRLLEPLGLVEEAAKTAPGKKRPVEHSPVEPDSSSGTGKAGQQPARKRLNFGQTGDADSVPDPQPIGEPPAAPSGVGSLTMAAGGGAPMADNNEGADGVGNSSGNWHCDSTWMGDRVITTSTRTWALPTYNNHLYKQISNSTSGGSSNDNAYFGYSTPWGYFDFNRFHCHFSPRDWQRLINNNWGFRPKRLSFKLFNIQVKEVTQNEGTKTIANNLTSTIQVFTDSEYQLPYVLGSAHQGCLPPFPADVFMIPQYGYLTLNNGSQAVGRSSFYCLEYFPSQMLKTGNNFQFTYTFEDVPFHSSYAHSQSLDRLMNPLIDQYLYYLSRTQTTGGTTNTQTLGFSQGGPNTMANQAKNWLPGPCYRQQRVSKTSADNNNSEYSWTGATKYHLNGRDSLVNPGPAMASHKDDEEKFFPQSGVLIFGKQGSEKTNVDIEKVMITDEEEIRTTNPVATEQYGSVSTNLQRGNRQAATADVNTQGVLPGMVWQDRDVYLQGPIWAKIPHTDGHFHPSPLMGGFGLKHPPPQILIKNTPVPADPPTTFNQSKLNSFITQYSTGQVSVEIEWELQKENSKRWNPEIQYTSNYYKSTSVDFAVNTEGVYSEPRPIGTRYLTRNL

SEQ ID NO: 167 - protein, 737 aa, Artificial Sequence
  Description of Artificial Sequence: Synthetic polypeptide
MAADGYLPDWLEDTLSEGIRQWWKLKPGPPPPKPAERHKDDSRGLVLPGYKYLGPFNGLDKGEPVNEADAAALEHDKAYDRQLDSGDNPYLKYNHADAEFQERLKEDTSFGGNLGRAVFQAKKRLLEPLGLVEEAAKTAPGKKRPVEHSPVEPDSSSGTGKAGQQPARKRLNFGQTGDADSVPDPQPIGEPPAAPSGVGSLTMAAGGGAPMADNNEGADGVGNSSGNWHCDSTWMGDRVITTSTRTWALPTYNNHLYKQISNSTSGGSSNDNAYFGYSTPWGYFDFNRFHCHFSPRDWQRLINNNWGFRPKRLSFKLFNIQVKEVTQNEGTKTIANNLTSTIQVFTDSEYQLPYVLGSAHQGCLPPFPADVFMIPQYGYLTLNNGSQAVGRSSFYCLEYFPSQMLKTGNNFQFTYTFEDVPFHSSYAHSQSLDRLMNPLIDQYLYYLSRTQTTGGTTNTQTLGFSQGGPNTMANQAKNWLPGPCYRQQRVSKTSADNNNSEYSWTGATKYHLNGRDSLVNPGPAMASHKDDEEKFFPQSGVLIFGKQGSEKTNVDIEKVMITDEEEIRTTNPVATEQYGSVSTNLQQGNTQAATADVNTQGVLPGMVWQDRDVYLQGPIWAKIPHTDGHFHPSPLMGGFGLKHPPPQILIKNTPVPADPPTTFNQSKLNSFITQYSTGQVSVEIEWELQKENSKRWNPEIQYTSNYYKSTSVDFAVNTEGVYSEPRPIGTRYLTRNL

SEQ ID NO: 168 - protein, 737 aa, Artificial Sequence
  Description of Artificial Sequence: Synthetic polypeptide
MAADGYLPDWLEDTLSEGIRQWWKLKPGPPPPKPAERHKDDSRGLVLPGYKYLGPFNGLDKGEPVNEADAAALEHDKAYDRQLDSGDNPYLKYNHADAEFQERLKEDTSFGGNLGRAVFQAKKRLLEPLGLVEEAAKTAPGKKRPVEHSPVEPDSSSGTGKAGQQPARKRLNFGQTGDADSVPDPQPIGEPPAAPSGVGSLTMAAGGGAPMADNNEGADGVGNSSGNWHCDSTWMGDRVITTSTRTWALPTYNNHLYKQISNSTSGGSSNDNAYFGYSTPWGYFDFNRFHCHFSPRDWQRLINNNWGFRPKRLSFKLFNIQVKEVTQNEGTKTIANNLTSTIQVFTDSEYQLPYVLGSAHQGCLPPFPADVFMIPQYGYLTLNNGSQAVGRSSFYCLEYFPSQMLRTGNNFQFTYTFEDVPFHSSYAHSQSLDRLMNPLIDQYLYYLSRTQTTGGTTNTQTLGFSQGGPNTMANQAKNWLPGPCYRQQRVSKTSADNNNSEYSWTGATKYHLNGRDSLVNPGPAMASHKDDEEKFFPQSGVLIFGKQGSEKTNVDIEKVMITDEEEIRTTNPVATEQYGSVSTNLQQGNTQAATADVNTQGVLPGMVWQDRDVYLQGPIWAKIPHTDGHFHPSPLMGGFGLKHPPPQILIKNTPVPADPPTTFNQSKLNSFITQYSTGQVSVEIEWELQKENSKRWNPEIQYTSNYYKSTSVDFAVNTEGVYSEPRPIGTRYLTRNL

SEQ ID NO: 169 - protein, 729 aa, Artificial Sequence
  Description of Artificial Sequence: Synthetic polypeptide
MAADGYLPDWLEDNLSEGIREWWDLKPGAPKPKANQQKQDDGRGLVLPGYKYLGPFNGLDKGEPVNAADAAALEHDKAYDQQLKAGDNPYLRYNHADAEFQERLQEDTSFGGNLGRAVFQAKKRVLEPLGLVEEGAKTAPGKKRPIDSPDSSTGIGKKGQQPAKKKLNFGQTGDSESVPDPQPLGEPPAAPSSVGSGTMAAGGGAPTADNNEGADGVGNASGNWHCDSTWLGDRVITTSTRTWALPTYNNHLYKQISSSSSGATNDNHYFGYSTPWGYFDFNRFHCHFSPRDWQRLINNNWGFRPKKLRFKLFNIQVKEVTTNDGVTTIANNLTSTVQVFSDSEYQLPYVLGSAHQGCLPPFPADVFMIPQYGYLTLNNGSQSVGRSSFYCLEYFPSQMLRTGNNFEFSYSFEDVPFHSSYAHSQSLDRLMNPLIDQYLYYLARTQSTTGSTRELQFHQAGPNTMAEQSKNWLPGPCYRQQRLSKNLDFNNNSNFAWTAATKYHLNGRNSLTNPGIPMATNKDDEDQFFPINGVLVFGKTGAANKTTLENVLMTSEEEIKTTNPVATEEYGVVSSNLQSSTAGPQSQTINSQGALPGMVWQNRDVYLQGPIWAKIPHTDGNFHPSPLMGGFGLEHPPPQILIKNTPVPANPPEVFTPAKFASFITQYSTGQVSVEIEWELQKENSKRWNPEIQYTSNYAKSNNVEFAVNPDGVYTEPRPIGTRYLTRNL

SEQ ID NO: 170 - DNA, 3075 bp, Artificial Sequence
  Description of Artificial Sequence: Synthetic polynucleotide
tgagaactttcctttcaacgattgcgtcggacaagatggtgatctggtgggaggaggggaagatgaccgccaaggtcgtggagtcggccaaagccattcttggaggaagcaaggtgcgtgtggaccagaaatgcaagtcctcggcccagatagacccgactcccgtgatcgtcacctccaacaccaacatgtgcgccgtgattgacgggaactcaacgaccttcgagcaccagcagccgttgcaagaccggatgttcaaatttgaacttacccgccgtctggatcatgactttggaaaggtcaccaagcaggaagtgaaagactttttccggtgggcaaaggatcacgtggttgaggtggagcatgaattctacgtcaaaaagggtggagctaagaaaagacccgcccccagtgacgcagatataagtgagcccaaacgggcgcgcgagtcagttgcgcagccatcaacgtcagacgcggaagcttcgatcaactacgcggacaggtaccaaaaacaaatgttctcgtcacgtgggcatgaatctgatgctgtttccctgcagacaatgcgagagaatgaatcagaattcaaatatctgcttcactcacggacagaaagactgtttagagtgctttcccgtgtcagaatctcaacccgtttctgtcgtcaaaaaggcgtatcagaaactgtgctacattcatcatatcatgggaaaggtgccagacgcttgcactgcctgcgatctggtcaatgtggatttggatgactgcatctctgaacaataaatgatttaaatcaggtatggctgccgatggttatcctccagattggctcgaggacactctctctgaagggataagacagtggtggaagctcaaacctggcccaccaccaccaaagcccgcagagcggcataaggacgacagcaggggtcttgtgcttcctgggtacaagtacctcggacccttcaacggactcgacaagggggagccggtcaacgaggcagacgccgcggccctcgagcacgacaaggcctacgaccggcagctcgacagcggagacaacccgtacctcaagtacaaccacgccgacgcagagtttcaggagcgccttaaagaagatacgtcttttgggggcaacctcggacgagcagtcttccaggcgaaaaagagggttcttgaacctctgggcctggttgaggaacctgttaagacggctccgggaaaaaagaggccggtagagcactctcctgtggagccagactcctcctcgggaaccggaaaagcgggccagcggcctgcaagaaaaagattaaattttggtcagactggagacgcagactccgtacctgacccccagcctctcggacagccaccagcagccccctctggtctgggatctactacaatggctacaggcagtggcgcaccaatggcagacaataacgagggtgccgatggagtgggtaattcctcaggaaattggcattgcgattcccaatggctgggcgacagagtcatcaccaccagcacccgaacctgggccctgcccacatacaacaaccacctctacaagcaaatctccagccaatcaggagccagcaacgacaaccactactttggctacagcaccccctgggggtattttgacttcaacagattccactgccacttttcaccacgtgactggcaaagactcatcaacaacaactggggattccggcccaaaagactcaacttcaagctctttaatattcaagtcaaagaggtcacgcagaatgacggtacgacgacgattgccaataaccttaccagcacggttcaggtgtttactgactcggagtaccagctcccgtacgtcctgggctcggcgcatcaaggatgcctcccgccgtttccagcggacgtcttcatggtcccacagtatggatacctcaccctgaacaacgggagtcaggcggtaggacgctcttccttttactgcctggagtactttccttctcagatgctgcgtactggaaacaactttcagttcagctacacttttgaagacgtgcctttccacagcagctacgctcacagccagagtctggatcggctgatgaatcctctgatcgaccagtacctgtattatctgaacaagacacaaacaaatagtggaactcttcagcagtctcggctactgtttagccaagctggaccaaccaacatgtctcttcaagctaaaaactggctgcctggaccttgctacagacagcagcgtctgtcaaaacaggcaaacgacaacaacaacagcaactttccctggactgcagctacaaagtatcatctaaatggccgggactcgttggttaatccaggaccagctatggccagtcacaaggatgacgaagaaaagtttttccccatgcatggaaccctgatatttggtaaacaaggaacaaatgccaacgacgcggatttggaaaatgtcatgattacagatgaagaagaaatcagggccaccaatcccgtggctacggagcagtacgggactgtgtcaaataatttgcaaaactcaaacactggtccaactactggaactgtcaatcgccaaggagcgttacctggtatggtgtggcaggatcgagacgtgtacctgcagggacccatttgggccaagattcctcacaccgatggacactttcatccttctccactgatgggaggttttggactcaaacacccgcctcctcagatcatgatcaaaaacactcccgttccagccaatcctcccacaaacttcagttctgccaagtttgcttctttcatcacacagtattccacgggacaggtcagcgtggagatcgagtgggagctgcagaaggagaacagcaaacgctggaatcccgaaattcagtacacttccaactacaacaagtctgttaatgtggactttactgtggacactaatggtgtgtattcagagcctcgccccattggcaccagatacctgactcgtaatctgtaattgcttgttaatcaataaaccgtttaattcgtttcagttgaactttggtctctgcgaagggcgaa

SEQ ID NO: 171 - DNA, 3142 bp, Artificial Sequence
  Description of Artificial Sequence: Synthetic polynucleotide
aaaacgacgggccagtgattgtaatacgactcactatagggcgaaattgaaattagcggccgcgaattcgcctttcgcagagaccaaagttcaactgaaacgaattaaacggtttattgattaacaagcaattacagattacgagtcaggtatctggtgccaatggggcgaggctctgaatacacaccattagtgtccacagtaaagtccacattaacagacttgttgtagttggaagtgtactgaatttcgggattccagcgtttgctgttctccttctgcagctcccactcgatctccacgctgacctgtcccgtggaatactgtgtgatgaaagaagcaaacttggcagaactgaagtttgtgggaggattggctggaacgggagtgtttttgatcatgatctgaggaggcgggtgtttgagtccaaaacctcccatcagtggagaaggatgaaagtgtccatcggtgtgaggaatcttggcccaaatgggtccctgcaggtacacgtctcgatcctgccacaccataccaggtaacgctccttggtgattgacagttccagtagttggaccagtgtttgagttttgcaaattatttgacacagtcccgtactgctccgtagccacgggattggtggccctgatttcttcttcatctgtaatcatgacattttccaaatccgcgtcgttggcatttgttccttgtttaccaaatatcagggttccatgcatggggaaaaacttttcttcgtcatccttgtgactggccatagctggtcctggattaaccaacgagtcccggccatttagatgatactttgtagctgcagtccagggaaagttgctgttgttgttgtcgtttgcctgttttgacagacgctgctgtctgtagcaaggtccaggcagccagtttttagcttgaagagacatgttggttggtccagcttggctaaacagtagccgagactgctgaagagttccactatttgtttgtgtcttgttcagataatacaggtactggtcgatcagaggattcatcagccgatccagactctggctgtgagcgtagctgctgtggaaaggcacgtcttcaaaagtgtagctgaactgaaagttgtttccagtacgcagcatctgagaaggaaagtactccaggcagtaaaaggaagagcgtcctaccgcctgactcccgttgttcagggtgaggtatccatactgtgggaccatgaagacgtccgctggaaacggcgggaggcatccttgatgcgccgagcccaggacgtacgggagctggtactccgagtcagtaaacacctgaaccgtgctggtaaggttattggcaatcgtcgtcgtaccgtcattctgcgtgacctctttgacttgaatattaaagagcttgaagttgagtcttttgggccggaatccccggttgttgttgacgagtctttgccagtcacgtggtgaaaagtggcagtggaatctgttgaagtcaaaatacccccagggggtgctgtagccaaagtagtggttgtcgttgctggctcctgattggctggagatttgcttgtagaggtggttgttgtatgtgggcagggcccaggttcgggtgctggtggtgatgactctgtcgcccagccattgggaatcgcaatgccaatttcctgaggaattacccactccatcggcaccctcgttattgtctgccattggtgcgccactgcctgtagccattgtagtagatcccagaccagagggggctgctggtggctgtccgagaggctgggggtcaggtacggagtctgcgtctccagtctgaccaaaatttaatctttttcttgcaggctgctggcccgcttttccggttcccgaggaggagtctggctccacaggagagtgctctaccggcctcttttttcccggagccgtcttaacaggctcctcaaccaggcccagaggttcaagaaccctctttttcgcctggaagactgctcgtccgaggttgcccccaaaagacgtatcttctttaaggcgctcctgaaactctgcgtcggcgtggttgtacttgaggtacgggttgtctccgctgtcgagctgccggtcgtaggccttgtcgtgctcgagggccgcggcgtctgcctcgttgaccggctcccccttgtcgagtccgttgaagggtccgaggtacttgtacccaggaagcacaagacccctgctgtcgtccttatgccgctctgcgggctttggtggtggtgggccaggtttgagcttccaccactgtcttattccttcagagagagtgtcctcgagccaatctggaagataaccatcggcagccatacctgatttaaatcatttattgttcagagatgcagtcatccaaatccacattgaccagatcgcaggcagtgcaagcgtctggcacctttcccatgatatgatgaatgtagcacagtttctgatacgcctttttgacgacagaaacgggttgagattctgacacgggaaagcactctaaacagtctttctgtccgtgagtgaagcagatatttgaattctgattcattctctcgcattgtctgcagggaaacagcatcagattcatgcccacgtgacgagaacatttgttttggtacctgtccgcgtagttgatcgaagcttccgcgtctgacgtcgatggctgcgcaactgactcgcgcgcccgtttgggctcacttatatctgcgtcactgggggcgggtcttttcttagctccaccctttttgacgtagaattcatgctccacctcaaccacgtgatcctttgcccaccggaaaaagtctttcacttcctgcttggtgacctttccaaagtcatgatccagacggcgggtaagttcaaatttgaacatccggtcttgcaacggctgctggtgctcgaaggtcgttgagttcccgtcaatcacggcgcacatgttggtgttggaggtgacgatcacgggagtcgggtctatctgggccgaggacttgcatttctggtccacacgcaccttgcttcctccaagaatggctttggccgactccacgaccttggcggtcatcttcccctcctcccaccagatcaccatcttgtcgacgcaatggtaaaaggaaagttctcattgg

SEQ ID NO: 172 - protein, 735 aa, Adeno-associated virus 2
MAADGYLPDWLEDTLSEGIRQWWKLKPGPPPPKPAERHKDDSRGLVLPGYKYLGPFNGLDKGEPVNEADAAALEHDKAYDRQLDSGDNPYLKYNHADAEFQERLKEDTSFGGNLGRAVFQAKKRVLEPLGLVEEPVKTAPGKKRPVEHSPVEPDSSSGTGKAGQQPARKRLNFGQTGDADSVPDPQPLGEPPATPAAVGPTTMASGGGAPMADNNEGADGVGNASGNWHCDSTWLGDRVITTSTRTWALPTYNNHLYKQISSASTGASNDNHYFGYSTPWGYFDFNRFHCHFSPRDWQRLINNNWGFRPKRLNFKLFNIQVKEVTQNDGTTTIANNLTSTVQVFTDSEYQLPYVLGSAHQGCLPPFPADVFMIPQYGYLTLNNGSQAVGRSSFYCLEYFPSQMLRTGNNFTFSYTFEDVPFHSSYAHSQSLDRLMNPLIDQYLYYLNRTQNQSGSAQDKALLFSRGSPAGMSVQPKNWLPGPCYRQQRVSKTKTDNNNSNFTWTGASKYNLNGRESIINPGTAMASHKDDKDKFFPMSGVMIFGKESAGASNTALDNVMITDEEEIKATNPVATERFGTVAVNFQSSSTDPATGDVHVMGALPGMVWQDRDVYLQGPIWAKIPHTDGHFHPSPLMGGFGLKHPPPQILIKNTPVPANPPAEFSATKFASFITQYSTGQVSVEIEWELQKENSKRWNPEVQYTSNYAKSANVDFTVDNNGLYTEPRPIGTRYLTRP

SEQ ID NO: 173 - protein, 740 aa, Adeno-associated virus 2
MAADGYLPDWLEDTLSEGIRQWWKLKPGPPPPKPAERHKDDSRGLVLPGYKYLGPFNGLDKGEPVNAADAAALEHDKAYDRQLDSGDNPYLKYNHADAEFQERLKEDTSFGGNLGRAVFQAKKRVLEPLGLVEEPVKTAPGKKRPVEHSPVEPDSSSGTGKAGQQPARKRLNFGQTGDADSVPDPQPLGQPPAAPSGLGTNTMATGSGAPMADNNEGADGVGNSSGNWHCDSTWMGDRVITTSTRTWALPTYNNHLYKQISSQSGASNDNHYFGYSTPWGYFDFNRFHCHFSPRDWQRLINNNWGFRPKRLNFKLFNIQVKEVTQNDGTTTIANNLTSTVQVFTDSEYQLPYVLGSAHQGCLPPFPADVFMVPQYGYLTLNNGSQAVGRSSFYCLEYFPSQMLRTGNNFTFSYTFEDVPFHSSYAHSQSLDRLMNPLIDQYLYYLSRTNTPSGTTTQSGLQFSQAGASDIRDQSRNWLPGPCYRQQRVSKTSADNNNSEYSWTGATKYHLNGRDSLVNPGPAMASHKDDEEKFFPQSGVLIFGKQGSEKTNVDIEKVMITDEEEIRTTNPVATEQYGSVSTNLQRGNRQAATADVNTQGVLPGMVWQDRDVYLQGPIWAKIPHTDGHFHPSPLMGGFGLKHPPPQILIKNTPVPANPSTTFSAAKFASFITQYSTGQVSVEIEWELQKENSKRWNPEIQYTSNYNKSVNVDFTVDTNGVYSEPRPIGTRYLTRNLLLAAA

SEQ ID NO: 174 - protein, 734 aa, Adeno-associated virus 2
MAADGYLPDWLEDTLSEGIRQWWKLKPGPPPPKPAERHKDDSRGLVLPGYKYLGPFNGLDKGEPVNEADAAALEHDKAYDRQLDSGDNPYLKYNHADAEFQERLKEDTSFGGNLGRAVFQAKKRVLEPLGLVEEPVKTAPGKKRPVEHSPVEPDSSSGTGKAGQQPARKRLNFGQTGDADSVPDPQPLGQPPAAPSGLGTNTMATGSGAPMADNNEGADGVGNSSGNWHCDSTWMGDRVITTSTRTWALPTYNNHLYKQISSQSGASNDNHYFGYSTPWGYFDFNRFHCHFSPRDWQRLINNNWGFRPKRLNFKLFNIQVKEVTQNDGTTTIANNLTSTVQVFTDSEYQLPYVLGSAHQGCLPPFPADVFMVPQYGYLTLNNGSQAVGRSSFYCLEYFPSQMLRTGNNFTFSYTFEDVPFHSSYAHSQSLDRLMNPLIDQYLYYLSRTNTPSGTTTQSGLQFSQAGASDIRDQSRNWLPGPCYRQQRVSKTSADNNNSEYSWTGATMYHLNGRDSLVNPGPAMASHKDDEEKFFPQSGVLIFGKQGSEKTNVDIEKVMITDEEEIRTTNPVATEQYGSVSTNLQRGNRQAATADVNTQGVLPGMVWQDRDVYLQGPIWAKIPHTDGHFHPSPLMGGFGLKHPPPQILIKNTPVPANPSTTFSAAKFASFITQYSTGQVSVEIEWELQKENSKRWNPEIQYTSNYNKSINVDFTVDTNGVYSEPRPIGTRYLTRN

SEQ ID NO: 175 - protein, 734 aa, Adeno-associated virus 2
MAADGYLPDWLEDTLSEGIRQWWKLKPGPPPPKPAERHKDDSRGLVLPGYKYLGPFNGLDKGEPVNEADAAALEHDKAYDRQLDSGDNPYLKYNHADAEFQERLKEDTSFGGNLGRAVFQAKKRVLEPLGLVEEPVKTAPGKKRPVEHSPVEPDSSSGTGKAGQQPARKRLNFGQTGDADSVPDPQPLGQPPAAPSGLGTNTMATGSGAPMADNNEGADGVGNSSGNWHCDSTWMGDRVITTSTRTWALPTYNNHLYKQISSQSGASNDNHYFGYSTPWGYFDFNRFHCHFSPRDWQRLINNNWGFRPKRLNFKLFNIQVKEVTQNDGTTTIANNLTSTVQVFTDSEYQLPYVLGSAHQGCLPPFPADVFMVPQYGYLTLNNGSQAVGRSSFYCLEYFPSQMLRTGNNFTFSYTFEDVPFHSSYAHSQSLDRLMNPLIDQYLYYLSRTNTPSGTTTQSGLQFSQAGASDIRDQSRNWLPGPCYRQQRVSKTSADNNNSEYSWTGATKYHLNGRDSLVNPGPAMASHKDDEEKFFPQSGVLIFGKQGSEKTNVDIEKVMITDEEEIRTTNPVATEQYGSVSTNLQRGNRQAATADVNTQGVLPGMVWQDRDVYLQGPIWAKIPHTDGHFHPSPLMGGFGLKHPPPQILIKNTPVPANPSTTFSEAKFASFITQYSTGQVSVEIEWELQKENSKRWNPEIQYTSNYNKSVNVDFTVDTNGVYSEPRPIGTRYLTRN

SEQ ID NO: 176 - protein, 739 aa, Adeno-associated virus 2
MAADGYLPDWLEDTLSEGIRQWWKLKPGPPPPKPAERHKDDSRGLVLPGYKYLGPFNGLDKGEPVNEADAAALEHDKAYDRQLDSGDNPYLKYNHADAEFQERLKEDTSFGGNLGRAVFQAKKRVLEPLGLVEEPVKTAPGKKRPVEHSPVEPDSSSGTGKAGQQPARKRLNFGQTGDADSVPDPQPLGQPPAAPSGLGTNTMATGSGAPMADNNEGADGVGNSSGNWHCDSTWMGDRVITTSTRTWALPTYNNHLYKQISSQSGASNDNHYFGYSTPWGYFDFNRFHCHFSPRDWQRLINNNWGFRPKRLNFKLFNIQVKEVTQNDGTTTIANNLTSTVQVFTDSEYQLPYVLGSAHQGCLPPFPADVFMVPQYGYLTLNNGSQAVGRSSFYCLEYFPSQMLRTGNNFTFSYTFEDVPFHSSYAHSQSLDRLMNPLIDQYLYYLSRTNTPSGTTTQSGLQFSQAGASDIRDQSRNWLPGPCYRQQRVSKTSADNNNSEYSWTGATKYHLNGRDSLVNPGPAMASHKDDEEKFFPQSGVLIFGKQGSEKTNVDIEKVMITDEEEIRTTNPVATEQYGSVSTNLQRGNRQAATADVNTQGVLPGMVWQDRDVYLQGPIWAKIPHTDGHFHPSPLMGGFGLKHPPPQILIKNTPVPANPSTTFSAAKFASFITQYSTGQVSVEIEWELQKENSKRWNPEIQYTSNYNKSVNVDFTVDTNGVYSEPRPIGTRYLTRNLLLAA

SEQ ID NO: 177 - protein, 725 aa, Adeno-associated virus 2
MAADGYLPDWLEDTLSEGIRQWWKLKPGPPPPKPAERHKDDSRGLVLPGYKYLGPFNGLDKGEPVNEADAAALEHDKAYDRQLDSGDNPYLKYNHADAEFQERLKEDTSFGGNLGRAVFQAKKRVLEPLGLVEEPVKTAPGKKRPVEHSPVEPDSSSGTGKAGQQPARKRLNFGQTGDADSVPDPQPLGQPPAAPSGLGTNTMATGSGAPMADNNEGADGVGNSSGNWHCDSTWMGDRVITTSTRTWALPTYNNHLYKQISSQSGASNDNHYFGYSTPWGYFDFNRFHCHFSPRDWQRLINNNWGFRPKRLNFKLFNIQVKEVTQNDGTTTIANNLTSTVQVFTDSEYQLPYVLGSAHQGCLPPFPADVFMVPQYGYLTLNNGSQAVGRSSFYCLEYFPSQMLRTGNNFTFSYTFEDVPFHSSYAHSQSLDRLMNPLIDQYLYYLSRTNTPSGTTTQSGLQFSQAGASDIRDQSRNWLPGPCYRQQRVSKTSADNNNSEYSWTGATKYHLNGRDSLVNPGPAMASHKDDEEKFFPQSGVLIFGKQGSEKTNVDIEKVMITDEEEIRTTNPVATEQYGSVSTNLQRGNRQAATADVNTQGVLPGMVWQDRDVYLQGPIWAKIPHTDGHFHPSPLMGGFGLKHPPPQILIKNTPVPANPSTTFSAAKFASFITQYSTGQVSVEIEWELQKENSKRWNPEIQYTSNYNKSVNVDFTVDTNGVYSEPRP

SEQ ID NO: 178 - protein, 707 aa, Adeno-associated virus 2
MAADGYLPDWLEDTLSEGIRQWWKLKPGPPPPKPAERHKDDSRGLVLPGYKYLGPFNGLDKGEPVNEADAAALEHDKAYDRQLDSGDNPYLKYNHADAEFQERLKEDTSFGGNLGRAVFQAKKRVLEPLGLVEEPVKTAPGKKRPVEHSPVEPDSSSGTGKAGQQPARKRLNFGQTGDADSVPDPQPLGQPPAAPSGLGTNTMATGSGAPMADNNEGADGVGNSSGNWHCDSTWMGDRVITTSTRTWALPTYNNHLYKQISSQSGASNDNHYFGYSTPWGYFDFNRFHCHFSPRDWQRLINNNWGFRPKRLNFKLFNIQVKEVTQNDGTTTIANNLTSTVQVFTDSEYQLPYVLGSAHQGCLPPFPADVFMVPQYGYLTLNNGSQAVGRSSFYCLEYFPSQMLRTGNNFTFSYTFEDVPFHSSYAHSQSLDRLMNPLIDQYLYYLSRTNTPSGTTTQSGLQFSQAGASDIRDQSRNWLPGPCYRQQRVSKTSADNNNSEYSWTGATKYHLNGRDSLVNPGPAMASHKDDEEKFFPQSGVLIFGKQGSEKTNVDIEKVMITDEEEIRTTNPVATEQYGSCIYQPPERQQTSSYRRCQHTRRSSRHGLAGQRCVPSGAHLGKDSTHGRTFSPLSPHGWIRTTPSSTDSHQEHPGTCESFDHLQCGKVCFLHHTVLHGTGQRGDRVRAAEGKQQTLESRNSVHFQLQQVC

SEQ ID NO: 179 - protein, 739 aa, Adeno-associated virus 2; identical to SEQ ID NO: 176

SEQ ID NO: 180 - protein, 737 aa, Adeno-associated virus 2
MASDGYLPDWLEDNLSEGIREWWDLKPGAPKPKANQQKQDDGRGLVLPGYKYLGPFNGLDKGEPVNAADAAALEHDKAYDQQLKAGDNPYLRYNHADAEFQERLQEDTSFGGNLGRAVFQAKKRVLEPFGLVEEGAKTAPGKKRPVEQSPQEPDSSSGIGKTGQQPAKKRLNFGQTGDSESVPDPQPLGEPPATPAAVGPTTMASGGGAPMADNNEGADGVGNASGNWHCDSTWLGDRVITTSTRTWALPTYNNHLYKQISSASTGASNDNHYFGYSTPWGYFDFNRFHCHFSPRDWQRLINNNWGFRPKRLNFKLFNIQVKEVTTNDGTTTIANNLTSTVQVFTDSEYQLPYVLGSAHQGCLPPFPADVFMVPQYGYLTLNNGSQAVGRSSFYCLEYFPSQMLRTGNNFTFSYTFEDVPFHSSYAHSQSLDRLMNPLIDQYLYYLSRTNTPSGTTTQSGLQFSQAGASDIRDQSRNWLPGPCYRQQRVSKTSADNNNSEYSWTGATKYHLNGRDSLVNPGPAMASHKDDEEKFFPQSGVLIFGKQGSEKTNVDIEKVMITDEEEIRTTNPVATEQYGSVSTNLQRGNRQAATADVNTQGVLPGMVWQDRDVYLQGPIWAKIPHTDGHFHPSPLMGGFGLKHHPPQILIKNTPVPANPSTTFSAAKFASFITQYSTGQVSVEIEWELQKENSKRWNPEIQYTSNYNKSVNVDFTVDTNGVYSEPRPIGTRYLTRNLL

SEQ ID NO: 181 - protein, 741 aa, Adeno-associated virus 2
MAADGYLPDWLEDTLSEGIREWWALKPGAPKPKANQQKQDDGRGLVLPGYKYLGPFNGLDKGEPVNEADAAALEHDKAYDQQLQAGDNPYLRYNHADAEFQERLQEDTSFGGNLGRAVFQAKKRVLEPLGLVEEPVKTAPGKKRPVEHSPVEPDSSSGTGKSGQQPARKRLNFGQTGDADSVPDPQPLGQPPAAPSGLGTNTMATGSGAPMADNNEGADGVGNSSGNWHCDSTWMGDRVITTSTRTWALPTYNNHLYKQISSQSGASNDNHYFGYSTPWGYFDFNRFHCHFSPRDWQRLINNNWGFRPKRLNFKLFNIQVKEVTQNDGTTTIANNLTSTVQVFTDSEYQLPYVLGSAHQGCLPPFPADVFMVPQYGYLTLNNGSQAVGRSSFYCLEYFPSQMLRTGNNFTFSYTFEDVPFHSSYAHSQSLDRLMNPLIDQYLYYLSRTNTPSGTTTQSGLQFSQAGASDIRDQSRNWLPGPCYRQQRVSKTSADNNNSEYSWTGATKYHLNGRDSLVNPGPAMASHKDDEEKFFPQSGVLIFGKQGSEKTNVDIEKVMITDEEEIRTTNPVATEQYGSVSTNLQRGNLANHNNTTNARQAATADVNTQGVLPGMVWQDRDVYLQGPIWAKIPHTDGHFHPSPLMGGFGLKHPPPQILIKNTPVPANPSTTFSAAKFASFITQYSTGQVSVEIEWELQKENSKRWNPEIQYTSNYNKSINVDFTVDTNGVYSEPRPIGTRYL

SEQ ID NO: 182 - protein, 730 aa, Adeno-associated virus 2
MASDGYLPDWLEDNLSEGIREWWDLKPGAPKPKANQQKQDDGRGLVLPGYKYLGPFNGLDKGEPVNAADAAALEHDKAYDQQLKAGDNPYLRYNHADAEFQERLQEDTSFGGNLGRAVFQAKKRVLEPFGLVEEGAKTAPGKKRPVEQSPQEPDSSSGIGKTGQQPAKKRLNFGQTGDSESVPDPQPLGEPPATPAAVGPTTMASGGGAPMADNNEGADGVGNASGNWHCDSTWLGDRVITTSTRTWALPTYNNHLYKQISSASTGASNDNHYFGYSTPWGYFDFNRFHCHFSPRDWQRLINNNWGFRPKRLNFKLFNIQVKEVTTNDGVTTIANNLTSTVQVFSDSEYQLPYVLGSAHQGCLPPFPADVFMIPQYGYLTLNNGSQAVGRSSFYCLEYFPSQMLRTGNNFTFSYTFEDVPFHSSYAHSQSLDRLMNPLIDQYLYYLNRTQNQSGSAQNNDLLFSRGSPAGMSVQPKNWLPGPCYRQQRVSKTKTDNNNSNFTWTGASKYNLNGRESIINPGTAMASHKDDKDKFFPMSGVMIFGKESAGASNTALDNVMITDEEEIKATNPVATERFGTVAVNLQSSSTDPATGDVHVMGALPGMVWQDRDVYLQGPIWAKIPHTDGHFHPSPLMGGFGLKNPPPQILIKNTPVPANPPAEFSATKFASFITQYSTGQVSVEIEWELQKENSKRWNPEVQYTSNYAKSANVDFTVDNNGLYTEPRPIGTR

SEQ ID NO: 183 - protein, 735 aa, Adeno-associated virus 2
  MOD_RES (239)..(239): Any amino acid
MASDGYLPDWLEDNLSEGIREWWDLKPGAPKPKANQQKQDDGRGLVLPGYKYLGPFNGLDKGEPVNAADAAALEHDKAYDQQLKAGDNPYLRYNHADAEFQERLQEDTSFGGNLGRAVFQAKKRVLEPFGLVEEGAKTAPGKKRPVEQSPQEPDSSSGIGKTGQQPAKKRLNFGQTGDSESVPDPQPLGEPPATPAAVGPTTMASGGGAPMADNNEGADGVGNASGNWHCDSTWLGDRXITTSTRTWALPTYNNHLYKQISSASTGASNDNHYFGYSTPWGYFDFNRFHCHFSPRDWQRLINNNWGFRPKRLNFKLFNIQVKEVTTNDGVTTIANNLTSTVQVFSDSEYQLPYVLGSAHQGCLPPFPADVFMIPQYGYLTLNNGSQAVGRSSFYCLEYFPSQMLRTGNNFTFSYTFEDVPFHSSYAHSQSLDRLMNPLIDQYLYYLNRTQNQSGSAQNNDLLFSRGSPAGMSVQPKNWLPGPCYRQQRVSKTKTDNNNSNFTWTGASKYNLNGRESIINPGTAMASHKDDKDKFFPMSGVMIFGKESAGASNTALDNVMITDEEEIKATNPVATERFGTVAVNLQSSSTDPATGDVHVMGALPGMVWQDRDVYLQGPIWAKIPHTDGHFHPSPLMGGFGLKNPPPQILIKNTPVPANPPAEFSATKFASFITQYSTGQVSVEIEWELQKENSKRWNPEVQYTSNYAKSANVDFTVDNNGLYTEPRPIGTRYLTRP

SEQ ID NO: 184 - protein, 733 aa, Adeno-associated virus 2
MASDGYLPDWLEDNLSEGIREWWDLKPGAPKPKANQQKQDDGRGLVLPGYKYLGPFNGLDKGEPVNAADAAALEHDKAYDQQLKAGDNPYLRYNHADAEFQERLQEDTSFGGNLGRAVFLAKKRVLEPFGLVEEGAKTAPGKKRPVEQSPQEPDSSSGIGKTGQQPAKKRLNFGQTGDSESVPDPQPLGEPPATPAAVGPTTMASGGGAPMADNNEGADGVGNASGNWHCDSTWLGDRVITTSTRTWALPTYNNHLYKQISSASTGASNDNHYFGYSTPWGYFDFNRFHCHFSPRDWQRLINNNWGFRPKRLNFKLFNIQVKEVTTNDGVTTIANNLTSTVQVFSDSEYQLPYVLGSAHQGCLPPFPADVFMIPQYGYLTLNNGSQAVGRSSFYCLEYFPSQMLRTGNNFTFSYTFEDVPFHSSYAHSQSLDRLMNPLIDQYLYYLNRTQNQSGSAQNNDLLFSRGSPAGMSVQPKNWLPGPCYRQQRVSKTKTDNNNSNFTWTGASKYNLNGRESIINPGTAMASHKDDKDKFFPMSGVMIFGKESAGASNTALDNVMITDEEEIKATNPVATERFGTVAVNLQSSSTDPATGDVHVMGALPGMVWQDRDVYLQGPIWAKIPHTDGHFHPSPLMGGFGLKNPPPQILIKNTPVPANPPAEFSATKFASFITQYSTGQVSVEIEWELQKENSKRWNPEVQYTSNYAKSANVDFTVDNNGLYTEPRPIGTRYLT

SEQ ID NO: 185 - protein, 734 aa, Adeno-associated virus 2
MAADGYLPDWLEDTLSEGIRQWWKLKPGPPPPKPAERHKDDSRGLVLPGCKYLGPFNGLDKGEPVNEADAAALEHDKAYDRQLDSGDNPYLKYNHADAEFQERLKEDTSFGGNLGRAVFQAKKRVLEPLGLVEEPVKTAPGKKRPVEHSPVEPDSSSGTGKAGQQPARKRLNFGQTGDADSVPDPQPLGQPPAAPSGLGTNTMATGSGAPMADNNEGADGVGNSSGNWHCDSTWMGDRVITTSTRTWALPTYNNHLYKQISSQSGASNDNHYFGYSTPWGYFDFNRFHCHFSPRDWQRLINNNWGFRPKRLNFKLFNIQVKEVTQNDGTTTIANNLTSTVQVFSDSEYQLPYVLGSAHQGCLPPFPADVFMIPQYGYLTLNNGSQAVGRSSFYCLEYFPSQMLRTGNNFTFNYTFEDVPFHSSYAHSQSLDRLMNPLIDQYLYYLNRTQNQSGSAQNNDLLFSRGSPAGMSVQPKNWLPGPCYRQQRVSKTKTDNNNSNFTWTGASKYNLNGRESIINPGTAMASHKDDKDKFFPMSGVMIFGKESAGASNTALDNVMITDEEEIKATNPVATERFGTVAVNLQSSSTDPATGDVHVMGALPGMVWQDRDVYLQGPIWAKIPHTDGHFHPSPLMGGFGLKNPPPQILIKNTPVPANPPAEFSATKFASFITQYSTGQVSVEIEWELQKENSKRWNPEVQYTSNYAKSANVDFTVDNNGLYTEPRPIGTRYLTRP

SEQ ID NO: 186 - protein, 734 aa, Adeno-associated virus 2
MAADGYLPDWLEDTLSEGIRQWWKLKPGPPPPKPAERHKDDSRGLVLPGYKYLGPFNGLDKGEPVNEADAAALEHDKAYDRQLDSGDNPYLKYNHADAEFQERLKEDTSFGGNLGRAVFQAKKRVLEPLGLVEEPVKTAPGKKRPVEHSPVEPDSSSGTGKAGQQPARKRLNFGQTGDADSVPDPQPLGQPPAAPSGLGTNTMATGSGAPMADNNEGADGVGNSSGNWHCDSTWMGDRVITTSTRTWALSTYNNHLYKQISSQSGASNDNHYFGYSTPWGYFDFNRFHCHFSPRDWQRLINNNWGFRPKRLNFKLFNIQVKEVTQNDGTTTIANNLTSTVQVFTDSEYQLPYVLGSAHQGCLPPFPADVFMVPQYGYLTLNNGSQAVGRSSFYCLEYFPSQMLRTGNNFTFSYTFEDVPFHSSYAHSQSLDRLMNPLIDQYLYYLSRTNTPSGTTTQSRLQFSQAGASDIRDQSRNWLPGPCYRQQRVSKTSADNNNSEYSWTGATKYHLNGRDSLVNPGPAMASHKDDEEKFFPQSGVLIFGKQGSEKTNVDIEKVMITDEEEIRTTNPVATEQYGSVSTNLQRGNRQAATADVNTQGVLPGMVWQDRDVYLQGPIWAKIPHTDGHFHPSPLMGGFGLKHPPPQILIKNTPVPANPSTTFSAAKFASFITQYSTGQVSVEIEWELQKENSKRWNPEIQYTSNYNKSINVDFTVDTNGVYSEPRPIGTRYLTRN

SEQ ID NO: 187 - protein, 738 aa, Adeno-associated virus 2
MAADGYLPDWLEDTLSEGIRQWWKLKPGPPPPKPAERHKDDSRGLVLPGYKYLGPFNGLDKGEPVNEADAAALEHDKAYDRQLDGGDNPYLKYNHADAEFQERLKEDTSFGGNLGRAVFQAKKRVLEPLGLVEEPVKTAPGKKRPVEHSPVEPDSSSGTGKAGQQPARKRLNFGQTGDADSVPDPQPLGQPPAAPSGLGTNTMATGSGAPMADNNEGADGVGNSSGNWHCDSTWMGDRVITTSTRTWALPTYNNHLYKQISSQSGASNDNHYFGYSTPWGYFDFNRFHCHFSPRDWQRLINNNWGFRPKRLNFKLFNIQVKEVTQNDGTTTIANNLTSTVQVFTDSEYQLPYVLGSAHQGCLPPFPADVFMVPQYGYLTLNNGSQAVGRSSFYCLEYFPSQMLRTGNNFTFSYTFEDVPFHSSYAHSQSLDRLMNPLIDQYLYYLSRTNTPSGTTTQSGLQFSQAGASDIRDQSRNWLPGPCYRQQRVSKTSADNNNSEYSWTGATKYHLNGRDSLVNPGPAMASHKDDEEKFFPQSGVLIFGKQGSEKTNVDIEKVMITDEEEIRTTNPVATEQYGSVSTNLQRGNRQAATADVNTQGVLPGMVWQDRDVYLQGPIWAKIPHTDGHFHPSPLMGGFGLKHPPPQILIKNTPVPANPSTTFSAAKFASFITQYSTGQVSVEIEWELQKENSKRWNPEIQYTSNYNKSVNVDFTVDTNGVYSEPRPIGTRYLTRNLLRP

SEQ ID NO: 188 - DNA, 2208 bp, Artificial Sequence
  Description of Artificial Sequence: Synthetic polynucleotide
atggctgccgatggttatcttccagattggctcgaggacactctctctgaaggaataagacagtggtggaagctcaaacctggcccaccaccaccaaagcccgcagagcggcataaggacgacagcaggggtcttgtgcttcctgggtacaagtacctcggacccttcaacggactcgacaagggggagccggtcaacgaggcagacgccgcggccctcgagcacgacaaggcctacgaccggcagctcgacagcggagacaacccgtacctcaagtacaaccacgccgacgcagagtttcaggagcgccttaaagaagatacgtcttttgggggcaacctcggacgagcagtcttccaggcgaaaaagagggttcttgaacctctgggcctggttgaggaacctgttaagacggctccgggaaaaaagaggccggtagagcactctcctgtggagccagactcctcctcgggaaccggaaaagcgggccagcagcctgcaagaaaaagattaaattttggtcagactggagacgcagactccgtacctgacccccagcctctcggacagccaccagcagccccctctggtctgggatctactacaatggctacaggcagtggcgcaccaatggcagacaataacgagggtgccgatggagtgggtaattcctcaggaaattggcattgcgattcccaatggctgggcgacagagtcatcaccaccagcacccgaacctgggccctgcccacatacaacaaccacctctacaagcaaatctccagccaatcaggagccagcaacgacaaccactactttggctacagcaccccctgggggtattttgacttcaacagattccactgccacttttcaccacgtgactggcaaagactcatcaacaacaactggggattccggcccaaaagactcaacttcaagctctttaatattcaagtcaaagaggtcacgcagaatggcggtacgacgacgattgccaataaccttaccagcacggttcaggtgtttactgactcggagtaccagctcccgtacgtcctgggctcggcgcatcaaggatgcctcccgccgtttccagcggacgtcttcatggtcccacagtatggatacctcaccctgaacaacgggagtcaggcggtaggacgctcttccttttactgcctggagtactttccttctcagatgctgcgtactggaaacaactttcagttcagctacacttttgaagacgtgcctttccacagcagctacgctcacagccagagtctggatcggctgatgaatcctctgatcgaccagtacctgtattatctgaacaagacacaaacaaatagtggaactcttcagcagtctcggctactgtttagccaagctggaccaaccaacatgtctcttcaagctaaaaactggctgcctggaccttgctacagacagcagcgtctgtcaaaacaggcaaacggcaacaacaacagcaactttccctggactgcagctacaaagtatcatctaaatggccgggactcgttggttaatccaggaccagctatggccagtcacaaggatgacgaagaaaagtttttccccatgcatggaaccctgatatttggtaaacaaggaacaaatgccaacgacgcggatttggaaaatgtcatgattacagatgaagaagaaatcagggccaccaatcccgtggctacggagcagtacgggactgtgtcaaataatttgcaaaactcaaacactggtccaactactggaactgtcaatcaccaaggagcgttacctggtatggtgtggcaggatcgagacgtgtacctgcagggacccatttgggccaagattcctcacaccgatggacactttcatccttctccactgacgggaggttttggactcaaacacccgcctcctcagatcatgatcaaaaacactcccgttccagccaatcctcccacaaacttcagttctgccaagtttgcttctttcatcacacagtattccacgggacaggtcagcgtggagatcgagtgggagctgcagaaggagaacagcaaacgctggaatcccgaaattcagtacacttccaactacaacaagtctgttaatgtggactttactgtggacactaatggtgtgtattcagagcctcgccccattggcaccagatacctgactcgtaatctgtaa

SEQ ID NO: 189 - protein, 735 aa, Artificial Sequence
  Description of Artificial Sequence: Synthetic polypeptide
MAADGYLPDWLEDTLSEGIRQWWKLKPGPPPPKPAERHKDDSRGLVLPGYKYLGPFNGLDKGEPVNEADAAALEHDKAYDRQLDSGDNPYLKYNHADAEFQERLKEDTSFGGNLGRAVFQAKKRVLEPLGLVEEPVKTAPGKKRPVEHSPVEPDSSSGTGKAGQQPARKRLNFGQTGDADSVPDPQPLGQPPAAPSGLGSTTMATGSGAPMADNNEGADGVGNSSGNWHCDSQWLGDRVITTSTRTWALPTYNNHLYKQISSQSGASNDNHYFGYSTPWGYFDFNRFHCHFSPRDWQRLINNNWGFRPKRLNFKLFNIQVKEVTQNGGTTTIANNLTSTVQVFTDSEYQLPYVLGSAHQGCLPPFPADVFMVPQYGYLTLNNGSQAVGRSSFYCLEYFPSQMLRTGNNFQFSYTFEDVPFHSSYAHSQSLDRLMNPLIDQYLYYLNKTQTNSGTLQQSRLLFSQAGPTNMSLQAKNWLPGPCYRQQRLSKQANGNNNSNFPWTAATKYHLNGRDSLVNPGPAMASHKDDEEKFFPMHGTLIFGKQGTNANDADLENVMITDEEEIRATNPVATEQYGTVSNNLQNSNTGPTTGTVNHQGALPGMVWQDRDVYLQGPIWAKIPHTDGHFHPSPLTGGFGLKHPPPQIMIKNTPVPANPPTNFSSAKFASFITQYSTGQVSVEIEWELQKENSKRWNPEIQYTSNYNKSVNVDFTVDTNGVYSEPRPIGTRYLTRNL

SEQ ID NO: 190 - DNA, 2208 bp, Artificial Sequence
  Description of Artificial Sequence: Synthetic polynucleotide
atggctgccgatggttatcttccagattggctcgaggacactctctctgaaggaataagacagtggtggaagctcaaacctggcccaccaccaccaaagctcgcagagcggcatcaggacgacagcaggggtcttgtgcttcctgggtacaagtacctcggacccttcaacggactcgacaaaggagagccggtcaacgaggcagacgccgcggccctcgagcacgacaaggcctacgaccggcagctcgacagcggagacaacccgtacctcaagtacaaccacgccgacgcggagtttcaggagcgtcttaaagaagatacgtcttttgggggcaacctcggacgagcagtcttccaggcgaaaaagagggttcttgaacctctgggcctggttgaggaacctgttaagacggctccgggaaaaaagaggccggtagagcactctcctgtggagccagactcctcctcgggaaccggaaaggcgggccatcagcctgcgagaaagagattgaattttggtcagactggagacgcagactccgtacctgacccccagcctctcggacagccaccagcagcccccacaagtctgggatctactacaatggctacaggcagtggcgcaccaatggcagacaataacgagggtgccgatggagtgggtaattcctcaggaaattggcattgcgattcccaatggctgggcgacagagtcatcaccaccagcacccgaacctgggccctgcccacctacaacaaccacctctacaagcaaatctccagccaatcaggagcctcgaacgacaaccactactttggctacagcaccccctgggggtattttgacttcaacagattccactgtcacttctccccacgtgattggcaaagactcatcaacaacaactggggattccgacccaagagactcaacttcaagctctttaacattcaagtcaaagaggtcacgcagaatgacggtacgacgacgattgccaataaccttaccagcacggttcaggtgtttactgactcggagtaccagctcccgtacgtcctcggctcggcgcatcaaggatgcctcccgccgtttccagcggacgtcttcacggtcccacagtatggatacctcaccctgaacaacgggagtcaggcggtaggacgctcttccttttactgcctggagtactttccttctcagatgctgcgtactggaaacaaccttaccttcagctacacctttgaggacgttcctttccacagcagctacgctcacagccagagtttggaccggctgatgaatcctctgatcgaccagtatctatattatctgaacaggacacaatcaaatagtggaactcttcagcagtctaggctactgtttagccaagctggacccaccagcatgtctcttcaagctaaaaactggctgcctggaccttgctacagacagcagcgtctttcaaagcaggcaaacgacaacaacaacagcaactttccctggactgcggctacaaagtatcatctaaatggccgggactcgttggttaatccaggaccagctatggccagccacaaagacgatgaagaaaagtttttccccatgcatggaaccctgatatttggtaaacaaggaacaaatgctaacgacgcggatttggagcatgttatgattacagatgaagaagaaatcaggaccaccaatcctgtggctacagagcagtacggaaacgtgtcaaataatttgcaaaactcaaatactggtccaactacagaaaatgtcaatcaccagggagcgttacctggtatggtgtggcaggatcgagacgtgtacctgcagggacccatttgggccaagattcctcacaccgacggacactttcacccttctccactgatgggaggttttggactcaaacacccgcctcctcaaatcatgatcaaaaacactcccgttccagccaatcctcccacaaactacagttctgccaagtttgcttctttcatcacacagtattccacgggccaggtcagcgtggagattgagtgggagctgcggaaggagaacagcaaacgctggaaccccgagatccagtatacttccaactacaacaaatctgttaatgtggactttactgtggacactaatggtgtgtattcagagcctcgccccattggcaccagatacctgactcgtaatctgtaa

SEQ ID NO: 191 - protein, 735 aa, Artificial Sequence
  Description of Artificial Sequence: Synthetic polypeptide
MAADGYLPDWLEDTLSEGIRQWWKLKPGPPPPKLAERHQDDSRGLVLPGYKYLGPFNGLDKGEPVNEADAAALEHDKAYDRQLDSGDNPYLKYNHADAEFQERLKEDTSFGGNLGRAVFQAKKRVLEPLGLVEEPVKTAPGKKRPVEHSPVEPDSSSGTGKAGHQPARKRLNFGQTGDADSVPDPQPLGQPPAAPTSLGSTTMATGSGAPMADNNEGADGVGNSSGNWHCDSQWLGDRVITTSTRTWALPTYNNHLYKQISSQSGASNDNHYFGYSTPWGYFDFNRFHCHFSPRDWQRLINNNWGFRPKRLNFKLFNIQVKEVTQNDGTTTIANNLTSTVQVFTDSEYQLPYVLGSAHQGCLPPFPADVFTVPQYGYLTLNNGSQAVGRSSFYCLEYFPSQMLRTGNNLTFSYTFEDVPFHSSYAHSQSLDRLMNPLIDQYLYYLNRTQSNSGTLQQSRLLFSQAGPTSMSLQAKNWLPGPCYRQQRLSKQANDNNNSNFPWTAATKYHLNGRDSLVNPGPAMASHKDDEEKFFPMHGTLIFGKQGTNANDADLEHVMITDEEEIRTTNPVATEQYGNVSNNLQNSNTGPTTENVNHQGALPGMVWQDRDVYLQGPIWAKIPHTDGHFHPSPLMGGFGLKHPPPQIMIKNTPVPANPPTNYSSAKFASFITQYSTGQVSVEIEWELRKENSKRWNPEIQYTSNYNKSVNVDFTVDTNGVYSEPRPIGTRYLTRNL

SEQ ID NO: 192 - DNA, 2208 bp, Artificial Sequence
  Description of Artificial Sequence: Synthetic polynucleotide
atggctgccgatggttatcttccagattggctcgaggacactctctctgaaggaataagacagtggtggaagctcaaacctggcccaccaccaccaaagcccgcagagcggcatcaggacgacagcaggggtcttgtgcttcctgggtacaagtacctcggacccttcaacggactcgacaaaggagagccggtcaacgaggcagacgccgcggccctcgagcacgacaaggcctacgaccggcagctcgacagcggagacaacccgtacctcaagtacaaccacgccgacgcggagtttcaggagcgtcttaaagaagatacgtcttttgggggcaacctcggacgagcagtcttccaggcgaaaaagagggttcttgaacctctgggcctggttgaggaacctgttaagacggctccgggaaaaaagaggccggtagagcactctcctgtggagccagactcctcctcgggaaccggaaaagcgggccatcagcctgcgagaaagagattgaattttggtcagactggagacgcagactccgtacctgacccccagcctctcggacagccaccagcagcccccacaagtttgggatctactacaatggctacaggcagtggcgcaccaatggcagacaataacgagggtgccgatggagtgggtaattcctcaggaaattggcattgcgattcccaatggctgggcgacagagtcatcaccaccagcacccgaacctgggccctgcccacctacaacaaccacctctacaagcaaatctccagccaatcaggagcctcgaacgacaaccactactttggctacagcaccccctgggggtattttgacttcaacagattccactgtcacttctccccacgtgattggcaaagactcatcaacaacaactggggattccgacccaagagactcaacttcaagctctttaacattcaagtcaaggaggtcacgcagaatgacggtacgacgacgattgccaataaccttaccagcacggttcaggtgtttactgactcggagtaccagctcccgtacgtcctcggctcggcgcatcaaggatgcctcccgccgtttccagcggacgtcttcatggtcccacagtatggatacctcaccctgaacaacgggagtcaggcggtaggacgctcttccttttactgcctggagtactttccttctcagatgctgcgtactggaaacaactttaccttcagctacacctttgaggacgttcctttccacagcagctacgctcacagccagagtttggaccggctgatgaatcctctgatcgaccagtatctatattatctgaacaggacacaatcaaatagtggaactcttcagcagtctaggctactgtttagccaagctggacccaccagcatgtctcttcaagctaaaaactggctgcctggaccttgctacagacagcagcgtctttcaaagcaggcaaacgacaacaacaacagcaactttccctggactgcggctacaaagtatcgtctaaatggccgggactcgttggttaatccaggaccagctatggccagccacaaagacgatgaagaaaagtttttccccatgcatggaaccctgatatttggtaaacaaggaacaaatgctaacgacgcggatttggagcatgttatgattacagatgaagaagaaatcaggaccaccaatcctgtggctacagagcagtacggaaacgtgtcaaataatttgcaaaactcaaatactggtccaactacagaaaatgtcaatcaccagggagcgttacctggtatggtgtggcaggatcgagacgtgtacctgcagggacccatttgggccaagattcctcacaccgacggacactttcacccttctccactgatgggaggttttggactcaaacacccgcctcctcaaatcatgatcaaaaacactcccgttccagccaatcctcccacaaacttcagttctgccaagtttgcttctttcatcacacagtattccacgggccaggtcagcgtggagattgagtgggagctgcagaaggagaacagcaaacgctggaaccccgagatccagtatacttccaactacaacaaatctgttaatgtggactttactgtggacactaatggtgtgtattcagagcctcgccccattggcaccagatacctgactcgtaatctgtaa

SEQ ID NO: 193 - protein, 735 aa, Artificial Sequence
  Description of Artificial Sequence: Synthetic polypeptide
MAADGYLPDWLEDTLSEGIRQWWKLKPGPPPPKPAERHQDDSRGLVLPGYKYLGPFNGLDKGEPVNEADAAALEHDKAYDRQLDSGDNPYLKYNHADAEFQERLKEDTSFGGNLGRAVFQAKKRVLEPLGLVEEPVKTAPGKKRPVEHSPVEPDSSSGTGKAGHQPARKRLNFGQTGDADSVPDPQPLGQPPAAPTSLGSTTMATGSGAPMADNNEGADGVGNSSGNWHCDSQWLGDRVITTSTRTWALPTYNNHLYKQISSQSGASNDNHYFGYSTPWGYFDFNRFHCHFSPRDWQRLINNNWGFRPKRLNFKLFNIQVKEVTQNDGTTTIANNLTSTVQVFTDSEYQLPYVLGSAHQGCLPPFPADVFMVPQYGYLTLNNGSQAVGRSSFYCLEYFPSQMLRTGNNFTFSYTFEDVPFHSSYAHSQSLDRLMNPLIDQYLYYLNRTQSNSGTLQQSRLLFSQAGPTSMSLQAKNWLPGPCYRQQRLSKQANDNNNSNFPWTAATKYRLNGRDSLVNPGPAMASHKDDEEKFFPMHGTLIFGKQGTNANDADLEHVMITDEEEIRTTNPVATEQYGNVSNNLQNSNTGPTTENVNHQGALPGMVWQDRDVYLQGPIWAKIPHTDGHFHPSPLMGGFGLKHPPPQIMIKNTPVPANPPTNFSSAKFASFITQYSTGQVSVEIEWELQKENSKRWNPEIQYTSNYNKSVNVDFTVDTNGVYSEPRPIGTRYLTRNL

SEQ ID NO: 194 - DNA, 2208 bp, Artificial Sequence
  Description of Artificial Sequence: Synthetic polynucleotide
atggctgccgatggttatcttccagattggctcgaggacactctctctgaaggaataagacagtggtggaagctcaaacctggcccaccaccaccaaagcccgcagagcggcatcaggacgacagcaggggtcttgtgcttcctgggtacaagtacctcggacccttcaacggactcgacaaaggagagccggtcaacgaggcagacgccgcggccctcgagcacgacaaggcctacgaccggcagctcgacagcggagacaacccgtacctcaagtacaaccacgccgacgcggagtttcaggagcgtcttaaagaagatacgtcttttgggggcaacctcggacgagcagtcttccaggcgaaaaagagggttcttgaacctctgggcctggttgaggaacctgttaagacggctccgggaaaaaagaggccggtagagcactctcctgtggagccagactcctcctcgggaaccggaaaagcgggccatcagcctgcgagaaagagattgaattttggtcagactggagacgcagactccgtacctgacccccagcctctcggacagccaccagcagcccccacaagtttgggatctactacaatggctacaggcagtggcgcaccaatggcagacaataacgagggtgccgatggagtgggtaattcctcaggaaattggcattgcgattcccaatggctgggcgacagagtcatcaccaccagcacccgaacctgggccctgcccacctacaacaaccacctctacaagcaaatctccagccaatcaggagcctcgaacgacaaccactactttggctacagcaccccctgggggtattttgacttcaacagattccactgtcacttctccccacgtgattggcaaagactcatcaacaacaactggggattccgacccaagagactcaacttcaagctctttaacattcaagtcaaagaggtcacgcagaatgacggtacgacgacgattgccaataaccttaccagcacggttcaggtgtttactgactcggagtaccagctcccgtacgtcctcggctcggcgcatcaaggatgcctcccgccgtttccagcggacgtcttcatggtcccacagtatggatacctcaccctgaacaacgggagtcaggcggtaggacgcccttccttttactgcctggagtactttccttctcagatgctgcgtactggaaacaactttaccttcagctacacctttgaggacgttcctttccacagcagctacgctcacagccagagtttggaccggctgatgaatcctctgatcgaccagtatctatattatctgaacaggacacaatcaaatagtggaactcttcagcagtctaggctactgtttagccaagctggacccaccagcatgtctcttcaagctaaaaactggctgcctggaccttgctacagacagcagcgtctttcaaagcaggcaaacgacaacaacaacagcaactttccctggactgcggctacaaagtatcatctaaatggccgggactcgttggttaatccaggaccagctatggccagccacaaagacgatgaagaaaagtttttccccatgcatgggaccctgatatttggtaaacaaggaacaaatgctaacgacgcggatttggagcatgttatgattacagatgaagaagaaatcaggaccaccaatcctgtggctacagagcagtacggaaacgtgtcaaataatttgcaaaactcaaatactggtccaactacagaaaatgtcaatcaccagggagcgttacctggtatggtgtggcaggatcgagacgtgtacctgcagggacccatttgggccaagattcctcacaccgacggacactttcacccttctccactgatgggaggttttggactcaaacacccgcctcctcaaatcatgatcaaaaacactcccgttccagccaatcctcccacaaacttcagttctgccaagtttgcttctttcatcacacagtattccacgggccaggtcagcgtggagattgagtgggagctgcagaaggagaacagcaaacgctggaaccccgagatccagtatacttccaactacaacaaatctgttaatgtggactttactgtggacactaatggtgtgtattcagagcctcgccccattggcaccagatacctgactcgtaatctgtaa

SEQ ID NO: 195 - protein, 735 aa, Artificial Sequence
  Description of Artificial Sequence: Synthetic polypeptide
MAADGYLPDWLEDTLSEGIRQWWKLKPGPPPPKPAERHQDDSRGLVLPGYKYLGPFNGLDKGEPVNEADAAALEHDKAYDRQLDSGDNPYLKYNHADAEFQERLKEDTSFGGNLGRAVFQAKKRVLEPLGLVEEPVKTAPGKKRPVEHSPVEPDSSSGTGKAGHQPARKRLNFGQTGDADSVPDPQPLGQPPAAPTSLGSTTMATGSGAPMADNNEGADGVGNSSGNWHCDSQWLGDRVITTSTRTWALPTYNNHLYKQISSQSGASNDNHYFGYSTPWGYFDFNRFHCHFSPRDWQRLINNNWGFRPKRLNFKLFNIQVKEVTQNDGTTTIANNLTSTVQVFTDSEYQLPYVLGSAHQGCLPPFPADVFMVPQYGYLTLNNGSQAVGRPSFYCLEYFPSQMLRTGNNFTFSYTFEDVPFHSSYAHSQSLDRLMNPLIDQYLYYLNRTQSNSGTLQQSRLLFSQAGPTSMSLQAKNWLPGPCYRQQRLSKQANDNNNSNFPWTAATKYHLNGRDSLVNPGPAMASHKDDEEKFFPMHGTLIFGKQGTNANDADLEHVMITDEEEIRTTNPVATEQYGNVSNNLQNSNTGPTTENVNHQGALPGMVWQDRDVYLQGPIWAKIPHTDGHFHPSPLMGGFGLKHPPPQIMIKNTPVPANPPTNFSSAKFASFITQYSTGQVSVEIEWELQKENSKRWNPEIQYTSNYNKSVNVDFTVDTNGVYSEPRPIGTRYLTRNL

SEQ ID NO: 196 - DNA, 2208 bp, Artificial Sequence
  Description of Artificial Sequence: Synthetic polynucleotide
atggctgccgatggttatcttccagattggctcgaggacactctctctgaaggaataagacagtggtggaagctcaaacctggcccaccaccaccaaagcccgcagagcggcataaggacgacagcaggggtcttgtgcttcctgggtacaagtacctcggacccttcaacggactcgacaagggagagccggtcaacgaggcagacgccgcggccctcgagcacgacaaggcctacgaccggcagctcgacagcggagacaacccgtacctcaagtacaaccacgccgacgcggagtttcaggagcgccttaaagaagatacgtcttttgggggcaacctcggacgagcagtcttccaggcaaaaaagagggttcttgaacctctgggcctggttgaggagcctgttaaaacggctccgggaaaaaagaggccggtagagcactctcctgcggagccagactcctcctcgggaaccggaaaagcgggccagcagcctgcaagaaaaagattgaatttcggtcagactggagacgcagactccgtacctgacccccagcctctcggacagccaccagcagccccctctggtctgggaactaatacgatggcttcaggcagtggcgcaccaatggcagacaataacgagggcgccgacggagtgggtaattcctcgggaaattggcattgcgattccacatggatgggcgacagagtcatcaccaccagcacccgaacttgggccctgcccacctacaacaaccatctctacaagcaaatctccagccaatcaggagccagcaacgacaaccactactttggctacagcaccccttgggggtattttgacttcaacagattccactgccacttttcaccacgtgactggcaaagactcatcaacaacaactggggattccggcccaagagactcaacttcaagctctttaacattcaagtcaaagaggtcacgcagaatgacggtacgacgacgattgccaataaccttaccagcacggttcaggtgtttactgactcggagtaccagctcccgtacgtcctcggctcggcgcatcaaggatgcctcccgccgttcccagcagacgtcttcatggtgccacagtatggatacctcaccctgaacaacgggagtcaggcagtaggacgctcttcattttactgcctggagtactttccttctcagatgctgcgtaccggaaacaactttaccttcagctacacctttgaggacgttcctttccacagcagctacgctcacagccagagtttggaccgtctcatgaatcctctcatcgaccagtacctgtattacttgagcagaacaaacactccaagcggaaccaccacgcagtccaggcttcagttttctcaggccggagcaagtgacattcgggaccagtctaggaactggcttcctggaccctgttaccgccagcagcgagtatcaaagacatctgcggataacaacaacagtgaatactcgtggactggagctaccaagtaccacctcaatggcagagactctctggtgaatccgggcccggccatggccagccacaaggacgatgaagaaaagttttttcctcagagcggggttctcatctttgggaagcaaggctcagagaaaacaaatgtggacattgaaaaggtcatgattacagacgaagaggaaatcaggaccaccaatcccgtggctacggagcagtatggttctgtatctaccaacctgcagggcggcaacacacaagcagctaccgcagatgtcaacacacaaggcgttcttccaggcatggtctggcaggacagagacgtgtacctgcaggggcccatctgggcaaagattccacacacggacggacattttcacccctctcccctcatgggcggattcggacttaaacaccctcctccacagattctcatcaagaacaccccggtacctgcgaatccttcgaccaccttcagtgcggcaaagtttgcttctttcatcacacagtattccacggggcaggtcagcgtggagatcgagtgggagctgcagaaggagaacagcaaacgctggaatcccgagatccagtacacttccaactacaacaaatctgttaatgtggactttactgttgacactaatggcgtgtattcagagcctcgccccattggcaccagatacctgactcgtaatctgtaa

SEQ ID NO: 197 - protein, 735 aa, Artificial Sequence
  Description of Artificial Sequence: Synthetic polypeptide
MAADGYLPDWLEDTLSEGIRQWWKLKPGPPPPKPAERHKDDSRGLVLPGYKYLGPFNGLDKGEPVNEADAAALEHDKAYDRQLDSGDNPYLKYNHADAEFQERLKEDTSFGGNLGRAVFQAKKRVLEPLGLVEEPVKTAPGKKRPVEHSPAEPDSSSGTGKAGQQPARKRLNFGQTGDADSVPDPQPLGQPPAAPSGLGTNTMASGSGAPMADNNEGADGVGNSSGNWHCDSTWMGDRVITTSTRTWALPTYNNHLYKQISSQSGASNDNHYFGYSTPWGYFDFNRFHCHFSPRDWQRLINNNWGFRPKRLNFKLFNIQVKEVTQNDGTTTIANNLTSTVQVFTDSEYQLPYVLGSAHQGCLPPFPADVFMVPQYGYLTLNNGSQAVGRSSFYCLEYFPSQMLRTGNNFTFSYTFEDVPFHSSYAHSQSLDRLMNPLIDQYLYYLSRTNTPSGTTTQSRLQFSQAGASDIRDQSRNWLPGPCYRQQRVSKTSADNNNSEYSWTGATKYHLNGRDSLVNPGPAMASHKDDEEKFFPQSGVLIFGKQGSEKTNVDIEKVMITDEEEIRTTNPVATEQYGSVSTNLQGGNTQAATADVNTQGVLPGMVWQDRDVYLQGPIWAKIPHTDGHFHPSPLMGGFGLKHPPPQILIKNTPVPANPSTTFSAAKFASFITQYSTGQVSVEIEWELQKENSKRWNPEIQYTSNYNKSVNVDFTVDTNGVYSEPRPIGTRYLTRNL

SEQ ID NO: 198 - DNA, 3161 bp, Artificial Sequence
  Description of Artificial Sequence: Synthetic polynucleotide
gattgaatttagcggccgcgaattcgcccttgctgcgtcaactggaccaatgagaactttccattcaatgattgcgtcgacaagatggtgatctggtgggaggagggaaagatgaccgccaaggtcatggagtcggccaaagccattctcggaggaagcaaggtgcgcgtggaccagaaatgtaagtcctcggcccagatagacccgactcccgtgattgtcacctccaacaccaacatgtgcgccgtgattgacgggaactcaacgaccttcgagcaccagcagccgttgcaagaccggatgttcaaatttgaactcacccgccgtctggatcatgactttgggaaggtcaccaagcaggaagtcaaagactttttccggtgggcaaaggatcacgtggttgaggtggagcatgaattctacgtcaaaaagggtggagccaagaaaagacccgcccccagtgacgcagatataagtgagcccaaacgggcgcgcgggtcagttgcgcagccatcgacgtcagacgcggaagcttcgatcaactacgcggacaggtaccaaaacaaatgttctcgtcacgtgggcatgaatctgatgctgtttccctgcagacaatgcgagagaatgaatcaaaattcaaatatctgcttcactcacggacagaaggactgtttagagtgctttcccgtgtcagaatctcaacccgtttctgtcgtcaaaaaggcgtatcagaaactttgctacattcatcatatcatgggaaaggtgccagacgcttgcactgcctgcgatctggtcaatgtggatttggatgactgcatctctgaacaataaatgatttaaatcaggtatggctgccgatggttatcttccagattggctcaaggacactctctctgaaggaataagacagtggtggaagctcaaacctggcccaccaccaccaaagcccgcagagcggcataaggacgacagcgggggtcttgtgcttcctgggtacaagtacctcggacccttcaacggactcgacaagggagagccggtcaacgaggcagacgccgcggccctcgagtacgacaaggcctacgaccggcagctcgacagcggagacaacccgtacctcaagtacaaccacgccgacgcggagtttcaggagcgccttaaagaagatacgtcttttgggggcaacctcggacgagcagtcttccaggcgaaaaagagggttcttgaacctctgggcctggttgaggaacctgttaagacggctccgggaaaaaagaggccggtagagcactctcctgtggagccagactcctcctcgggaacaggaaaagcgggccagcagcctgcgagaaagagattgaattttggtcagactggagacgcagactccgtacctgacccccagcctctcggacagccaccagcagccccctctggtctgggaactaatacgatggctacaggcagtggcgcaccaatggcagacaataacgagggcgccgacggagtgggtaattcctcgggaagttggcattgcgattccacatggatgggcgacagagtcatcaccaccagcacccgaacctgggctctgcccacctacaacaaccatctgtacaagcagatctccagccaatcaggagccagcaacgacaaccactactttggctacagcaccccttgggggtattttgacttcaacagattccactgccacttttcaccacgtgactggcaaagactcatcaacaacaactggggattccggcccaagagactcaacttcaagctctttaacattcaagtcaaggaggtcacgcagaatgacggtacgacgacgattgccaataaccttaccagcacggttcaggtgtttactgactcggagtaccagctcccgtacgtccccggctcggcgcatcaaggatgcctcccgccgttcccagcagacgtcttcatggtgccacagtatggatacctcaccctgaacaacgggagtcaggcagtaggacgctcttcattttactgcctggagtactttccttctcagatgcttcgtaccggaaacaactttaccttcagctacacctttgaggatgttcctttccacagcagctacgctcacagccagagtttggaccgtctcatgaatcctctcatcgaccagtacctgtattacttgagcagaacaaacactccaagcggaaccaccacgcagtccaggcttcagttttctcaggccggagcaagtgacattcgggaccagtctaggaactggcttcctggaccctgttaccgccagcagcgagtatcaaagacagctgcggacaacaacaacagtgaatactcgtggactggagctaccaagtaccacctcaatggcagagactctctggtgaatccgggcccggccatggccagccacaaggacgatgaagaaaagttttttcctcaaagcggggttctcatctttgggaagcaaggctcagagaaaacaaatgtggacattgaaaaggtcatgattacagacgaagaggaaatcagaaccaccaatcccgtggccacggagcagtatggttctgtatctaccaacctccagagcggcaacacacaagcagctactgcagatgtcaacacacaaggcgttcttccaggcatggtctggcaggacagagacgtgcacctgcaggggcctatctgggcaaagattccacacacggacggacattttcacccctctcccctcatgggcggatttggacttaaacaccctcctccacagattctcatcaagaacaccccggtacctgcaaatccttcgaccaccttcagtgcggcaaagtttgcttccttcatcacacagtattccacagggcaggtcagcgtggagatcgagtgggagctgcagaaggagaacagcaaacgctggaaccccgagatccagtacacttccaactacaacaaatctgttaatgtggactttactgtggacactaatggtgtgtattcagagcctcgccccattggcaccagatacctgactcgtaatctgtaattgcttgttaatcaataaaccgtttaattcgtttcagttgaactttggtctctgcgaagggcgaattcgtttaaaccctgcaggactagtccctttagtgagg

SEQ ID NO: 199 - DNA, 3162 bp, Artificial Sequence
  Description of Artificial Sequence: Synthetic polynucleotide
gaattgaatttagcggccgcgaattcgcccttcgcagagaccaaagttcaactgaaacgaattaaacggtttattgattaacaagcaattacagattacgagtcaggtatctggtgccaatggggcgaggctctgaatacacgccattagtgtccacagtaaagtccacattaacagacttgttgtagttggaagtgtactgaatttcgggattccagcgtttgctgttttccttctgcagctcccactcgatctccacgctgacctgtcccgtggagtactgtgtgatgaaggaagcaaactttgccgcactgaaggtggtcgaaggattcgcaggtaccggggtgttcttgatgagaatctgtggaggagggtgtttaagtccgaatccacccatgaggggagaggggtgaaaatgtccgtccgtgtgtggaatctttgcccagatgggcccctgaaggtacacatctctgtcctgccagaccatgcctggaagaacgccttgtgtgttgacatctgcggtagctgcttgtctgttgcctctctggaggttggtagatacagaaccgtactgctccgtagccacgggattggttgtcctgatttcctcttcgtctgtaatcatgaccttttcaatgtccacatttgttttctctgagccttgcttcccaaagatgagaaccccgctctgaggaaaaaacttttcttcattgtccttgtggcttgccatggccgggcccggattcaccagagagtctctgccattgaggtggtacttggtagctccagtccacgagtattcactgttgttgttatccgcagatgtctttgatactcgctgctggcggtaacagggtccaggaagccagttcctagactggtcccgaatgtcactcgctccggcctgagaaaactgaagccttgactgcgtggtggttccacttggagtgtttgttgtgctcaagtaatacaggtactggtcgatgagaggattcatgagacggtccagactctggctgtgagcgtagccgctgtggaaaggaacgtcctcaaaagtgtagctgaaggtaaagttgtttccggtacgcagcatctgagaaggaaagtactccaggcagtaaaatgaagagcgtcctactgcctgactcccgttgttcagggtgaggtatccatactgtggcaccatgaagacgtctgctgggaacggcgggaggcatccttgatgcgccgagccgaggacgtacgggagctggtactccgagtcagtaaacacctgaaccgtgctggtaaggttattggcaatcgtcgtcgtaccgtcattctgcgtgacctctttgacttgaatgttaaagagcttgaagttgagtctcttgggtcggaatccccagttgttgttgatgagtctttgccagtcacgtggtgaaaagtggcagtggaatctgttgaagtcaaaatacccccaaggggtgctgtagccaaagtagtgattgtcgttcgaggctcctgattggctggaaatttgtttgtagaggtggttgttgtaggtgggcagggcccaggttcgggtgctggtggtgatgactctgtcgcccatccatgtggaatcgcaatgccaatttcccgaggaattacccactccgtcggcgccctcgttattgtctgccattggtgcgccactgcctgtagccatcgtattagttcccagaccagagggggctgctggtggctgtccgagaggctgggggtcaggtactgagtctgcgtctccagtctgaccaaaattcaatctttttcttgcaggctgctggcccgcctttccggttcccgaggaggagtctggctccacaggagagtgctctaccggcctcttttttcctggagccgtcttgacaggttccccaaccaggcccagaggttcaagaaccctctttttcgcctggaagactgctcgtccgaggttgcccccaaaagacgtatcttctttaaggcgctcctgaaactccgcgtcggcgtggttgtacttgaggtacgggttgtctccgctgtcgagctgccggtcgtaggctttgtcgtgctcgagggccgcggcgtctgcctcgttgaccggctctcccttgtcgagtccgttgaagggtccgaggtacttgtacccaggaagcacaagacccctgctgtcgtccttatgccgctctgcgggctttggtggtggtgggccaggtttgagcttccaccactgtcttattccttcagagagagtgtcctcgagccaatctggaagataaccatcggcagccatacctgatttaaatcatttattgttcaaagatgcagtcatccaaatccacattgaccagatcgcaggcagtgcaagcgtctggcacctttcccatgatatgatgaatgtagcacagtttctgatacgcctttttgacgacagaaacgggttgagattctgacacgggaaagcactctaaacagtctttctgtccgtgagtgaagcagatatttgaattctgattcattctctcgcattgtctgcagggaaacagcatcagattcatgcccacgtgacgagaacatttgttttggtacctgtctgcgtagttgatcgaagcttccgcgtctgacgtcgatggctgcgcaactgactcgcgcacccgtttgggctcacttatatctgcgtcactgggggcgggtcttttcttggctccaccctttttgacgtagaattcatgctccacctcaaccacgtgatcctttgcccaccggaaaaagtctttgacttcctgcttggtgaccttcccaaagtcatgatccagacggcgggtgagttcaaatttgaacatccggtcttgcaacggctgctggtgttcgaaggtcgttgagttcccgtcaatcacggcgcacatgttggtgttggaggtgacgatcacgggagtcgggtctatctgggccgaggacttgcatttctggtccacgcgcaccttgcttcctccgagaatggctttggccgactccacgaccttggcggtcatcttcccctcctcccaccagatcaccatcttgtcgacacagtcgttgaagggaaagttctcattggtccagttgacgcagcaagggcgaattcgtttaaacctgcaggactagtccctttagtgaggg

SEQ ID NO: 200 - DNA, 3164 bp, Artificial Sequence
  Description of Artificial Sequence: Synthetic polynucleotide
gcgaattgaatttagcggccgcgaattcgcccttcgcagagaccaaagttcaactgaaacgaattaaacggtttattgattaacaagcaattacaaattacgagtcaggtatctggtgccaatggggcgaggctctgaatacacgccattagtgtccacagtaaagtccacattaacagacttgttgtagttggaagtgtactgaatttcgggattccagcgtttgctgttttccttctgcagctcccactcgatctccacgctgacctgtcccgtggagtactgtgtgatgaaggaagcaaactttgccgcactgaaggtggtcgaaggattcgcaggtaccggggtgttcttgatgagaatctgtggaggagggtgtttaggtccgaatccacccatgaggggagaggggtgaaaatgtccgtccgtgtgtggaatctttgcccagatgggcccctgaaggtacacatctctgtcctgccagaccatgcctggaagaacgccttgtgtgttgacatctgcggtagctgcttgtctgttgcctctctggaggttggtagatacagaaccatactgctccgtagccacgggattggttgtcctgatttcctcttcgtctgtaatcatgaccttttcaatgtccacatttgttttctctgagccttgcttcccaaagatgagaaccccgctctgaggaaaaaacttttcttcattgtccttgtggcttgccatggccgggcccggattcaccagagagtctctgccattgaggtggtacttggtagctccagtccacgagtattcactgttgttgttatccgcagatgtctttgatactcgctgctggcggtaacagggtccaggaagccagttcctagactggtcccgaatgtcactcgctccggcctgagaaaactgaagccttgactgcgtggtggttccacttggagtgtttgttgtgctcaagtaatacaggtactggtcgatgagaggattcatgagacggtccagactctggctgtgagcgtagctgctgtggaaaggaacgtcctcaaaagtgtagctgaaggtaaagttgtttccggtacgcagcatctgagaaggaaagtactccgggcagtaaaatgaagagcgtcctactgcctgactcccgttgctcagggtgaggtatccatactgtggcaccatgaagacgtctgctgggaacggcgggaggcatccttgatgcgccgagccgaggacgtacgggagctggtactccgagtcagtaaacacctgaaccgtgctggtaaggttattggcaatcgtcgtcgtaccgtcattctgcgtgacctctttgacttgaatgttaaagagcttgaagttgagtctcttgggtcggaatccccagttgttgttgatgagtctttgccagtcacgtggtgaaaagtggcagtggaatctgttgaagtcaaaatacccccaaggggtgctgtagccaaagtagtgattgtcgttcgaggctcctgattggctggaaatttgtctgtagaggtggttgttgtaggtgggcagggcccaggttcgggtgctggtggtgatgactctgtcgcccatccatgtggaatcgcaatgccgatttcccgaggaattacccactccgtcggcgccctcgttattgtctgccattggtgcgccactgcctgtagccatcgtattagttcccagaccagagggggctgctggtggctgtccgagaggctgggggtcaggtactgagtctgcgtctccagtctgaccaaaattcaatctttttcttgcaggctgctggcccgcctttccggttcccgaggaggagtctggctccacaggagagtgctctaccggcctcttttttcccggagccgtcttaacaggttccccaaccaggcccagaggttcaagaaccctctttttcgcctggaagactgctcgtccgaggttgcccccaaaagacgtatcttctttaaggcgctcctgaaactccgcgtcggcgtggttgtacttgaggtacgggttgtctccgctgtcgagctgccggtcgtaggctttgtcgtgctcgagggccgcggcgtctgcctcgttgaccggctctcccttgtcgagtccgttgaagggtccgaggtacttgtacccaggaagcacaagacccctgctgtcgtccttatgccgctctgcgggctttggtggtggtgggccaggtttgagcttccaccactgtcttattccttcagagagagtgtcctcgagccaatctggaagataaccatcggcagccatacctgatttaaatcatttattgttcaaagatgcagtcatccaaatccacattgaccagatcgcaggcagtgcaagcgtctggcacctttcccatgatatgatgaatgtagcacagtttctgatacgcctttttgacgacagaaacgggttgagattctgacacgggaaagcactctaaacagtctttctgtccgtgagtgaagcagatatttgaattctgattcattctctcgcattgtctgcagggaaacagcatcagattcatgcccacgtgacgagaacatttgttttggtacctgtctgcgtagttgatcgaagcttccgcgtctgacgtcgatggctgcgcaactgactcgcgcacccgtttgggcccacttatatctgcgtcactgggggcgggtcttttcttggctccaccctttttgacgtagaattcatgctccacctcaaccacgtgatcctttgcccaccggaaaaagtctttgacttcctgcttggtgaccttcccaaagtcatgatccagacggcgggtgagttcaaatttgaacatccggtcttgcaacggctgctggtgttcgaaggtcgttgagttcccgtcaatcacggcgcacatgttggtgttggaggtgacgatcacgggagtcgggtctatctgggccgaggacttgcatttctggtccacgcgcaccttgcttcctccgagaatggctttggccgactccacgaccttggcggtcatcttcccctcctcccaccagatcaccatcttgtcgacacagtcgttgaagggaaagttctcattggtccagttgacgcagcaagggcgaattcgtttaaacctgcaggactagtccctttagtgaggg

SEQ ID NO: 201 - DNA, 3163 bp, Artificial Sequence
  Description of Artificial Sequence: Synthetic polynucleotide
accctcactaaagggactagtcctgcaggtttaaacgaattcgcccttgctgcgtcaactggagcaatgagaactttcccttcaacgactgtgtcgacaagatggtgatttggtgggaggaggggaagatgaccgccaaggtcgtggagtcggccaaagccattctcggaggaagcaaggtgcgcgtggaccagaaatgcaagtcctcggcccagatagatccgactcccgtgatcgtcacctccaacaccaacatgtgcgccgtgattgacgggaactcaacgaccttcgaacaccagcagccgttgcaagaccggatgttcaaatttgaactcacccgccgtctggatcatgactttgggaaggtcaccaagcaggaagtcaaagactttttccggtgggcaaaggatcacgtggttgaggtggagcatggattctacgtcaaaaagggtggagccaagaaaagacccgcccctagtgacgcagatataagtgagcccaaacgggtgcgcgagtcagttgcgcagccatcgacgtcggacgcggaagcttcgatcaactacgcggacaggtaccaaaacaaatgttctcgtcacgtgggcatgaatctgatgctgtttccctgcagacaatgcgagagaatgaatcaaaattcaaatatctgcttcactcacggacagaaagactgtttagagtgctttcccgtgtcagaatctcaacctgtttctgtcgtcaaaaaggcgtatcagaaactgcgctacattcatcatatcatgggaaaggtgccagacgcttgcactgcctgcgatctggtcaatgtggatttggatgactgcatctctgaacaataaatgatttaaatcaggtatggctgccgatggttatcttccagattggctcgaggacactctctctgaaggaataagacagtggtggaagctcaaacctggcccaccaccaccaaagcccgcagagcggcataaggacgacagcaggggtcttgtgcttcctgggtacaagtacctcggacccttcaacggactcgacaagggagagccggtcaacgaggcagacgccgcggccctcgagcacgacaaggcctacgaccggcagctcgacagcggagacaacccgtacctcaagtacaaccacgccgacgcggagtttcaggagcgtcttaaagaagatacgtcttttgggggcaacctcggacgagcagtcttccaggcgaaaaagagggttcttgaacctctgggcctggttgaggaacctgttaagacggctccgggaaaaaagaggccggtagagcactctcctgcggagccagactcctcctcgggaaccggaaaagcgggccagcagcctgcaagaaaaagactgaatttcggtcagactggagacgcagactccgtacctgacccccagcctctcggacagccaccagcagcccccacaagtttgggatctactacaatggctacaggcagtggcgcaccaatggcagacaataacgagggtgccgatggagtgggtaattcctcaggaaattggcattgcgattcccaatggctgggcgacagagtcatcaccaccagcacccgaacctgggccctgcccacctacaacaaccacctttacaagcaaatctccagccaatcaggagcctcaaacgacaaccactactttggctacagcaccccctgggggtattttgacttcaacagattccactgccacttttcaccacgtgactggcaaagactcatcaacaacaactggggattccgacccaagagactcaacttcaagctctttaacattcaagtcaaagaggtcacgcagaatgacggtacgacgacgattgccaataaccttaccagcacggttcaggtgtttactgactcggagtaccagctcccgtacgtcctcggctcggcgcatcaaggatgcctcccgccgtttccagcggacgtcttcatggtcccacagtatggatacctcaccctgaacaacgggagtcaggcggtaggacgctcttccttttactgcctggagtgctttccttctcagatgctgcgtactggaaacaactttcagttcagctacacttttgaagacgtgcctttccacagcagctacgctcacagccagagtttggatcggctgatgaatcctctgatcgaccagtacctgtattatctaaacagaacacaaacagctagtggaactcagcagtctcggctactgtttagccaagctggacccacaagcatgtctcttcaagctaaaaactggctgcctggaccgtgttatcgccagcagcgtttgtcaaagcaggcaaacgacaacaacaacagcaactttccctggactggagctaccaagtaccacctcaatggcagagactctttggtgaacccgggcccggccatggccagccacaaggacgatgaagaaaagtttttccccatgcatggaaccctaatatttggtaaagaaggaacaaatgctaccaacgcggaattggaaaatgtcatgattacagatgaagaggaaatcaggaccaccaatcccgtggctacagagcagtacggatatgtgtcaaataatttgcaaaactcaaatactgctgcaagtactgaaactgtgaatcaccaaggagcattacctggtatggtgtggcaggatcgagacgtgtacctgcagggacccatttgggccaagattcctcacaccgatggacactttcatccttctccactgatgggaggttttggactcaaacacccgcctcctcagattatgatcaaaaacactcccgttccagccaatcctcccacaaacttcagttctgccaagtttgcttccttcatcacacagtattccacgggacaggtcagcgtggagatcgagtgggagctgcagaaggagaacagcaaacgctggaatcccgaaattcagtacacttccaactacaacaaatctgttaatgtggactttactgtggacactaatggtgtgtattcagagcctcgccccattggcaccagatacctgactcgtaatctgtaattgcttgttaatcaataaaccgtttaattcgtttcagttgaactttggtctctgcgaagggcgaattcgcggccgctaaattcaattcgcc

SEQ ID NO: 202 - protein, 735 aa, Artificial Sequence
  Description of Artificial Sequence: Synthetic polypeptide
MAADGYLPDWLEDTLSEGIRQWWKLKPGPPPPKPAERHKDDSRGLVLPGYKYLGPFNGLYKGEPVDEADAAALEHDKAYDRQLDSGDNPYLKYNHADAEFQERLKEDTSFGGNLGRAVFQAKKRVLEPLGLVGEPVKTAPGKKRPVEHSPVEPDSSSGTGKAGNQPARKRLNFGQTGDADSVPDPQPLGQPPAAPSGLGSTTMATGSGAPVADNNEGADGVGNSSGNWHCDSQWLGDRVITTSTRTWALPTYNNHLYKQISSQSGASNDNHYFGYSTPWGYFDFNRFHCHFSPRDRQRLINNNWGFRPKRLNFKLFNIQVKEVTQNDGTTTIANNLTSTVQVFTDSGYQLPYVLGLAHQGCLPPFPADVFMVPQYGYLTLNNGSQAVGRSSFYCLEYFPSQMLRTGNNFQFSYTFEDVPFHSSYAHSQSLDRLMNPLIDQYLYYLNKTQSNSGTLQQSRLLFSQAGPTSMSLQAKNWLPGPCYRQQRLSKQANDNNNSNFPWTAATKYHLNGRDSLVNPGPAMASHKDDEEKFFPMHGTLIFGKQGTNANDADLDNVMITDEEEIRTTNPVATEQYGYVSNNLQNSNTGPTTGTVNHQGALPGMVWQDRDVYLQGPIWAKIPHTDGHFHPSPLMGGFGLKHPPPQIMIKNTPVPANPPTNFSSAKFASFITQYSTGQVSVEIEWELQKEDSKRWNPEIQYTSNYNKPVNVDFTVDTNGVYSEPRPIGTRYLTRNL

SEQ ID NO: 203 - DNA, 2208 bp, Artificial Sequence
  Description of Artificial Sequence: Synthetic polynucleotide
atggctgccgatggttatcttccagattggctcgaggacactctctctgaaggaataagacagtggtggaagctcaaacctggcccaccaccaccaaagcccgcagagcggcataaggacgacagcaggggtcttgtgcttcctgggtacaagtacctcggacccttcaacggactctacaagggagagccggtcgacgaggcagacgccgcggccctcgagcacgacaaggcctacgaccggcagctcgacagcggagacaacccgtacctcaagtacaaccacgccgacgcggagtttcaggagcgccttaaagaagatacgtcttttgggggcaacctcggacgagcagtcttccaggccaaaaagagggttcttgaacctctgggcttggttggggagcctgttaaaacggctccgggaaaaaagaggccggtagagcactctcctgtggagccagactcctcctcgggaaccggaaaagcgggcaaccagcctgcaagaaaaagattgaattttggtcagactggagacgcagactccgtacctgacccccagcctctcggacagccaccagcagccccctctggtctgggatctactacaatggctacaggcagtggcgcaccagtggcagacaataacgagggtgccgatggagtgggtaattcctcaggaaattggcattgcgattcccaatggctgggcgacagagtcatcaccaccagcacccgaacctgggctctgcccacctacaataaccacctctacaagcaaatctccagccaatcaggagcctcaaacgacaaccactactttggctacagcaccccctgggggtattttgacttcaacagattccactgccacttttcaccacgtgaccggcaaagactcatcaacaacaactggggattccgaccaaaaagactcaacttcaagctctttaacattcaagtcaaagaggtcacgcagaatgacggtacgacgacgattgccaataaccttaccagcacggttcaggtgtttactgactcggggtaccagctcccgtacgtcctcggcttggcgcatcaaggatgcctcccgccgttcccagcagacgtcttcatggtgccacagtatggatacctcaccctgaacaacgggagtcaggcggtaggacgctcttccttttactgcctggagtactttccttctcagatgctgcgtactggaaacaactttcagttcagctacacctttgaagacgttcctttccacagcagctacgctcacagccagagtctggatcggctgatgaatcctctgatcgaccagtacctgtattatctgaacaagacacaatcaaatagtggaactcttcagcagtctcggctactgtttagccaagctggacccaccagcatgtctcttcaagctaaaaactggctgcctggaccttgctacagacagcagcgtctgtcaaagcaggcaaacgacaacaacaacagcaactttccctggactgcggctacaaagtatcatctaaatggccgggactcgttggttaatccaggaccagctatggccagccacaaagacgatgaagaaaagtttttccccatgcatggaaccctgatatttggtaaacaaggaacaaatgctaacgacgcggatttggacaatgtcatgattacagatgaagaagaaatccgcaccaccaatcccgtggctacggagcagtacggatatgtgtcaaataatttgcaaaactcaaatactggtccaactactggaactgtcaatcaccaaggagcgttacctggtatggtgtggcaggatcgagacgtgtacctgcagggacccatttgggccaagattcctcacaccgatggacactttcatccttctccacttatgggaggttttggactcaaacacccacctcctcagatcatgattaaaaacactcccgttccagccaatcctcccacaaacttcagttctgccaagtttgcttctttcatcacacagtattccacgggacaagtcagcgtggagatcgagtgggagctgcagaaggaggacagcaaacgctggaaccccgagatccagtacacttccaactataacaaacctgttaatgtggactttactgtggacactaatggtgtgtattcagagcctcgccccattggcaccagatacctgactcgtaatctgtaa

SEQ ID NO: 204 - DNA, 3161 bp, Artificial Sequence
  Description of Artificial Sequence: Synthetic polynucleotide
cgaattgatttagcggccgcgaattcgcccttcgcagagaccaaagttcaactgaaacgaattaaacggtttattgattaacaagcaattacagattacgagtcaggtatctggtgccaatggggcgaggctctgaatacacaccattagtgtccacagtaaagtccacattaacagatttgttgtagttggaagtgtactggatctcgggattccagcgtttgctgttctccttctgtagctcccactcgatctccacgctgacccgccccgtggaatactgtgtgatgaaggaagcaaactttgccgcactgaaggtggtcgaaggattcgcaggtaccggggtgtttttgatgagaatctgtggaggagggtgtttaagtccgaatccgcccatgaggggagaggggtgaaaatgtccgtccgtgtgcggaatctttgcccagataggcccctgcaggtacacgtctctgtcctgccagaccatgcctggaagaacgccttgtgtgttgacatctgcagtagatgcttgtgtgttgccgctctggaggttggtagatacagaaccatactgctccgtggccacgggattggtggttctgatttcctcttcgtctgtaatcatgaccttttcaatgtccacatttgttttctctgatccttgttttccaaagatgagaaccccgctctgaggaaaaaacttttcttcatcgtccttgtggctggccattgccgggcccggattcaccagagagtctctgccattgaggtggtacttggtagctccaatccacgagtattcactgttgttgttgtccgcagatgtctttgatactcgctgctggcggtaacagggtccaggaagccagttcctagactgatcccgaatgtcactcgctccggcctgagaaaactgaagcctggactgcgtggtggttccgcttggagtgtttgttctgctcaagtaatacaggtactggtcgatgagaggattcatgagacggtccaaactctggctgtgagcgtagctgctgtggaaaggaacatcctcaaaggtgtagctgaaggtaaagttgtttccggtacgcagcatctgagaagggaagtactccaggcagtaaaatgaagagcgtcctactgcctgactcccgttgttcagggtgaggtatccatactgtggcaccatgaagacgtctgctgggaacggcgggaggcatccttgatgcgccgagccgaggacgtacgggagctggtactccgagtcagtaaacacctgaaccgtgctggtaaggttattggcaatcgtcgtcgtaccatcattctgcgtgacctctctgacttgaatgttaaagagcttgaagttgagtctcttgggccggaatccccagttgttgttgatgagtctttgccagtcacgtggtgaaaagtggcagtggaatctgttgaagtcaaaatacccccaaggggtgctgtagccaaagtagtggttgtcgttgctggctcctgattggctggaaatctgcttgtacagatggttgttgtaggtgggcagagcccaggttcgggtgctggtggtgatgactctgtcgcccatccatgtggaatcgcaatgccaatttcccgaggaattacccactccgtcggcgccatcgttattgtctgccattggtgcgccactgcctgtagccatcgtattagttcccagaccagagggggctgctggtggctgtccgagaggctgggggtcaggtacggagtctgcgtctccagtctgaccgaaattcaatctctttcttgcaggctggttgcccgcttttccggttcccgaggaggagtctggctccacaggagagtgctctaccggcctcttttttcccggagccgtcttaacaggctcctcaaccaggcccagaggttcaagaaccctcttttttgcctggaagactgctcgtccgaggttgcccccaaaagacgtatcttctttaaggcgctcctgaaactccgcgtcggcgtggtcgtacttgaggtacgggttgtctccgctgtcgagctgccggtcgtaggccttgtcgtgctcgagggccgcggcgtctgcctcgttgaccggctctcccttgtcgagtccgttgaagggtccgaggtacttgtacccaggaagcacaagacccctgctgtcgtccttatgccgctctgcgggctttggtggtggtgggccaggtttgagcttccaccactgtcttattccttcagagagagtgtcctcgagccaatctggaagataaccatcggcagccatacctgatttaaatcatttattgttcagagatgcagtcatccaaatccacattgaccagatcgcaggcagtgcaagcgtctggcacctttcccatgatatgatgaatgtagcaaagtttctgatacgcctttttgacgacagaaacgggttgagattctgacacgggaaagcactctaaacagtctttctgtccgtgagtgaagcagatatttgaattctgattcattctctcgcattgtctgcagggaaacagcatcagattcatgcccacgtgacgagaacatttgttttggtacctgtccgcgtagttgatcgaagcttccgcgtctgacgtcgatggctgcgcaactgactcgcgcgcccgtttgggctcacttatatctgcgtcactgggggcgggtcttttcttggctccaccctttttgacgtagaattcatgctccacctcaaccacgtgatcctttgcccaccggaaaaagtctttcacttcctgcttggtgaccttcccaaagtcatgatccagacggcgggttagttcaaatttgaacatccggtcttgcaacggctgctggtgttcgaaggtcgttgagttcccgtcaatcacggcgcacatgttggtgttggaggtggcgatcacgggagtcgggtctatctgggccgaggacttgcacttttggtccacgcgcaccttgcttcctccgagaatggcttcggccgattccacgaccttggcggtcatctttccctcctcccaccagatcaccatcttgtcgacacagtcgttgaagggaaagttctcattggtccagttgacgcagcaagggcgaattcgtttaaacctgcaggaactagtcccttagtgagg

SEQ ID NO: 205 - protein, 735 aa, Artificial Sequence
  Description of Artificial Sequence: Synthetic polypeptide
MAADGYLPDWLEDTLSEGIRQWWKLKPGPPPPKPAERHKDDSRGLVLPGYKYLGPFNGLYKGEPVNEADAAALEHDKAYDRQLDSGDNPYLKYNHAGAEFQERLKEDTSFGGNLGRAVFQAKKRVLEPLGLVEEPVKTAPGKKRPVEHSPVEPDSSSGTGKAGNQPARKRLNFGQTGDADSVPDPQPLGQPPAAPSGLGSTTMATGSGAPVADNNEGADGVGNSSGNWHCDSQWLGDRVITTSTRTWALPTYNNHLYKQISSQSGASNDNHYFGYSTPWGYFDFNRFHCHFSPRDWQRLINNNWGFRPKRLNFKLFNIQVKEVTQNDGTTTIANNLTSTVQVFTDSEYQLPYVLGSAHQGCLPPFPADVFMVPQYGYLTLNNGSQAVGRSSFYCLEYFPSQMLRTGNNFQFSYTFEDVPFHSSYAHSQSLDRLMNPLIDQYLYYLNKTQSNSGTLQQSRLLFSQAGPTSMSLQAKNWLPGPCYRQQRLSKQANDNNNSNFPWTAATKYHLNGRDSLVNPGPAMASHKDDEEKFFPMHGTLIFGKQGTNANDADLDNVMITDEEEIRTTNPVATEQYGYVSNNLQDSNTGPTTGTVNHQGALPGMVWQDRDVYLQGPIWAKIPHTDGHFHPSPLMGGFGLKHPPPQIMIKNTPVPANPPTNFSSAKFASFITQYSTGQVSVEIEWELQKENSKRWNPEIQYTSNYNKSVNVDFTVDTNGVYSEPRPIGTRYLTRNL

SEQ ID NO: 206 - DNA, 2208 bp, Artificial Sequence
  Description of Artificial Sequence: Synthetic polynucleotide
atggctgccgatggttatcttccagattggctcgaggacactctctctgaaggaataagacagtggtggaagctcaaacctggcccaccaccgccaaagcccgcagagcggcataaggacgacagcaggggtcttgtgcttcctgggtacaagtacctcggacccttcaacggactctacaagggagagccggtcaacgaggcagacgccgcggccctcgagcacgacaaggcctacgaccggcagctcgacagcggagacaacccgtacctcaagtacaaccacgccggcgcggagtttcaggagcgccttaaagaagatacgtcttttgggggcaacctcggacgagcagtcttccaggccaaaaagagggttcttgaacctctgggcttggttgaggagcctgttaaaacggctccgggaaaaaagaggccggtagagcactctcctgtggagccagactcctcctcgggaaccggaaaagcgggcaaccagcctgcaagaaaaagattgaattttggtcagactggagacgcagactccgtacctgacccccagcctctcggacagccaccagcagccccctctggtctgggatctactacaatggctacaggcagtggcgcaccagtggcagacaataacgagggtgccgatggagtgggtaattcctcaggaaattggcattgcgattcccaatggctgggcgacagagtcatcaccaccagcacccgaacctgggctctgcccacctacaacaaccacctctacaagcaaatctccagccaatcaggagcctcaaacgacaaccactactttggctacagcaccccctgggggtattttgacttcaacagattccactgccacttttcaccacgtgactggcaaagactcatcaacaacaactggggattccgaccaaagagactcaacttcaagctctttaacattcaagtcaaagaggtcacgcagaatgacggtacgacgacgattgccaataaccttaccagcacggttcaggtgtttactgactcggagtaccagctcccgtacgtcctcggctcggcgcatcaaggatgcctcccgccgttcccagcagacgtcttcatggtgccacagtatggatacctcaccctgaacaacgggagtcaggcggtaggacgctcttccttttactgcctggagtactttccttctcagatgctgcgtactggaaacaactttcagttcagctacacctttgaagacgttcctttccacagcagctacgctcacagccagagtctggatcggctgatgaatcctctgatcgaccagtacctgtattatctgaacaagacacaatcaaatagtggaacccttcagcagtctcggctactgtttagccaagctggacccaccagcatgtctcttcaagctaaaaactggctgcctggaccttgctacagacagcagcgtctgtcaaagcaggcaaacgacaacaacaacagcaactttccctggactgcggctacaaagtatcatctaaatggccgggactcgttggttaatccaggaccagctatggccagccacaaagacgatgaagaaaagtttttccccatgcatggaaccctgatatttggtaaacaaggaacaaatgctaacgacgcggatttggacaatgtcatgattacagatgaagaagaaatccgcaccaccaatcccgtggctacggagcagtacggatatgtgtcaaataatttgcaagactcaaatactggtccaactactggaactgtcaatcaccaaggagcgttacctggtatggtgtggcaggatcgagacgtgtacctgcagggacccatttgggccaagattcctcacaccgatggacactttcatccttctccacttatgggaggttttggactcaaacacccacctcctcagatcatgattaaaaacactcccgttccagccaatcctcccacaaacttcagttctgccaagtttgcttctttcatcacacagtattccacgggacaagtcagcgtagagatcgagtgggagctgcagaaggagaacagcaaacgctggaaccccgagatccagtacacttccaactataacaaatctgttaatgtggactttactgtggacactaatggtgtgtattcagagcctcgccccattggcaccagatacctgactcgtaatctgtaa

SEQ ID NO: 207 - protein, 738 aa, Artificial Sequence
  Description of Artificial Sequence: Synthetic polypeptide
MAADGYLPDWLEDNLSEGIREWWDLKPGAPKPKANQQKQDDGRGLVLPGCKYLGPFNGLDKGEPVNAADAAALEHDKAYDQQLKAGDNPYLRYNHADAEFQERLQEDTSFGGNLGRAVFQAKKRVLEPLGLVEEGAKTAPGKKRPVEPSPQRSPDSSTGIGKTGQQPAKKRLNFGQTGDSESVPDPQPIGEPPAGPSGLGSGTMAAGGGAPMADNNEGADGVGSSSGNWHCDSTWLGDRVITTSTRTWALPTYNNHLYKQISNGTSGGSTNDNTYFGYSTPWGYFDFNRFHCHFSPRDWQRLINNNWGFRPKRLNFKLFNIQVKEVTQNEGTKTIANNLTSTIQVFTDSEYQLPYVLGSAHQGCPPPFPADVFMIPQYGYLTLNNGSQAVGRSSFYCLEYFPSQMRRTGNNFEFSYQFEDVPFHSSYAHSQSLDRLMNPLIDQYLYYLSRTQSTGGTAGTQQLLFSQAGPNNMSAQAKNWLPGPCYRQQRVSTTLSQNNNSNFAWTGATKYHLNGRDSLVNPGVAMATHKDDEERFFPSSGVLMFGKQGAGKDNVDYSSVMLTSEEEIKTTNPVATEQYGVVADNLQQQNAAPIVGAVNSQGALPGMVWQNRDVYLQGPIWAKIPHTDGNFHPSPLMGGFGLKHPPPQILIKNTPVPADPPTTFSQAKLASFITQYSTGQVSVEIEWELQKENSKRWNPEIQYTSNYNKSVNVDFTVDTNGVYSEPRPIGTRYLTRNL

SEQ ID NO: 208 - DNA, 2217 bp, Artificial Sequence
  Description of Artificial Sequence: Synthetic polynucleotide
atggctgccgatggttatcttccagattggctcgaggacaacctctctgagggcattcgcgagtggtgggacttgaaacctggagccccgaaacccaaagccaaccagcaaaagcaggacgacggccggggtctggtgcttcctggctgcaagtacctcggacccttcaacggactcgacaagggggagcccgtcaacgcggcggacgcagcggccctcgagcacgacaaggcctacgaccagcagctcaaagcgggtgacaatccgtacctgcggtataaccacgccgacgccgagtttcaggagcgtctgcaagaagatacgtcttttgggggcaacctcgggcgagcagtcttccaggccaagaagcgggttctcgaacctctcggtctggttgaggaaggcgctaagacggctcctggaaagaagagaccggtagagccatcaccccagcgttctccagactcctctacgggcatcggcaagacaggccagcagcccgcgaaaaagagactcaactttgggcagactggcgactcagagtcagtgcccgaccctcaaccaatcggagaaccccccgcaggcccctctggtctgggatctggtacaatggctgcaggcggtggcgctccaatggcagacaataacgaaggcgccgacggagtgggtagttcctcaggaaattggcattgcgattccacatggctgggcgacagagtcatcaccaccagcacccgaacctgggccctccccacctacaacaaccacctctacaagcaaatctccaacgggacatcgggaggaagcaccaacgacaacacctacttcggctacagcaccccctgggggtattttgactttaacagattccactgccacttctcaccacgtgactggcagcgactcatcaacaacaactggggattccggcccaagagactcaacttcaagctcttcaacatccaggtcaaggaggtcacgcagaatgaaggcaccaagaccatcgccaataaccttaccagcacgattcaggtctttacggactcggaataccagctcccgtacgtcctcggctctgcgcaccagggctgcccgcctccgttcccggcggacgtcttcatgattcctcagtacgggtacctgactctgaacaacggcagtcaggccgtgggccgttcctccttctactgcctggagtactttccttctcaaatgcggagaacgggcaacaactttgagttcagctaccagtttgaggacgtgccttttcacagcagctacgcgcatagccaaagcctggaccggctgatgaaccccctcatcgaccagtacctgtactacctgtctcggactcagtccacgggaggtaccgcaggaactcagcagttgctattttctcaggccgggcctaataacatgtcggctcaggccaaaaactggctacccgggccctgctaccggcagcaacgcgtctccacgacactgtcgcaaaataacaacagcaactttgcttggaccggtgccaccaagtatcatctgaatggcagagactctctggtaaatcccggtgtcgctatggcaacgcacaaggacgacgaagagcgattttttccatccagcggagtcttgatgtttgggaaacagggagctggaaaagacaacgtggactatagcagcgttatgctaaccagtgaggaagaaatcaaaaccaccaacccagtggccacagaacagtacggcgtggtggccgataacctgcaacagcaaaacgccgctcctattgtaggggccgtcaacagtcaaggagccttacctggcatggtctggcagaaccgggacgtgtacctgcagggtcctatctgggccaagattcctcacacggacggcaactttcatccttcgccgctgatgggaggctttggactgaaacacccgcctcctcagatcctgattaagaatacacctgttcccgcggatcctccaactaccttcagtcaagccaagctggcgtcgttcatcacgcagtacagcaccggacaggtcagcgtggaaattgaatgggagctgcagaaagagaacagcaagcgctggaacccagagattcagtatacttccaactataacaaatctgttaatgtggactttactgtggacactaatggtgtgtattcagagcctcgccccattggcaccagatacctgactcgtaatctgtaa

SEQ ID NO: 209 - DNA, 3167 bp, Artificial Sequence
  Description of Artificial Sequence: Synthetic polynucleotide
attgaatttagcggccgcgaattcgcccttcgcagagaccaaagttcaactgaaacgaattaaacggtttattgattaacaagcaattacagattacgagtcaggtacctggtgccaatggggcgaggctctgaatacacaccattagtgtccacagtaaagtccacattaacagatttgttgtagttggaagtgtactgaatctcgggattccagcgtttgctgttctccttctgcagctcccactcgatctccacgctgacctgccccgtggagtactgtgtaatgaaggaagcaaactttgccgcactgaaggtagtcgaaggattcgcaggtaccggggtgttcttgatgagaatctgcgggggagggtgtttaagtccgaatccgcccatgaggggagaggggtgaaaatgtccgtccgtgtgtggaatctttgcccagatgggcccctgcaggtacacgtctctgtcctgccacaccatgcctggaagaacgccttgtgtgttgacatctgaggtagctgcttgtgtgttgccgctctggaggttggtagatacagaaccatactgctccgtagccacgggattggtggtcctgatttcctcttcgtctgtaatcatgaccttttcaatgtccacattagtttttcccgagtcttgttttccaaagatgagaaccccgctctgaggaaaaaacttttcttcatcgtccttgtggctggccatggccgggcccggattcaccagagagtctcttccattaaggtggtacttggtagctccagtccacgagtattcactgttgttgttatccgcagatgtctttgatactcgctgctggcggtaacagggtccaggaagccagttcctagactggtcccgaatgtcacttgctccggcctgagaaaactgaagccttgactgcgtggtggttccgcttggagtgtttgttctgctcaagtaatacaggtactggtcgatgagaggattcatgagacggtccaaactctggctgtgggcgtagctgctgtggaaaggaacgtcctcaaaggtgtagctgaaggtaaagttgtttccggtacgcagcatctgagaaggaaagtactccaggcagtaaaatgaagagcgtcctactgcctgactcccgttgttcagggtgaggtatccatactgtggcaccatgaagacgtctgctgggaacggcgggaggcatccttgatgcgccgagccgaggacgtacgggagctggtactccgagtcagtaaacacctgaaccgtgctggtaaggttattggcaatcgtcgtcgtaccgtcattctgcgtgacctccttgacttgaatgttaaagagcttgaagttgagtcttttgggccggaatccccaattgttgttgatgagtctttgccagtcacgtggcgaaaagtggcagtggaatctgttgaagtcaaaatacccccaaggggtgctgtagccaaagtagtggttgtcgtttgaggctcctgattggctggaaatctgcttgtagaggtggttgttgtaggtgggcagagcccaggtgcgggtgctggtggtgatgactctgtcgcccatccatgtggaatcgcaatgccaatttcccgaggaattacccactccgtcggcgccctcgttattgtctgccattggtgcgccactgcctgtagccatcgtattagttcccagaccagagggggctgctggtggctgtccgagaggctgggggtcaggtacggagtctgcgtctccagtctgaccgaaattcaatctctttcttgcaggctgctggcccgcttttccggttcccgaggaggagtctggctccgcaggagagtgctctaccggcctcttttttcccggagccgtcttaacaggttcctcaaccaggcccagaggttcaagaaccctctttttcgcctggaagactgctcgtccgaggttgcccccaaaagacgtatcttctttaagacgctcctggaactccgcgtcggcgtggttgtacttggggtacgggttgtctccgctgtcgagctgccggtcgtaggccttgtcgtgctcgagggccgcggcgtctgcctcgttgaccggctctcccttgtcgagtccgttgaagggtccaaggtacttgtacccaggaagcacaagacccctgctgtcgtccttatgccgctctgcgggctttggtggtggtgggccaggtttgagcttccaccactgtcttattccttcagagagagtgtcctcgagccaatctggaagataaccatcggcagccatacctgatttaaatcatttattgttcagagatgcagtcatccaaatccacattgaccagatcgcaagcagtgcaagcgtctggcacctttcccatgatatgatgaatgtagcacagtttctgatacgcctttttgacgacagaaacgggttgagattctgacacgggaaagcactctaaacagtctttctgtccgtgagtgaagcagatatttgaattctgattcattctctcgcattgtctgcagggaaacagcatcagattcatgcccacgtgacgagaacatttgttttggtacctgtccgcgtagttgattgaagcttccgcgtctgacgtcgatggctgcgcaactgactcgcgcgcccgtttgggctcacttatatctgcgtcactgggggcgggtctttttttggctccaccctttttgacgtagaattcatgctctacctcaaccacgtgatcctttgcccaccggaaaaagtctttgacttcctgcttggtgaccttcccaaagtcatgatccagacggcgggtgagttcaaatttgaacatccggtcttgcaacggctgctggtgttcgaaggtcgttgagttcccgtcaatcactgcgcacatgttggtgttggaggtgacaatcacgggagtcgggtctatctgggccgaggacttgcatttctggtccacgcgcaccttgcttcctccgagaatggctttggccgactccacgaccttggcggtcatcttcccctcctcccaccagatcaccatcttgtcgacgcaatcattgaaaggaaagttctcattggtccagttgacgcagccgtagaaagggcgaattcgtttaaacctgcaggactagtccctttagtgagggt

SEQ ID NO: 210 - DNA, 3161 bp, Artificial Sequence
  Description of Artificial Sequence: Synthetic polynucleotide
aattgaatttagcggccgcgaattcgcccttcgcagagaccaaagttcaactgaaacgaattaaacggtttattgattaacaagcaattacagattacgagtcaggtatctggtgccaatggggcgaggctctgaatacacaccattagtgtccacagtaaagtccacattaacagatttgttgtagttggaagtgtactgaatctcgggattccagcgtttgctgttctccttctgcagctcccactcgatctccacgctgacctgccccgtggagtactgtgtaatgaaggaagcaaactttgccgcactgaaggtagtcgaaggattcgcaggtaccggggtgttcttgatgagaatctgcgggggagggtgtttaagtccgaatccgcccatgaggggagaggggtgaaaatgtccgtccgtgtgtggaatctttgcccagatgggcccctgcaggtacacgtctctgtcctgccacaccatgcctggaagaacgccttgtgtgttgacatctgaggtagctgcttgtgtgttgccgctctggaggttggtagatacagaaccatactgctccgtagccacgggattggtggtcctgatttcctcttcgtctgtaatcatgaccttttcaatgtccacattagtttttcccgagtcttgttttccaaagatgagaaccccgctctgaggaaaaaacttttcttcatcgtccttgtggctggccatggccgggcccggattcaccagagagtctcttccattaaggtggtacttggtagctccagtccacgagtattcactgttgttgttatccgcagatgtctttgatactcgctgctggcggtaacagggtccaggaagccagttcctagactggtcccgaatgtcacttgctccggcctgagaaaactgaagccttgactgcgtggtggttccgcttggagtgtttgttctgctcaagtaatacaggtactggtcgacgagaggattcatgagacggtccaaactctggctgtgggcgtagctgctgtggaaaggaacgtcctcaaaggtgtagctgaaggtaaagttgtttccggtacgcagcatctgagaaggaaagtactccaggcagtaaaatgaagagcgtcctactgcctgactcccgttgttcagggtgaggtatccatactgtggcaccatgaagacgtctgctgggaacggcgggaggcatccttgatgcgccgagccgaggacgtacgggagctggtactccgagtcagtaaacacctgaaccgtgctggtaaggttattggcaatcgtcgtcgtaccgtcattctgcgtgacctccttgacttgaatgttaaagagcttgaagttgagtcttttgggccgggatccccaattgttgttgatgagtctttgccagtcacgtggcgaaaagtggcagtggaatctgttgaagtcaaaatacccccaaggggtgctgtagccaaagtagtggttgtcgtttgaggctcctgattggctggaaatctgcctgtagaggtggttgttgtaggtgggcagagcccaggtgcgggtgctggtggtgatgactctgtcgcccatccatgtggaatcgcaatgccaatttcccgaggaattacccactccgtcggcgccctcgttattgtctgccattggtgcgccactgcctgtagccatcgtattagttcccagaccagagggggctgctggtggctgtccgagaggctgggggtcaggtacggagtctgcgtctccagtctgaccgaaattcaatctccttcttgcaggctgctggcccgcttttccggttcccgaggaggagtctggctccgcaagagagtgctctaccggcctcttttttcccggagccgtcttaacaggttcctcaaccaggcccagaggttcaagaaccctctttttcgcctggaagactgctcgtccgaggttgcccccaaaagacgtatcttctttaagacgctcctggaactccgcgtcggcgtggttgtacttgaggtacgggttgtctccgccgtcgagctgccggtcgtaggccttgtcgtgctcgagggccgcggcgtctgcctcgttgaccggctctcccttgtcgagtccgttgaagggtccaaggtacttgtacccaggaagcacaagacccctgctgtcgtccttatgccgctctgcgggctttggtggtggtgggccaggtttgagcttccaccactgtcttattccttcagagagagtgtcctcgagccaatctggaagataaccatcggcagccatacctgatttaaatcatttattgttcagagatgcagtcatccaaatccacattgaccagatcgcaagcagtgcaagcgtctggcacctttcccatgatatgatgaatgtagcacagtttctgatacgcctttttgacgacagaaacgggttgagattctgacacgggaaagcactctaaacagtctttctgtccgtgagtgaagcagatatttgaattctgattcattctctcgcattgtctgcagggaaacagcatcagattcatgcccacgtgacgagaacatttgttttggtacctgtccgcgtagttgattgaagcttccgcgtctgacgtcgatggctgcgcaactgactcgcgcgcccgtttgggctcacttatatctgcgtcactgggggcgggtctttttttggctccaccctttttgacgtagaattcatgctctacctcaaccacgtgatcctttgcccaccggaaaaagtctttgacttcctgcttggtgaccttcccaaagtcatgatccagacggcgggtgagttcaaatttgaacatccggtcttgcaacggctgctggtgttcgaaggtcgttgagttcccgtcaatcactgcgcacatgttggtgttggaggtgacaatcacgggagtcgggtctatctgggccgaggacttgcatttctggtccacgcgcaccttgcttcctccgagaatggctttggccgactccacgaccttggcggtcatcttcccctcctcccaccagatcaccatcttgtcgacgcaatcattgaaaggaaagttctcattggtccagttgacgcagcaagggcgaattcgtttaaacctgcaggactagtccctttagtgaggg

SEQ ID NO: 211 - DNA, 3172 bp, Artificial Sequence
  Description of Artificial Sequence: Synthetic polynucleotide
gattgaatttagcggccgcgaattcgcccttgctgcgtcaactggaccaatgagaactttcccttcaacgattgcgtcgacaagatggtgatctggtgggaggagggcaagatgaccgccaaggtcgtggagtccgccaaggccattctgggtggaagcaaggtgcgcgtggaccaaaagtgcaagtcatcggcccagatcgaccccacgcccgtgatcgtcacctccaacaccaacatgtgcgccgtgatcgacgggaacagcaccaccttcgagcaccagcagcccctgcaggaccgcatgttcaagttcgagctcacccgccgtctggagcacgactttggcaaggtgaccaagcaggaagtcaaagagttcttccgctgggctcaggatcacgtgactgaggtggcgcatgagttctacgtcagaaagggcggagccaccaaaagacccgcccccagtgacgcggatataagcgagcccaagcgggcctgcccctcagttgcggagccatcgacgtcagacgcggaagcaccggtggactttgcggacaggtaccaaaacaaatgttctcgtcacgcgggcatgcttcagatgctgtttccctgcaagacatgcgagagaatgaatcagaatttcaacgtctgcttcacgcacggggtcagagactgctcagagtgcttccccggcgcgtcggaatctcaacccgtcgtcagaaaaaagacgtatcagaaactgtgcgcgattcatcatctgctggggcgggcacccgagattgcgtgttcggcctgcgatctcgtcaacgtggacttggatgactgtgtttctgagcaataaatgacttaaaccaggtatggctgctgacggttatcttccagattggctcgaggacaacctctctgagggcattcgcgagtggtgggacctgaaacctggagcccccaagcccaaggccaaccagcagaagcaggacgacggccggggtctggtgcttcctggctacaagtacctcggacccttcaacggactcgacaagggggagcccgtcaacgcggcggacgcagcggccctcgagcacgacaaggcctacgaccagcagctcaaagcgggtgacaatccgtacctgcggtataaccacgccgacgccgagtttcaggagcgtctgcaagaagatacgtcttttgggggcaacctcgggcgagcagtcttccaggccaagaagcgggttctcgaacctctcggtctggttgaggaagctgctaagacggctcctggaaagaagagaccggtagaaccgtcacctcagcgttcccccgactcctccgcgggcatcggcaagaaaggccagcagcccgctaaaaagagactgaactttggtcagactggcgactcagagtcagtccccgaccctcaaccaatcggagaaccaccagcaggcccctctggtctgggatctggtacaatggctgcaggcggtggcgctccaatggcagacaataacgaaggcgccgacggagtgggtagttcctcaggaaattggcattgcgattccacatggctgggcgacagagtcatcaccaccagcacccgaacctgggccctgcccacctacaacaaccacctctacaagcaaatatccaatgggacatcgggaggaagcaccaacgacaacacctacttcggctacagcaccccctgggggtattttgacttcaacagattccactgccacttctcaccacgtgactggcagcgactcatcaacaacaactggggattccggccaaaaagactcagcttcaagctcttcaacatccaggtcaaggaggtcacgcagaatgaaggcaccgagaccatcgccaataaccttaccagcacgattcaggtatttacggactcggaataccagctgccgtacgtcctcggctccgcgcaccagggctgcctgcctccgttcccggcggacgtcttcatgattccccagtacggctaccttacactgaacaatggaagtcaagccgtaggccgttcctccttctactgcctggaatattttccatctcaaatgctgcgaactggaaacaattttgaattcagctacaccttcgaggacgtgcctttccacagcagctgcgcacacagccagagctcggaccgactgatgaatcctctcatcgaccagtacctgtactacttatccagaactcggtccacaggaggaactcaaggtacccagcaattgttattttctcaagctgggcctgcaaacatgtcggctcaggctaagaactggctacctggaccttgctaccggcagcagcgagtctctacgacactgtcgcaaaacaacaacagcaactttgcttggactggtgccaccaaatatcacctgaacggaagagactctttggtaaatcccggtgtcgccatggcaacccacaaggacgacgaggaacgcttcttcccgtcgagtggagtcctgatgtttggaaaacagggtgctggaagagacaatgtggactacagcagcgttatgctaaccagcgaagaagaaattaaaaccactaaccctgtagccacagaacaatacggtgtggtggctgacaacttgcagcaaaccaatacagggcctattgtgggaaatgtcaacagccaaggagccttacctggcatggtctggcagaaccgagacgtgtacctgcagggtcccatctgggccaagattcctcacacggacggcaacttccacccttcaccgctaatgggaggatttggactgaagcacccacctcctcagatcctgatcaagaacacgccggtacctgcggatcctccaacaacgttcagccaggcgaaattggcttccttcattacgcagtacagcaccggacaggtcagcgtggaaatcgagtgggagctgcagaaggagaacagcaaacgctggaacccagagattcagtacacttcaaactactacaaatctacaaatgtggactttgctgtcaatacagagggaacttattctgagcctcgccccattggtactcgttacctcacccgtaatctgtaattgctggttaatcaataaaccgtttgattcgtttcagttgaactttggtctctgcgaagggcgaattcgtttaaacctgcaggactagtccctttagtgagg

SEQ ID NO: 212 - DNA, 3172 bp, Artificial Sequence
  Description of Artificial Sequence: Synthetic polynucleotide
gattgaatttagcggccgcgaattcgcccttgctgcgtcaactggaccaatgagaactttcccttcaacgattgcgtcgacaagatggtgatctggtgggaggagggcaagatgaccgccaaggtcgtggagtccgccaaggccattctgggtggaagcaaggtgcgcgtggaccaaaagtgcaagtcatcggcccagatcgaccccacgcccgtgatcgtcacctccaacaccaacatgtgcgccgtgatcggcgggaacagcaccaccttcgagcaccagcagcccctgcaggaccgcatgttcaagttcgagctcacccgccgtctggagcacgactttggcaaggtgaccaagcaggaagtcaaagagttcttccgctgggctcaggatcacgtgactgaggtggcgcatgagttctacgtcagaaagggcggagccaccaaaagacccgcccccagtgacgcggatataagcgagcccaagcgggcctgcccctcagttgcggagccatcgacgtcagacgcggaagcaccggtggactttgcggacaggtaccaaaacaaatgttctcgtcacgcgggcatgcttcagatgctgtttccctgcaagacatgcgagagaatgaatcagaatttcaacgtctgcttcacgcacggggtcagagactgctcagagtgcctccccggcgcgtcagaatctcaacccgtcgtcagaaaaaagacgtatcagaaactgtgcgcgattcatcatctgctggggcgggcacccgagattgcgtgttcggcctgcgatctcgtcaacgtggacttggatgactgtgtttctgagcaataaatgacttaaaccaggtatggctgctgacggttatcttccagattggctcgaggacaacctctctgagggcattcgcgagtggtgggacctgaaacctggagcccccaagcccaaggccaaccagcagaagcaggacgacggccggggtctggtgcttcttggctacaagtacctcggacccttcaacggactcgacaagggggagcccgtcaatgcggcggacgcagcggccctcgagcacgacaaggcctacgaccagcagctcaaagcgggtgacaatccgtacctgcggtataaccacgccgacgccgagtttcaggagcgtctgcaagaagatacgtcttttgggggcaacctcgggcgagcagtcttccaggccaagaagcgggttctcgaacctctcggtctggttgaggaagctgctaagacggctcctggaaagaagagaccggtagaaccgtcacctcagcgttcccccgactcctccacgggcatcggcaagaaaggccagcagcccgctaaaaagagactgaactttggtcagactggcgactcagagtcagtccccgaccctcaaccaatcggagaaccaccagcaggcccctctggtctgggatctggtacaatggctgcaggcggtggcgctccaatggcagacaataacgaaggcgccgacggagtgggtagttcctcaggaaattggcattgcgattccacatggctgggcgacagagtcatcaccaccagcacccgaacctgggccctgcccacctacaacaaccacctctacaagcaaatatccaatgggacatcgggaggaagcaccaacgacaacacctacttcggctacagcaccccctgggggtattttgacttcaacagattccactgccacttctcaccacgtgactggcagcgactcatcaacaacaactggggattccggccaaaaagactcagcttcaagctcttcaacatccaggtcaaggaggtcacgcagaatgaaggcaccaagaccatcgccaataaccttaccagcacgattcaggtatttacggactcggaataccagctgccgtacgtcctcggctccgcgcaccagggctgcctgcctccgttcccggcggacgtcttcatgattccccagtacggctaccttacactgaacaatggaagtcaagccgtaggccgttcctccttctactgcctggaatattttccatctcaaatgctgcgaactggaaacaattttgaattcagctacaccttcgaggacgtgcctttccacagcggctacgcacacagccagagcttggaccgactgatgaatcctctcatcgaccagtacctgtactacttatccagaactcagtccacaggaggaactcaaggtacccagcaattgttattttctcaagctgggcctgcaaacatgtcggctcaggctaagaactggctacctggaccttgctaccggcagcagcgagtctctacgacactgtcgcaaaacaacaacagcaactttgcttggactggtgccaccaaatatcacctgaacggaagagactctttggtaaatcccggtgtcgccatggcaacccacaaggacgacgaggaacgcttcttcccgtcgagtggagtcctgatgtttggaaaacagggtgctggaagagacaatgtggactacagcagcgttatgctaaccagcgaagaagaaattaaaaccactaaccctgtagccacagaacaatacggtgtggtggctgacaacttgcagcaaaccaatacagggcctattgtgggaaatgtcaacagccaaggagccttacctggcatggtctggcagaaccgagacgtgtacctgcagggtcccatctgggccaagattcctcacacggacggcaacttccacccttcaccgctaatgggaggatttggactgaagcacccacctcctcagatcctgatcaagaacacgccggtacctgcggatcctccaacgacgttcagccaggcgaaattggcttccttcattacgcagtacagcaccggacaggtcagcgtggaaatcgagtgggagctgcagaaggagaacagcaaacgctggaacccagagattcagtacacttcaaactactacaaatctacaaatgtggactttgctgtcaatacagagggaacttattctgagcctcgccccattggtactcgttacctcacccgtaatctgtaattgctggttaatcaataaaccgtttgattcgtttcagttgaactttggtctctgcgaagggcgaattcgtttaaacctgcaggactagtccctttagtgagg

SEQ ID NO: 213 - DNA, 2208 bp, Artificial Sequence
  Description of Artificial Sequence: Synthetic polynucleotide
atggctgccgatggttatcttccagattggctcgaggacactctctctgaaggaataagacagtggtggaagctcaaacctggcccaccaccaccaaagcccgcagagcggcataaggacgacagcaggggtcttgtgcttcctgggtacaagtacctcggacccttcaacggactcgacaagggagagccggtcaacgaggcagacgccgcggccctcgagcacgacaaggcctacgaccggcagctcgaaagcggagacaacccgtacctcaagtacaaccacgccgacgcggagtttcaggagcgtcttaaagaagatacgtcttttgggggcaacctcggacgagcagtcttccaggcgaaaaagagggttcttgaacctctgggcctggttgaggagcctgttaaaacggctccgggaaaaaagaggccggtagagcactctcctgtggagccagactcctcctcgggaaccggaaaagcgggccagcagcctgcgagaaaaagattgaattttggtcagactggagacgcagactccgtacctgacccccagcctctcggacagccaccagcagccccctctggtctgggatctactacaatggcttcaggcagtggcgcaccagtggcagacaataacgagggtgccgatggagtgggtaattcctcaggaaattggcattgcgattcccaatggctgggcgacagagtcatcaccaccagcacccgaacctgggccctgcccacctacaacaaccacctctacaagcaaatctccagccaatcaggagcctcaaacgacaaccactactttggctacagcaccccctgggggtattttgacttcaacagattccactgccacttttcaccacgtgactggcaaagactcatcaacaacagctggggattccgacccaaaagactcaacttcaagctctttaacattcaagtcaaagaggtcacgcagaatgacggtacgacgacgattgccaataaccttaccagcacggttcaagtgtttaccgactcggagtaccagctcccgtacgtcctcggctcggcgcatcaaggatgcctcccgccgttcccagcagacgtctttatggtcccacagtatggatacctcaccctgaacaacgggagtcaggcggtaggacgctcttccttttactgcctggagtactttccttctcagatgctgcgtactggaaacaactttcagttcagctacacctttgaagacgttcccttccacagcagctacgctcacagccagagtctggatcggctgctgaatcctctgatcgaccagtacctatattatctgaacaagacacaatcaaatagtggaactcttcagcagtctcggctactgtttagccaagctggacccaccagcatgtctcttcaagctaaaaactggctgcctggaccttgctacagacagcagcgtctgtcaaagcaggcaaacgacaacaacaacagcaactttccctggactgcggctacaaagtatcatctaaatggccgggactcgttggttaatccaggaccagctatggccagccacaaagacgatgaagaaaagtttttccccatgcatggaaccctgatatttggtaaacaaggaacaaatgctaacgacgcggatttggacaatgtcatgattacagatgaagaagaaatccgcaccaccaatcccgtggctacggagcagtacggatatgtgtcaaataatttgcaaaactcaaatactggtccaactactggaactgtcaatcaccaaggagcgttacctggtatggtgtggcaggatcgagacgtgtacctgcagggacccatttgggccaagattcctcacacggacgggcactttcatccttctccactaatgggaggttttgggctcaaacacccgcctcctcagatcatgatcaaaaacactcccgttccagccaatcctcctacaaacttcagttcttccaagtttgcttctttcatcacacagtattccacggggcaggtcagcgtggagatcgagtgggagctgcagaaggagaacagcaaacgctggaatcccgaaattcagtatacttccaactacaacaaatctgttaatgtggactttactgtggacactaatggtgtgtattcagagcctcgccccattggcaccagatacccgactcgtaatctgtaa

SEQ ID NO: 214 - protein, 735 aa, Artificial Sequence
  Description of Artificial Sequence: Synthetic polypeptide
MAADGYLPDWLEDTLSEGIRQWWKLKPGPPPPKPAERHKDDSRGLVLPGYKYLGPFNGLDKGEPVNEADAAALEHDKAYDRQLESGDNPYLKYNHADAEFQERLKEDTSFGGNLGRAVFQAKKRVLEPLGLVEEPVKTAPGKKRPVEHSPVEPDSSSGTGKAGQQPARKRLNFGQTGDADSVPDPQPLGQPPAAPSGLGSTTMASGSGAPVADNNEGADGVGNSSGNWHCDSQWLGDRVITTSTRTWALPTYNNHLYKQISSQSGASNDNHYFGYSTPWGYFDFNRFHCHFSPRDWQRLINNSWGFRPKRLNFKLFNIQVKEVTQNDGTTTIANNLTSTVQVFTDSEYQLPYVLGSAHQGCLPPFPADVFMVPQYGYLTLNNGSQAVGRSSFYCLEYFPSQMLRTGNNFQFSYTFEDVPFHSSYAHSQSLDRLLNPLIDQYLYYLNKTQSNSGTLQQSRLLFSQAGPTSMSLQAKNWLPGPCYRQQRLSKQANDNNNSNFPWTAATKYHLNGRDSLVNPGPAMASHKDDEEKFFPMHGTLIFGKQGTNANDADLDNVMITDEEEIRTTNPVATEQYGYVSNNLQNSNTGPTTGTVNHQGALPGMVWQDRDVYLQGPIWAKIPHTDGHFHPSPLMGGFGLKHPPPQIMIKNTPVPANPPTNFSSSKFASFITQYSTGQVSVEIEWELQKENSKRWNPEIQYTSNYNKSVNVDFTVDTNGVYSEPRPIGTRYPTRNL

SEQ ID NO: 215 - DNA, 2208 bp, Artificial Sequence
  Description of Artificial Sequence: Synthetic polynucleotide
atggctgccgatggttatcttccagattggctcgaggacactctctctgaaggaataagacagtggtggaagctcaaacctggcccaccaccaccaaagcccgcagagcggcataaggacgacagcaggggtcttgtgcttcctgggtacaagtacctcggacccttcaacggactcgacaagggagagccggtcaacgaggcagacgccgcggccctcgagcacgacaaggcctacgaccggcagctcgacagcggagacaacccgtacctcaagtacaaccacgccgacgcggagtttcaggagcgtcttaaagaagatacgtcttttgggggcaacctcggacgagcagtcttccaggccaaaaagaggattcttgaacctctgggcctggttgaggaacctgttaagacggctccgggagaaaagaggccggtagagcactctcctgcggagccagactcctcctcgggaaccggaaaagcgggccagcagcctgcaagaaagagattgaattttggccagactggagacgcagactcagtacctgacccccagcctctcggacagccaccagcagccccctctggtctgggaactaatacgatggcttcaggcagtggcgcaccaatggcagacaataacgagggcgccgacggagtgggtaattcctcgggaaattggtattgcgattccacatggatgggcgacagagtcatcaccaccagcacccgcacctgggccctgcccacctacaacaaccatctgtacaagcaaatctccagccagtctggagccagcaacgacaaccactactttggctacagcaccccctgggggtattttgacttcaacagattccactgccacttctccccacgtgactggcaaagactcatcaacaacaactggggattccggcccaagagactcagcttcaagctctttaacattcaagtcaaagaggtcacgcagaatgacggtacgacgacgattgccaataaccttaccagcacggttcaggtgtttactgactcggagtaccagctcccgtacgtcctcggctcggcgcatcaaggatgcctcccgccgttcccagcagacgtcttcatggtgccacagtatggatacctcaccctgaacaacggcagtcaggcggtaggacgctcttccttttactgcctggagtactttccttctcagatgcttcgtaccggaaacaactttaccttcagctacacctttgaagacgttcctttccatagcagctacgctcacagccaaagtctggaccgtctcatgaatcctctcatcgaccagtacctgtattacttgagcagaacaaacactccaagcggaaccaccacgatgtccaggcttcagttttctcaggccggagcaagtgacattcgggaccagtctagaaactggcttcctggaccctgttaccgccagcagcgagtatcaaagacagctgcggacaacaacaacagtgattactcgtggactggagctaccaagtaccacctcaatggaagagactctctggtgaatccgggcccagctatggccagccacaaggacgatgaagaaaaatattttcctcagagcggggttctcatctttggaaaacaagactcgggaaaaactaatgtggacattgaaaaggttatgattacagacgaagaggaaatcaggaccaccaatcccgtggctacggagcagtatggttctgtatctaccaacctccagagcggcaacacacaagcagctacctcagatgtcaacacacaaggcgttcttccaggcatggtctggcaggacagagacgtgtacctgcaggggcccatctgggcaaagattccacacacggacggacattttcacccctctcccctcgtgggcggattcggacttaaacaccctcctccacaaattctcatcaagaacaccccggtacctgcgaatccttcgaccactttcagtgcggcaaagtttgcttccttcatcacacagtactccacggggcaggtcagcgtggagatcgagtgggagctgcagaaggagaacagcaaacgctggaatcccgaaattcagtacacttccaactacaacaaatctgttaatgtggactttactgtggacactaatggtgtgtattcagagcctcgccccattggcaccagatacctgactcgtaatctgtaa

SEQ ID NO: 216 - protein, 735 aa, Artificial Sequence
  Description of Artificial Sequence: Synthetic polypeptide
MAADGYLPDWLEDTLSEGIRQWWKLKPGPPPPKPAERHKDDSRGLVLPGYKYLGPFNGLDKGEPVNEADAAALEHDKAYDRQLDSGDNPYLKYNHADAEFQERLKEDTSFGGNLGRAVFQAKKRILEPLGLVEEPVKTAPGEKRPVEHSPAEPDSSSGTGKAGQQPARKRLNFGQTGDADSVPDPQPLGQPPAAPSGLGTNTMASGSGAPMADNNEGADGVGNSSGNWYCDSTWMGDRVITTSTRTWALPTYNNHLYKQISSQSGASNDNHYFGYSTPWGYFDFNRFHCHFSPRDWQRLINNNWGFRPKRLSFKLFNIQVKEVTQNDGTTTIANNLTSTVQVFTDSEYQLPYVLGSAHQGCLPPFPADVFMVPQYGYLTLNNGSQAVGRSSFYCLEYFPSQMLRTGNNFTFSYTFEDVPFHSSYAHSQSLDRLMNPLIDQYLYYLSRTNTPSGTTTMSRLQFSQAGASDIRDQSRNWLPGPCYRQQRVSKTAADNNNSDYSWTGATKYHLNGRDSLVNPGPAMASHKDDEEKYFPQSGVLIFGKQDSGKTNVDIEKVMITDEEEIRTTNPVATEQYGSVSTNLQSGNTQAATSDVNTQGVLPGMVWQDRDVYLQGPIWAKIPHTDGHFHPSPLVGGFGLKHPPPQILIKNTPVPANPSTTFSAAKFASFITQYSTGQVSVEIEWELQKENSKRWNPEIQYTSNYNKSVNVDFTVDTNGVYSEPRPIGTRYLTRNL

SEQ ID NO: 217 - DNA, 2209 bp, Artificial Sequence
  Description of Artificial Sequence: Synthetic polynucleotide
atggctgccgatggttatcctccagattggctcgaggacactctctctgaagggataagacagtggtggaagctcaaacctggcccaccaccaccaaagcccgcagagcggcataaggacgacagcaggggtcttgtgcttcctgggtacaagtacctcggacccttcaacggactcgacaagggggagccggtcaacgaggcagacgccgcggccctcgagcacgacaaggcctacgaccggcagctcgacagcggagacaacccgtacctcaagtacaaccacgccgacgcagagtttcaggagcgccttaaagaagatacgtcttttgggggcaacctcggacgagcagtcttccaggcgaaaaagagggttcttgaacctctgggcctggttgaggaacctgttaagacggctccgggaaaaaagaggccggtagagcactctcctgtggagccagactcctcctcgggaaccggaaaagcgggccagcggcctgcaagaaaaagattaaattttggtcagactggagacgcagactccgtacctgacccccagcctctcggacagccaccagcagccccctctggtctgggatctactacaatggctacaggcagtggcgcaccaatggcagacaataacgagggtgccgatggagtgggtaattcctcaggaaattggcattgcgattcccaatggctgggcgacagagtcatcaccaccagcacccgaacctgggccctgcccacatacaacaaccacctctacaagcaaatctccagccaatcaggagccagcaacgacaaccactactttggctacagcaccccctgggggtattttgacttcaacagattccactgccacttttcaccacgtgactggcaaagactcatcaacaacaactggggattccggcccaaaagactcaacttcaagctctttaatattcaagtcaaagaggtcacgcagaatgacggtacgacgacgattgccaataaccttaccagcacggttcaggtgtttactgactcggagtaccagctcccgtacgtcctgggctcggcgcatcaaggatgcctcccgccgtttccagcggacgtcttcatggtcccacagtatggatacctcaccctgaacaacgggagtcaggcggtaggacgctcttccttttactgcctggagtactttccttctcagatgctgcgtactggaaacaactttcagttcagctacacttttgaagacgtgcctttccacagcagctacgctcacagccagagtctggatcggctgatgaatcctctgatcgaccagtacctgtattatctgaacaagacacaaacaaatagtggaactcttcagcagtctcggctactgtttagccaagctggaccaaccaacatgtctcttcaagctaaaaactggctgcctggaccttgctacagacagcagcgtctgtcaaaacaggcaaacgacaacaacaacagcaactttccctggactgcagctacaaagtatcatctaaatggccgggactcgttggttaatccaggaccagctatggccagtcacaaggatgacgaagaaaagtttttccccatgcatggaaccctgatatttggtaaacaaggaacaaatgccaacgacgcggatttggaaaatgtcatgattacagatgaagaagaaatcagggccaccaatcccgtggctacggagcagtacgggactgtgtcaaataatttgcaaaactcaaacactggtccaactactggaactgtcaatcgccaaggagcgttacctggtatggtgtggcaggatcgagacgtgtacctgcagggacccatttgggccaagattcctcacaccgatggacactttcatccttctccactgatgggaggttttggactcaaacacccgcctcctcagatcatgatcaaaaacactcccgttccagccaatcctcccacaaacttcagttctgccaagtttgcttctttcatcacacagtattccacgggacaggtcagcgtggagatcgagtgggagctgcagaaggagaacagcaaacgctggaatcccgaaattcagtacacttccaactacaacaagtctgttaatgtggactttactgtggacactaatggtgtgtattcagagcctcgccccattggcaccagatacctgactcgtaatctgtaat

SEQ ID NO: 218 - protein, 735 aa, Artificial Sequence
  Description of Artificial Sequence: Synthetic polypeptide
MAADGYPPDWLEDTLSEGIRQWWKLKPGPPPPKPAERHKDDSRGLVLPGYKYLGPFNGLDKGEPVNEADAAALEHDKAYDRQLDSGDNPYLKYNHADAEFQERLKEDTSFGGNLGRAVFQAKKRVLEPLGLVEEPVKTAPGKKRPVEHSPVEPDSSSGTGKAGQRPARKRLNFGQTGDADSVPDPQPLGQPPAAPSGLGSTTMATGSGAPMADNNEGADGVGNSSGNWHCDSQWLGDRVITTSTRTWALPTYNNHLYKQISSQSGASNDNHYFGYSTPWGYFDFNRFHCHFSPRDWQRLINNNWGFRPKRLNFKLFNIQVKEVTQNDGTTTIANNLTSTVQVFTDSEYQLPYVLGSAHQGCLPPFPADVFMVPQYGYLTLNNGSQAVGRSSFYCLEYFPSQMLRTGNNFQFSYTFEDVPFHSSYAHSQSLDRLMNPLIDQYLYYLNKTQTNSGTLQQSRLLFSQAGPTNMSLQAKNWLPGPCYRQQRLSKQANDNNNSNFPWTAATKYHLNGRDSLVNPGPAMASHKDDEEKFFPMHGTLIFGKQGTNANDADLENVMITDEEEIRATNPVATEQYGTVSNNLQNSNTGPTTGTVNRQGALPGMVWQDRDVYLQGPIWAKIPHTDGHFHPSPLMGGFGLKHPPPQIMIKNTPVPANPPTNFSSAKFASFITQYSTGQVSVEIEWELQKENSKRWNPEIQYTSNYNKSVNVDFTVDTNGVYSEPRPIGTRYLTRNL

SEQ ID NO: 219 - DNA, 2208 bp, Artificial Sequence
  Description of Artificial Sequence: Synthetic polynucleotide
atggctgccgatggttatcttccagattggctcgaggacactctctctgaaggaataagacagtggtggaagctcaaacctggcccaccaccaccaaagcccgcagagcggcataaggacgacagcaggggtcttgtgcttcctgggtacaggtacctcggacccttcaacggactcgacaagggagagccggtcaacgaggcagacgccgcggccctcgagcacgacaaggcctacgaccggcagctcgacagcggagacaacccgtacctcaagtacaaccacgtcgacgcggagtttcaggagcgtcttaaagaagatacgtcttttgggggcaacctcggacgagcagtcttccaggccaaaaagaggattcttgaacctctgggcctggttgaggaacctgttaaggcggctccgggagaaaagaggccggtagagcactctcctgcggagccagactcctcctcgggaaccggaaaagcgggccagcagcctgcaagaaagagattgaattttggtcagactggagacgcagactcagtacctgacccccagcctctcggacagccaccagcagccccctctggtctgggaactaatacgatggcttcaggcagtggcgcaccaatggcagacaataacgagggcgccgacggagtgggtaattcctcgggaaattggcattgcgattccacatggatgggcgacagagtcatcaccaccagcacccgcacctgggccctgcccacctacaacaaccatctgtacaagcaaatctccagccagtctggagccagcaacgacaaccactactttggctacagcaccccctgggggcattttgacttcaacagattccactgccacttctccccacgtgactggcaaagactcatcaacaacaactggggattccggcccaagagactcagcttcaagctctttaacattcaagtcaaagaggtcacgcagaatgacggtacgacgacgattgccaataaccttaccagcacggttcaggtgtttactgactcggagtaccagctcccgtacgtcctcggctcggcgcatcaaggatgcctcccgccgttcccagcagacgtcttcatggtgccacagtatggatacctcaccctgaacaacggcagtcaggcggtaggacgctcttccttttactgcctggagtactttccttctcagatgcttcgtaccggaaacaactttaccttcagctacacctttgaagacgttcctttccatagcagctacgctcacagccaaagtctggaccgtctcatgaatcctctcatcgaccagtacctgtattacttgagcagaacaaacactccaagcggaaccaccacgatgtccaggcttcagttttctcaggccggagcaagtgacattcgggaccagtctagaaactggcttcctggaccctgttaccgccagcagcgagtatcaaagacagctgcggacaacaacaacagtgattactcgtggactggagctaccaagtaccacctcaatggaagagactctctggtgaatccgggcccagctatggccagccacaaggacgatgaagaaaaatattttcctcagagcggggttctcatctttggaaaacaagactcgggaaaaactaatgtggacattgaaaaggttatgattacagacgaagaggaaatcaggaccaccaatcccgtggctacggagcagtatggttctgtatctaccaacctccagagcggcaacacacaagcagctacctcagatgtcaacacacaaggcgttcttccaggcatggtctggcaggacagagacgtgtacctgcaggggcccatctgggcaaagattccacacacggacggacattttcacccctctccccccatgggcggattcggacttaaacaccctcctccacaaattctcatcaagaacaccccggtacctgcgaatccttcgaccactttcagtgcggcaaagtttgcttccttcatcacacagtactccacggggcaggtcagcgtggagatcgagtgggagctgcagaaggagaacagcaaacgctggaatcccgaaattcagtacacttccaactacaacaaatctgttaatgtggactttactgtggacactaatggtgtgtattcagagcctcgccccattggcgccagatacctgactcgtaatctgtaa

SEQ ID NO: 220 - protein, 735 aa, Artificial Sequence
  Description of Artificial Sequence: Synthetic polypeptide
MAADGYLPDWLEDTLSEGIRQWWKLKPGPPPPKPAERHKDDSRGLVLPGYRYLGPFNGLDKGEPVNEADAAALEHDKAYDRQLDSGDNPYLKYNHVDAEFQERLKEDTSFGGNLGRAVFQAKKRILEPLGLVEEPVKAAPGEKRPVEHSPAEPDSSSGTGKAGQQPARKRLNFGQTGDADSVPDPQPLGQPPAAPSGLGTNTMASGSGAPMADNNEGADGVGNSSGNWHCDSTWMGDRVITTSTRTWALPTYNNHLYKQISSQSGASNDNHYFGYSTPWGHFDFNRFHCHFSPRDWQRLINNNWGFRPKRLSFKLFNIQVKEVTQNDGTTTIANNLTSTVQVFTDSEYQLPYVLGSAHQGCLPPFPADVFMVPQYGYLTLNNGSQAVGRSSFYCLEYFPSQMLRTGNNFTFSYTFEDVPFHSSYAHSQSLDRLMNPLIDQYLYYLSRTNTPSGTTTMSRLQFSQAGASDIRDQSRNWLPGPCYRQQRVSKTAADNNNSDYSWTGATKYHLNGRDSLVNPGPAMASHKDDEEKYFPQSGVLIFGKQDSGKTNVDIEKVMITDEEEIRTTNPVATEQYGSVSTNLQSGNTQAATSDVNTQGVLPGMVWQDRDVYLQGPIWAKIPHTDGHFHPSPPMGGFGLKHPPPQILIKNTPVPANPSTTFSAAKFASFITQYSTGQVSVEIEWELQKENSKRWNPEIQYTSNYNKSVNVDFTVDTNGVYSEPRPIGARYLTRNL

SEQ ID NO: 221 - DNA, 2208 bp, Artificial Sequence
  Description of Artificial Sequence: Synthetic polynucleotide
atggctgccgatggttatcttccagattggctcgaggacaccctctctgaaggaataagacagtggtggaagctcaaacctggcccaccaccaccaaagcccgcagagcggcataaggacgacagcaggggtcttgtgcttcctgggtacaagtacctcggacccttcaacggactcgacaagggagagccggtcaacgaggcagacgccgcggccctcgagcacgacaaggcctacgaccggcagctcgacagcggagataacccgtacctcaagtacaaccacgccgacgcggagtttcaggagcgccttaaagaggatacgtcttttgggggcaacctcggacgagcagtcttccaggccaaaaagaggattcttgaacctctgggcctggttgaggaacctgttaagacggctccgggaaaaaagaggccggtagagcactctcctgcggagccagactcctcctcgggaaccggaaaagcgggccagcagcctgcaagaaagagattgaattttggtcagactggagacgcagactcagtacctgacccccggcctctcggacagccaccagcagccccctctggtctgggaactaatacgatggcttcaggcagtggcgcaccaatggcagacaataacgagggcgccgacggagtgggtaattcctcgggaaattggcattgcgattccacatggatgggcgacagagtcatcaccaccagcacccgcacctgggccctgcccacctacaacaaccatctgtacaagcaaatctccagccagtctggagccagcaacgacaaccactactttggctacagcaccccctgggggtattttgacttcaacagattccactgccacttctccccacgtgactggcaaagactcatcaacaacaactggggattccggcccaagagactcagcttcaagctctttaacattcaagtcaaagaggtcacgcagaatgacggtacgacgacgattgccaataaccttaccagcacggttcaggtgtttactgactcggagtaccagctcccgtacgtcctcggctcggcgcatcaaggatgcctcccgccgttcccagcagacgtcttcatggtgccacagtatggatacctcaccctgaacaacggcagtcaggcggtaggacgctcttccttttactgcctggagtactttccttctcagatgcttcgtaccggaaacaactttaccttcagctacacctttgaagacgttcctttccatagcagctacgctcacagccaaagtctggaccgtctcatgaatcctctcatcgaccagtacctgtattacttgagcagaacaaacactccaagcggaaccaccacgatgtccaggcttcagttttctcaggccggagcaagtgacattcgggaccagtctagaaactggcttcctggaccctgttaccgccagcagcgagtatcaaagacagctgcggacaacaacaacagtgattactcgtggactggagctaccaagtaccacctcaatggaagagactctctggtgaatccgggcccagctatggccagccacaaggacgatgaagaaaaatattttcctcagagcggggttctcatctttggaaaacaagactcgggaaaaactaatgtggacattgaaaaggttatgattacagacgaagaggaaatcaggaccaccaatcccgtggctacggagcagtatggttctgtatctaccaacctccagagcggcaacacacaagcagctacctcagatgtcaacacacaaggcgttcttccaggcatggtctggcaggacagagacgtgtacctgcaggggcccatctgggcaaagattccacacacggacggacattttcacccctctcccctcatgggcggattcggacttaaacaccctcctccacaaattctcatcaagaacaccccggtacctgcgaatccttcgaccactttcagtgcggcaaagtttgcttccttcatcacacagtactccacggggcaggtcagcgtggagatcgagtgggagctgcagaaggagaacagcaaacgctggaatcccgaaattcagtacacttccaactacaacaaatctgttaatgtggactttactgtggacactaatggtgtgtattcagagcctcgccccattggcaccagatacctgactcgtaatctgtaa

SEQ ID NO: 222 - protein, 735 aa, Artificial Sequence
  Description of Artificial Sequence: Synthetic polypeptide
MAADGYLPDWLEDTLSEGIRQWWKLKPGPPPPKPAERHKDDSRGLVLPGYKYLGPFNGLDKGEPVNEADAAALEHDKAYDRQLDSGDNPYLKYNHADAEFQERLKEDTSFGGNLGRAVFQAKKRILEPLGLVEEPVKTAPGKKRPVEHSPAEPDSSSGTGKAGQQPARKRLNFGQTGDADSVPDPRPLGQPPAAPSGLGTNTMASGSGAPMADNNEGADGVGNSSGNWHCDSTWMGDRVITTSTRTWALPTYNNHLYKQISSQSGASNDNHYFGYSTPWGYFDFNRFHCHFSPRDWQRLINNNWGFRPKRLSFKLFNIQVKEVTQNDGTTTIANNLTSTVQVFTDSEYQLPYVLGSAHQGCLPPFPADVFMVPQYGYLTLNNGSQAVGRSSFYCLEYFPSQMLRTGNNFTFSYTFEDVPFHSSYAHSQSLDRLMNPLIDQYLYYLSRTNTPSGTTTMSRLQFSQAGASDIRDQSRNWLPGPCYRQQRVSKTAADNNNSDYSWTGATKYHLNGRDSLVNPGPAMASHKDDEEKYFPQSGVLIFGKQDSGKTNVDIEKVMITDEEEIRTTNPVATEQYGSVSTNLQSGNTQAATSDVNTQGVLPGMVWQDRDVYLQGPIWAKIPHTDGHFHPSPLMGGFGLKHPPPQILIKNTPVPANPSTTFSAAKFASFITQYSTGQVSVEIEWELQKENSKRWNPEIQYTSNYNKSVNVDFTVDTNGVYSEPRPIGTRYLTRNL

SEQ ID NO: 223 - DNA, 2208 bp, Artificial Sequence
  Description of Artificial Sequence: Synthetic polynucleotide
atggctgccgatggttatcttccagattggctcgaggacactctctctgaaggaataagacagtggtggaagctcaaacctggcccaccaccaccaaagcccgcagagcggcataaggacgacagcaggggtcttgtgcttcctgggtacaagtacctcggacccttcaacggactcgacaagggagagccggtcaacgaggcagacgccgcggccctcgagcacgacaaggcctacgaccggcagctcgacagcggagacaacccgtacctcaagtacaaccacgccgacgcggagtttcaggagcgccttaaaggagatacgtcttttgggggcaacctcggacgagcagtcttccaggccaaaaagaggattcttgaacctctgggcctggttgaggaacctgttaagacggctccgggaaaaaagaggccggtagagcactctcctgcggagccagactcctcctcgggaaccggaaaagcgggccagcagcctgcaagaaagagattgaattttggtcagactggagacgcagactcagtacctgacccccagcctctcggacagccaccagcagccccctctggtctgggaactaatacgatggcttcaggcagtggcgcaccaatggcagacaataacgagggcgccgacggagtgggtaattcctcgggaaattggcattgcgattccacatggatgggcggcagagtcatcaccaccagcacccgcacctgggccctgcccacctacaacaaccatctgtacaagcaaatctccagccagtctggagccagcaacgacaaccactactttggctacagcaccccctgggggtattttgacttcaacagattccactgccacttctccccacgtgactggcaaagactcatcaacaacaactggggattccggcccaagagactcagcttcaagctctttaacattcaagtcaaagaggtcacgcagaatgacggtacgacgacgattgccaataaccttaccagcacggttcaggtgtttactgactcggagtaccagctcccgtacgtcctcggctcggcgcatcaaggatgcctcccgccgttcccagcagacgtcttcatggtgccacagtatggatacctcaccctgaacaacggcagtcaggcggtaggacgctcttccttttactgcctggagtactttccttctcagacgcttcgtaccggaaacaactttaccttcagctacacctttgaagacgttcctttccatagcagctacgctcacagccaaagtctggaccgtctcatgaatcctctcatcgaccagtacctgtattacttgagcagaacaaacactccaagcggaaccaccacgatgtccaggcttcagttttctcaggccggagcaagtgacattcgggaccagtctagaaactggcttcctggaccctgttaccgccagcagcgagtatcaaagacagctgcggacaacaacaacagtgattactcgtggactggagctaccaagtaccacctcaatggaagagactctctggtgaatccgggcccagctatggccagccacaaggacgatgaagaaaaatattttcctcagagcggggttctcatctttggaaaacaagactcgggaaaaactaatgtggacattgaaaaggttatgattacagacgaagaggaaatcaggaccaccaatcccgtggctacggagcagtatggttctgtatctaccaacctccagagcggcaacacacaagcagctacctcagatgtcaacacacaaggcgttcttccaggcatggtctggcaggacagagacgtgtacctgcaggggcccatctgggcaaagattccacacacggacggacattttcacccctctcccctcatgggcggattcggacttaaacaccctcctccacaaattctcatcaagaacaccccggtacctgcgaatccttcgaccactttcagtgcggcaaagtttgcttccttcatcacacagtactccacggggcaggtcagcgtggagatcgagtgggagctgcagaaggagaacagcaaacgctggaatcccgaaattcagtacacttccaactacaacaaatctgttaatgtggactttactgtggacactaatggtgtgtattcagagcctcgccccattggcaccagatacctgactcgtaatctgtaa

SEQ ID NO: 224 - protein, 735 aa, Artificial Sequence
  Description of Artificial Sequence: Synthetic polypeptide
MAADGYLPDWLEDTLSEGIRQWWKLKPGPPPPKPAERHKDDSRGLVLPGYKYLGPFNGLDKGEPVNEADAAALEHDKAYDRQLDSGDNPYLKYNHADAEFQERLKGDTSFGGNLGRAVFQAKKRILEPLGLVEEPVKTAPGKKRPVEHSPAEPDSSSGTGKAGQQPARKRLNFGQTGDADSVPDPQPLGQPPAAPSGLGTNTMASGSGAPMADNNEGADGVGNSSGNWHCDSTWMGGRVITTSTRTWALPTYNNHLYKQISSQSGASNDNHYFGYSTPWGYFDFNRFHCHFSPRDWQRLINNNWGFRPKRLSFKLFNIQVKEVTQNDGTTTIANNLTSTVQVFTDSEYQLPYVLGSAHQGCLPPFPADVFMVPQYGYLTLNNGSQAVGRSSFYCLEYFPSQTLRTGNNFTFSYTFEDVPFHSSYAHSQSLDRLMNPLIDQYLYYLSRTNTPSGTTTMSRLQFSQAGASDIRDQSRNWLPGPCYRQQRVSKTAADNNNSDYSWTGATKYHLNGRDSLVNPGPAMASHKDDEEKYFPQSGVLIFGKQDSGKTNVDIEKVMITDEEEIRTTNPVATEQYGSVSTNLQSGNTQAATSDVNTQGVLPGMVWQDRDVYLQGPIWAKIPHTDGHFHPSPLMGGFGLKHPPPQILIKNTPVPANPSTTFSAAKFASFITQYSTGQVSVEIEWELQKENSKRWNPEIQYTSNYNKSVNVDFTVDTNGVYSEPRPIGTRYLTRNL

SEQ ID NO: 225 - DNA, 2208 bp, Artificial Sequence
  Description of Artificial Sequence: Synthetic polynucleotide
atggctgccgatggttatcttccagattggctcgaggacactctctctgaaggaataagacagtggtggaagctcaaacctggcccaccaccaccaaagcccgcagagcggcataaggacgacagcaggggtcttgtgcttcctgggtacaagtacctcggacccttcaacggactcgacaagggagagccggtcaacgaggcagacgccgcggccctcgagcacgacaaggcctacgaccggcagctcgacagcggagacaacccgtacctcaagtacaaccacgccgacgcggagtttcaggagcgtcttaaagaagatacgtcttttgggggcaacctcggacgagcagtcttccaggccaaaaagaggattcttgaacctctgggcctggttgaggaacctgttaagacggctccgggaaaaaagaggccggtagagcactctcctgcggagccagactcctcctcgggaaccggaaaagcgggccagcagcctgcaagaaagagattgaattttggtcagactggagacgcagactcagtacctgacccccagcctctcggacagccaccagcagccccctctggtctgggaactaatacgatggcttcaggcagtggcgcaccaatggcagacaataacgagggcgccgacggagtgggtaattcctcgggaaattggcattgcgattccacatggatgggcgacagagtcatcaccaccagcacccgcacctgggccctgcccacctgcaacaaccatctgtacaagcaaatctccagccagtctggagccagcaacgacaaccactactttggctacagcaccccctgggggtattttgacttcaacagattccactgccacttctccccacgtgactggcaaagactcatcaacaacaactggggattccggcccaagagactcagcttcaagctctttaacattcaagtcaaagaggtcacgcagaatgacggtacgacgacgattgccaataaccttaccagcacggttcaggtgtttactgactcggagtaccagctcccgtacgtcctcggctcggcgcatcaaggatgcctcccgccgttcccagcagacgtcttcatggtgccacagtatggatacctcaccctgaacaacggcagtcaggcggtaggacgctcttccttttactgcctggagtattttccttctcagatgcttcgtaccggaaacaactttaccttcagctacacctttgaagacgttcctttccatagcagctacgctcacagccaaagtctggaccgtctcatgaatcctctcatcgaccagtacctgtattacttgagcagaacaaacactccaagcggaaccaccacgatgtccaggcttcagttttctcaggccggagcaagtgacattcgggaccagtctagaaactggcttcctggaccctgttaccgccagcagcgagtatcaaagacagctgcggacaacaacaacagtgattactcgtggactggagctaccaagtaccacctcaatggaagagactctctggtgaatccgggcccagctatggccagccacaaggacgatgaagaaaaatattttcctcagagcggggttctcatctttggaaaacaagactcgggaaaaactaatgtggacattgaaaaggttatgattacagacgaagaggaaatcaggaccaccaatcccgtggctacggagcagtatggttctgtatctacctacctccagagcggcaacacacaagcagctacctcagatgtcaacacacaaggcgttcttccaggcatggtctggcaggacagagacgtgtacctgcgggggcccatctgggcaaagattccacacacggacggacattttcacccctctcccctcatgggcggatttggacttaaacaccctcctccacaaattctcatcaagaacaccccggtacctgcgaatccttcgaccactttcagtgcggcaaagtttgcttccttcatcacacagtactccacggggcaggtcagcgtggagatcgagtgggagctgcagaaggagaacagcaaacgctggaatcccgaaattcagtacacttccaactacaacaaatctgttaatgtggactttactgtggacactaatggtgtgtattcagagcctcgccccattggcaccagatacctgactcgtaatctgtaa

SEQ ID NO: 226 - protein, 735 aa, Artificial Sequence
  Description of Artificial Sequence: Synthetic polypeptide
MAADGYLPDWLEDTLSEGIRQWWKLKPGPPPPKPAERHKDDSRGLVLPGYKYLGPFNGLDKGEPVNEADAAALEHDKAYDRQLDSGDNPYLKYNHADAEFQERLKEDTSFGGNLGRAVFQAKKRILEPLGLVEEPVKTAPGKKRPVEHSPAEPDSSSGTGKAGQQPARKRLNFGQTGDADSVPDPQPLGQPPAAPSGLGTNTMASGSGAPMADNNEGADGVGNSSGNWHCDSTWMGDRVITTSTRTWALPTCNNHLYKQISSQSGASNDNHYFGYSTPWGYFDFNRFHCHFSPRDWQRLINNNWGFRPKRLSFKLFNIQVKEVTQNDGTTTIANNLTSTVQVFTDSEYQLPYVLGSAHQGCLPPFPADVFMVPQYGYLTLNNGSQAVGRSSFYCLEYFPSQMLRTGNNFTFSYTFEDVPFHSSYAHSQSLDRLMNPLIDQYLYYLSRTNTPSGTTTMSRLQFSQAGASDIRDQSRNWLPGPCYRQQRVSKTAADNNNSDYSWTGATKYHLNGRDSLVNPGPAMASHKDDEEKYFPQSGVLIFGKQDSGKTNVDIEKVMITDEEEIRTTNPVATEQYGSVSTYLQSGNTQAATSDVNTQGVLPGMVWQDRDVYLRGPIWAKIPHTDGHFHPSPLMGGFGLKHPPPQILIKNTPVPANPSTTFSAAKFASFITQYSTGQVSVEIEWELQKENSKRWNPEIQYTSNYNKSVNVDFTVDTNGVYSEPRPIGTRYLTRNL

SEQ ID NO: 227 - DNA, 2208 bp, Artificial Sequence; identical to SEQ ID NO: 221
  Description of Artificial Sequence: Synthetic polynucleotide

SEQ ID NO: 228 - protein, 735 aa, Artificial Sequence; identical to SEQ ID NO: 222
  Description of Artificial Sequence: Synthetic polypeptide

SEQ ID NO: 229 - DNA, 2208 bp, Artificial Sequence
  Description of Artificial Sequence: Synthetic polynucleotide
atggctgccgatggttatcttccagattggctcgaggacactctctctgaaggaataagacagtggtggaagctcaaacctggcccaccaccaccaaagcccgcagagcggcataaggacggcagcaggggtcttgtgcttcctgggtacaagtacctcggacccttcaacggactcgacaagggagagccggtcaacgaggcagacgccgcggccctcgagcacgacaaggcctacgaccggcagctcaacagcggagacaacccgtacctcaagtacaaccacgccgacgcggagtttcaggagcgccttaaagaagatacgtcttttgggggcaacctcggacgagcagtcttccaggcaaaaaagagggttcttgaacctctgggcctggttgaggagcctgttaaaacggctccgggaaaaaagagaccggtagagcactctcctgcggagccagactcctcctcgggaaccggaaaagcgggccagcagcctgcaagaaagagattgaattttggtcagactggagacgcagactccgtacctgacccccagcctctcggacagccaccagcagccccctctggtctgggatctactacaatggctacaggcagtggcgcaccaatggcagacaataacgagggtgccgatggagtgggtaattcctcaggaaattggcattgcgattcccaatggctgggcgacagagtcatcaccacaagcactcgaacctgggccctgcccacctacaacaaccacctctacaagcaaatctccagccaatcaggagcctcaaacgacaaccactattttggctacagcaccccttgggggtattttgacttcaacagattccactgccacttttcaccacgtgactggcaaagactcatcaacaacaactggggattccgacccaagagactcaacttcaagctctttaacattcaagtcaaagaggtcacgcagaatgacggtacgacgacgattgccaataaccttaccagcacggttcaggtgtttactgactcggagtaccagctcccgtacgtcctcggctcggcgcatcaaggatgcctcccgccgttcccagcggacgtcttcatggtcccacagtatggatacctcaccctgaacaacgggagtcaggcggtaggacgctctcccttttactgcctggagtactttccttctcagatgctgcgtactggaaacaactttcagttcagctacacttttgaagacgtgcctttccacagcagctacgctcacagccagagtctggatcggctgatgaatcctctgatcgaccagtacctgtattatctgaacaagacacaaacaaatagtggaactcttcagcagtctcggctactgtttagccaagctggacccaccaacatgtctcttcaagctaaaaactggctgcctggaccttgctacagacagcagcgtctgtcaaagcaggcaaacgacaacaacaacagcaactttccctggactgcagctacaaagtatcatctaaatggccgggactcgttggttaatccaggaccagctatggccagtcacaaggatgacgaagaaaagtttttccccatgcatggaaccctgatatttggtaaacaaggaacaaatgccaacgacgcggatttggaaaatgtcatgattacagatgaagaagaaatcaggaccaccaatcccgtggctacggagcagtacgggactgtgtcaaataatttgcaaaactcaaacactggtccaactactggaactgtcaatcaccaaggagcgttacctggtatggtgtggcaggatcgagatgtgtaccttcagggacccatttgggccaagattcctcacaccgatggacactttcatccttctccactgatgggaggttttggactcaaacacccgcctcctcagattatgatcaaaaacactcccgttccagccaatcctcctacaaacttcagttctgccaagtttgcttctttcatcacacagtattccacggggcaggtcagcgtggagatcgagtgggagctgcagaaggagaacagcaaacgctggaatcccgaaattcagtacacttccaactacaacaaatctgttaatgtggactttactgtggacaataatggcgtgtactcagagcctcgccccattggcaccagatacctgactcgtaatctgtaa

SEQ ID NO: 230 - protein, 735 aa, Artificial Sequence
  Description of Artificial Sequence: Synthetic polypeptide
MAADGYLPDWLEDTLSEGIRQWWKLKPGPPPPKPAERHKDGSRGLVLPGYKYLGPFNGLDKGEPVNEADAAALEHDKAYDRQLNSGDNPYLKYNHADAEFQERLKEDTSFGGNLGRAVFQAKKRVLEPLGLVEEPVKTAPGKKRPVEHSPAEPDSSSGTGKAGQQPARKRLNFGQTGDADSVPDPQPLGQPPAAPSGLGSTTMATGSGAPMADNNEGADGVGNSSGNWHCDSQWLGDRVITTSTRTWALPTYNNHLYKQISSQSGASNDNHYFGYSTPWGYFDFNRFHCHFSPRDWQRLINNNWGFRPKRLNFKLFNIQVKEVTQNDGTTTIANNLTSTVQVFTDSEYQLPYVLGSAHQGCLPPFPADVFMVPQYGYLTLNNGSQAVGRSPFYCLEYFPSQMLRTGNNFQFSYTFEDVPFHSSYAHSQSLDRLMNPLIDQYLYYLNKTQTNSGTLQQSRLLFSQAGPTNMSLQAKNWLPGPCYRQQRLSKQANDNNNSNFPWTAATKYHLNGRDSLVNPGPAMASHKDDEEKFFPMHGTLIFGKQGTNANDADLENVMITDEEEIRTTNPVATEQYGTVSNNLQNSNTGPTTGTVNHQGALPGMVWQDRDVYLQGPIWAKIPHTDGHFHPSPLMGGFGLKHPPPQIMIKNTPVPANPPTNFSSAKFASFITQYSTGQVSVEIEWELQKENSKRWNPEIQYTSNYNKSVNVDFTVDNNGVYSEPRPIGTRYLTRNL

SEQ ID NO: 231 - DNA, 2208 bp, Artificial Sequence
  Description of Artificial Sequence: Synthetic polynucleotide
atggctgccgatggttatcttccagattggctcgaggacactctctctgaaggaataagacagtggtggaagctcaaacctggcccaccaccaccaaagcccgcagagcggcataaggacgacagcaggggtcttgtgcttcctgggtacaagtacctcggacccttcaacggactcgacaagggagagccggtcaacgaggcagacgccgcggccctcgagcacgacaaggcctacgaccggcagctcgacagcggagacaacccgtacctcaagtacaaccacgccgacgcggagtttcaggagcgtcttaaagaagatacgtcttttgggggcaacctcggacgagcagtcttccaggccaaaaagaggattcttgaacctctgggcctggttgaggaacctgttaagacggctccgggaaaaaagaggccggtagagcactctcctgcggagccagactcctcctcgggaaccggaaaagcgggccagcagcctgcaagaaagagattgaattttggtcagactggagacgcagactcagtacctgacccccagcctctcggacagccaccagcagccccctctggtctgggaactaatacgatggcttcaggcagtggcgcaccaatggcagacaataacgagggcgccgacggagtgggtaattcctcgggaaattggcattgcgattccacatggatgggcgacagagtcatcaccaccagcacccgcacctgggccctgcccacctacaacaaccatctgtacaagcaaatctccagccagtctggagccagcaacgacaaccactactttggctacagcaccccctgggggtattttgacttcaacagattccactgccacttctccccacgtgactggcaaagactcatcaacaacaactggggattccggcccaagagactcagcttcaagctctttaacattcaagtcaaagaggtcacgcagaatgacggtacgacgacgattgccaataaccttaccagcacggttcaggtgtttactgactcggagtaccagctcccgtacgtcctcggctcggcgcatcaaggatgcctcccgccgttcccagcagacgtcttcatggtgccacagtatggatacctcaccctgaacaacggcagtcaggcggtaggacgctcttccttttactgcctggagtactttccttctcagatgcttcgtaccggaaacaactttaccttcagctacacctttgaagacgttcctttccatagcagctacgctcacagccaaagtctggaccgtctcatgaatcctctcatcgaccagtacctgtattacttgagcagaacaaacactccaagcggaaccaccacgatgtccaggcttcagttttctcaggccggagcaagtgacattcgggaccagtctagaaactggcttcctggaccctgttaccgccagcagcgagtatcaaagacagctgcggacaacaacaacagtgattactcgtggactggagctaccaagtaccacctcaatggaagagactctctggtgaatccgggcccagctatggccagccacaaggacgatgaagaaaaatattttcctcagagcggggttctcatctttggaaaacaagactcgggaaaaactaatgtggacattgaaaaggttatgattacagacgaagaggaaatcaggaccaccaatcccgtggctacggagcagtatggttctgtatctaccaacctccagagcggcaacacacaagcagctacctcagatgtcaacacacaaggcgttcttccaggcatggtctggcaggacagagacgtgtacctgcaggggcccatctgggcaaagattccacacacggacggacattttcacccctctcccctcatgggcggattcggacttaaacaccctcctccacaaattctcatcaagaacaccccggtacctgcgaatccttcgaccactttcagtgcggcaaagtttgcttccttcatcacacagtactccacggggcaggtcagcgtggagatcgagtgggagctgcagaaggagaacagcaaacgctggaatcccgaaattcagtacacttccaactacaacaaatctgttaatgtggactttactgtggacactaatggtgtgtattcagagcctcgccccattggcaccagatacctgactcgtaatctgtaa

SEQ ID NO: 232 - protein, 735 aa, Artificial Sequence
  Description of Artificial Sequence: Synthetic polypeptide
MAADGYLPDWLEDTLSEGIRQWWKLKPGPPPPKPAERHKDDSRGLVLPGYKYLGPFNGLDKGEPVNEADAAALEHDKAYDRQLDSGDNPYLKYNHADAEFQERLKEDTSFGGNLGRAVFQAKKRILEPLGLVEEPVKTAPGKKRPVEHSPAEPDSSSGTGKAGQQPARKRLNFGQTGDADSVPDPQPLGQPPAAPSGLGTNTMASGSGAPMADNNEGADGVGNSSGNWHCDSTWMGDRVITTSTRTWALPTYNNHLYKQISSQSGASNDNHYFGYSTPWGYFDFNRFHCHFSPRDWQRLINNNWGFRPKRLSFKLFNIQVKEVTQNDGTTTIANNLTSTVQVFTDSEYQLPYVLGSAHQGCLPPFPADVFMVPQYGYLTLNNGSQAVGRSSFYCLEYFPSQMLRTGNNFTFSYTFEDVPFHSSYAHSQSLDRLMNPLIDQYLYYLSRTNTPSGTTTMSRLQFSQAGASDIRDQSRNWLPGPCYRQQRVSKTAADNNNSDYSWTGATKYHLNGRDSLVNPGPAMASHKDDEEKYFPQSGVLIFGKQDSGKTNVDIEKVMITDEEEIRTTNPVATEQYGSVSTNLQSGNTQAATSDVNTQGVLPGMVWQDRDVYLQGPIWAKIPHTDGHFHPSPLMGGFGLKHPPPQILIKNTPVPANPSTTFSAAKFASFITQYSTGQVSVEIEWELQKENSKRWNPEIQYTSNYNKSVNVDFTVDTNGVYSEPRPIGTRYLTRNL

SEQ ID NO: 233 - DNA, 2208 bp, Artificial Sequence
  Description of Artificial Sequence: Synthetic polynucleotide
atggctgccgatggttatcttccagattggctcgaggacactctctctgaaggaataagacagtggtggaagctcaaacctggcccaccaccaccaaagcccgcagagcggcataaggacgacagcaggggtcttgtgcttcctgggtacaagtacctcggacccttcaacggactcgacaagggagagccggtcaacgaggcagacgccgcggccctcgagcacgacaaggcctacgaccggcagctcgacagcggagacaacccgtacctcaagtacaaccacgccgacgcggagtttcaggagcgtcttaaagaagatacgtcttttgggggcaacctcggacgagcagtcttccaggccaaaaagaggattcttgaacctctgggcctggttgaggaacctgttaagacggctccgggaaaaaagaggccggtagagcactctcctgcggagccagactcctcctcgggaaccggaaaagcgggccagcagcctgcaagaaagagattgaattttggtcagactggagacgcagactcagtacctgacccccagcctctcggacagccaccagcagccccctctggtctgggaactaatacgatggcttcaggcagtggcgcaccaatggcagacaataacgagggcgccgacggagtgggtaattcctcgggaaattggcattgcgattccacatggatgggcgacagagtcatcaccaccagcacccgcacctgggccctgcccacctacaacaaccatctgtacaagcaaatctccagccagtctggagccagcaacgacaaccactactttggctacagcaccccctgggggtatttcgacttcaacagattccactgccacttctccccacgtgactggcaaagactcatcaacaacaactggggattccggcccaagagactcagcttcaagctctttaacattcaagtcaaagaggtcacgcagaatgacggtacgacgacgattgccaataaccttaccagcacggttcaggtgtttactgactcggggtaccagctcccgtacgtcctcggctcggcgcatcaaggatgccttccgccgttcccagcagacgtcttcatggtgccacagtatggatacctcaccctgaacaacggcagtcaggcggtaggacgctcttccttttactgcctggagtactttccttctcagatgcttcgtaccggaaacaactttaccttcagctacacctttgaagacgttcctttccatagcagctacgctcacggccaaagtctggaccgtctcatgaatcctctcatcgaccagtacctgtattacttgagcagaacaaacactccaagcggaaccaccacgatgtccaggcttcagttttctcaggccggagcaagtgacgttcgggaccagtctagaaactggcttcctggaccctgttaccgccagcagcgagtatcaaagacagctgcggacaacaacaacagtgattactcgtggactggagctaccaagtaccacctcaatggaagagactctctggtgaatccgggcccagctatggccagccacaaggacgatgaagaaaaatattttcctcagagcggggttctcgtctttggaaaacaagactcgggaaaaactaatgtggacattgaaaaggttatgattacagacgaagaggaaatcaggaccaccaatcccgcggctacggagcagtatggttctgtatctaccaacctccagagcggcaacacacaagcagctacctcagatgtcaacacacaaggcgttcttccaggcatggtctggcaggacagagacgtgtacctgcaggggcccatctgggcaaagattccacacacggacggacattttcacccctctcccctcatgggcggattcggacttaaacaccctcctccacaaattctcatcaagaacaccccggtacctgcgaatccttcgaccactttcagtgcggcaaagtttgtttccttcatcacacagtactccacggggcaggtcagcgtggagatcgagtgggagctgcagaaggagaacagcaaacgctggaatcccgaaattcagtacacttccaactacaacaaatctgttaatgtggactttactgtggacactaatggtgtgtattcagagcctcgccccattggcaccagatacctgactcgtaatctgtaa

SEQ ID NO: 234 - protein, 735 aa, Artificial Sequence
  Description of Artificial Sequence: Synthetic polypeptide
MAADGYLPDWLEDTLSEGIRQWWKLKPGPPPPKPAERHKDDSRGLVLPGYKYLGPFNGLDKGEPVNEADAAALEHDKAYDRQLDSGDNPYLKYNHADAEFQERLKEDTSFGGNLGRAVFQAKKRILEPLGLVEEPVKTAPGKKRPVEHSPAEPDSSSGTGKAGQQPARKRLNFGQTGDADSVPDPQPLGQPPAAPSGLGTNTMASGSGAPMADNNEGADGVGNSSGNWHCDSTWMGDRVITTSTRTWALPTYNNHLYKQISSQSGASNDNHYFGYSTPWGYFDFNRFHCHFSPRDWQRLINNNWGFRPKRLSFKLFNIQVKEVTQNDGTTTIANNLTSTVQVFTDSGYQLPYVLGSAHQGCLPPFPADVFMVPQYGYLTLNNGSQAVGRSSFYCLEYFPSQMLRTGNNFTFSYTFEDVPFHSSYAHGQSLDRLMNPLIDQYLYYLSRTNTPSGTTTMSRLQFSQAGASDVRDQSRNWLPGPCYRQQRVSKTAADNNNSDYSWTGATKYHLNGRDSLVNPGPAMASHKDDEEKYFPQSGVLVFGKQDSGKTNVDIEKVMITDEEEIRTTNPAATEQYGSVSTNLQSGNTQAATSDVNTQGVLPGMVWQDRDVYLQGPIWAKIPHTDGHFHPSPLMGGFGLKHPPPQILIKNTPVPANPSTTFSAAKFVSFITQYSTGQVSVEIEWELQKENSKRWNPEIQYTSNYNKSVNVDFTVDTNGVYSEPRPIGTRYLTRNL

SEQ ID NO: 235 - DNA, 2208 bp, Artificial Sequence
  Description of Artificial Sequence: Synthetic polynucleotide
atggctgccgatggttatcttccagattggctcgaggacactctctctgaaggaataagacagtggtggaaactcaaacctggcccaccaccaccaaagcccgcagagcggcataaggacgacagcaggggtcttgtgcttcctgggtacaagtacctcggacccttcaacggactcgacaagggagagccggtcaacgaggcagacgccgcggccctcgagcacgacaaggcctacgaccggcagctcgacagcggagacaacccgtacctcaagtacaaccacgccgacgcggagtttcaggagcgccttaaagaagatacgtcttttgggggcaacctcggacgagcagtcttccaggcaaaaaagagggttctggaacctctgagcctggttgaggagcctgttaagacggctccgggaaaaaagaggccggtagagcactctcccgcagagccagattcctcctccggaactggaaagtcgggcaaccagcctgcaagaaagagattgaatttcggtcagactggagactcagactccgtacctgacccccagcctctcggacagccaccagcagccccctctggtctgggaactaatacgatggctacaggcagtggcgcaccaatggcagacaataacgagggcgccgacggagtgggtaattcctcgggaaattggcattgcgattccacatggatgggcgacagagtcatcaccaccagcacccgaacctgggccctgcccacctacaacaaccatctgtacaagcaaatatccagccagtctggagccagcaacgacaatcactactttggctacagcaccccctgggggtattttgacttcaacagattccactgccacttttcaccacgtgactggcaaagactcatcaacaacaactggggattccgacccaagagactcaacttcaagctctttaacattcaagtcaaagaggtcacgcagaatgacggtacgacgacgattgccaataaccttaccagcacggttcaggtgtttactgactcggagtaccagctcccgtacgtcctcggctcggcgcatcaaggatgcctcccgccgttcccagcagacgtcttcatggtgccacagtatggatacctcaccctgaacaacgggagtcaggcagtaggacgctcttcattttactgcctagagtactttccttctcagatgctgcgtaccggaaacaactttaccttcagctacacctttgaggacgttcctttccacagcagctacgctcacagccagagtttggaccgtctcatgaatcctctcatcgaccagtacctgtattacttgagcagaacaaacactccaagcggaaccaccacgcagtccaggcttcagttttctcaggccggagcgagtgacattcaggaccagtctaggaactggcttcctggaccctgttaccgtcagcagcgagtatcaaagacatctgcggataacaacaacagtgaatactcgtggactggagctaccaagtaccacctcaatggcagagactctctggtgaatccgggcccggccatggccagccacaaagacgatgaagaaaagttttttcctcagagcggggttcttatctttgggaagcaaggctcagagaaaacaaatgtggatattgaaaaggtcatgattacagacgaagaggaaatcaggaccaccaatcccgtggctacggagcagtatggttctgtatctaccaacctccagagcggcaacacacaagcagctaccgcagatgtcaacacacaaggcgttcttccaggcatggtcgggcaagacagagacgtgtacctgcaggggcctacttgggcaaagattccacacacggacggacattttcacccctctcccctcatgggcggatttggacttaaacaccctcctccacagattctcatcaagaacaccccggtacctgcgaatccttcgaccaccttcagtgcggcaaagtttgcttccttcattacacagtactccacggggcaggtcagcgtggagatcgagtgggagctgcagaaggagaacagcaaacgctggaatcccgagatccagtacacttccaactacaacaagtctgttaatgtggactttactgtggacactaatggcgtgtattcagagcctcgccccattggcaccagatacctgactcgtaatctgtaa

SEQ ID NO: 236 - protein, 735 aa, Artificial Sequence
  Description of Artificial Sequence: Synthetic polypeptide
MAADGYLPDWLEDTLSEGIRQWWKLKPGPPPPKPAERHKDDSRGLVLPGYKYLGPFNGLDKGEPVNEADAAALEHDKAYDRQLDSGDNPYLKYNHADAEFQERLKEDTSFGGNLGRAVFQAKKRVLEPLSLVEEPVKTAPGKKRPVEHSPAEPDSSSGTGKSGNQPARKRLNFGQTGDSDSVPDPQPLGQPPAAPSGLGTNTMATGSGAPMADNNEGADGVGNSSGNWHCDSTWMGDRVITTSTRTWALPTYNNHLYKQISSQSGASNDNHYFGYSTPWGYFDFNRFHCHFSPRDWQRLINNNWGFRPKRLNFKLFNIQVKEVTQNDGTTTIANNLTSTVQVFTDSEYQLPYVLGSAHQGCLPPFPADVFMVPQYGYLTLNNGSQAVGRSSFYCLEYFPSQMLRTGNNFTFSYTFEDVPFHSSYAHSQSLDRLMNPLIDQYLYYLSRTNTPSGTTTQSRLQFSQAGASDIQDQSRNWLPGPCYRQQRVSKTSADNNNSEYSWTGATKYHLNGRDSLVNPGPAMASHKDDEEKFFPQSGVLIFGKQGSEKTNVDIEKVMITDEEEIRTTNPVATEQYGSVSTNLQSGNTQAATADVNTQGVLPGMVGQDRDVYLQGPTWAKIPHTDGHFHPSPLMGGFGLKHPPPQILIKNTPVPANPSTTFSAAKFASFITQYSTGQVSVEIEWELQKENSKRWNPEIQYTSNYNKSVNVDFTVDTNGVYSEPRPIGTRYLTRNL

SEQ ID NO: 237 - DNA, 2208 bp, Artificial Sequence
  Description of Artificial Sequence: Synthetic polynucleotide
atggctgccgatggttatcttccagattggctcgaggacactctctctgaaggaataagacagtggtggaagctcaaacctggcccaccaccaccaaagcccgcagagcggcataaggacgacagcaggggtcttgtgcttcctgggtacaagtacctcggacccttcaacggactcgacaagggagagccggtcaacgaggcagacgccgcggccctcgagcacgacaaggcctacgaccggcagctcgacagcggagacaacccgtacctcaagtacaaccacgccgacgcagagtttcaggagcgccttaaagaagatacgtcttttgggggcaacctcggacgagcagtcttccaggcaaaaaagagggttctggaacctctgggcctggttgaggagcctgttaagacggctccgggaaaaaagaggccggtagagcactctcctgcagagccagattcctcctccggaactggaaagtcgggcaaccagcctgcaagaaagagattgaatttcggtcagactggagactcagactccgtacctgacccccagcctctcggacagccaccagcagccccctctggtctgggaactaatacgatggctacaggcagtggcgcaccaatggcagacaataacgagggcgccgacggagtgggtaattcctcgggaaattggcattgcgattccacatggatgggcgacagagtcatcaccaccagcacccgaacctgggccctgcccacctacaacaaccatctgtacaagcaaatatccagccagtctggagccagcaacgacaatcactactttggctacagcaccccctgggggtattttgacttcaacagattccactgccacttttcaccacgtgactggcaaagactcatcaacaacaactggggattccgacccaagagactcaacttcaagctctttaacattcaagtcaaagaggtcacgcagaatgacggtacgacgacgattgccaataaccttaccagcacggttcaggtgtttactgactcggagtaccagctcccgtacgtcctcggctcggcgcatcaaggatgcctcccgccgttcccagcagacgtcttcatggtgccacagtatggatacctcaccctgaacaacgggagtcaggcagtaggacgctcttcattttactgcctagggtactttccttctcagatgctgcgtaccggaaacaactttaccttcagctacacctttgaggacgttcctttccacagcagctacgctcacagccagagtttggaccgtctcatgaatcctctcatcgaccagtacctgtattacttgagcagaacaaacactccaagcggaaccaccacgcagtccaggcttcagttttctcaggccggagcgagtgacattcgggaccagtctaggaactggcttcctggaccctgttaccgtcagcagcgagtatcaaagacatctgcggataacaacaacagtgaatactcgtggactggagctaccaagtaccacctcaatggcagagactctctggtgaatccgggcccggccatggccagccacaaagacgatgaagaaaagttttttcctcagagcggggttcttatctttgggaagcaaggcccagagaaaacaaatgtggatattgaaaaggtcatgattacagacgaagaggaaatcaggaccaccaatcccgtggctacggagcagtatggttctgtatctaccaacctccagagcggcaacacacaagcagctaccgcagatgtcaacacacaaggcgttcttccaggcatggtctggcaagacagagacgtgtacctgcaggggcctatttgggcaaagattccacacacggacggacattttcacccctctcccctcatgggcggatttggacttaaacaccctcctccacagattctcatcaagaacaccccggtacctgcgaatccttcgaccaccttcagtgcggcaaagtttgcttccttcattacacagtactccacggggcaggtcagcgtggagatcgagtgggagctgcagaaggagaacagcaaacgctggaatcccgagatccagtacacttccaactacaacaagtctgttaatgtggactttactgtggacactaatggcgtgtattcagagcctcgccccattggcaccagatacctgactcgtaatctgtaa

SEQ ID NO: 238 - protein, 735 aa, Artificial Sequence
  Description of Artificial Sequence: Synthetic polypeptide
MAADGYLPDWLEDTLSEGIRQWWKLKPGPPPPKPAERHKDDSRGLVLPGYKYLGPFNGLDKGEPVNEADAAALEHDKAYDRQLDSGDNPYLKYNHADAEFQERLKEDTSFGGNLGRAVFQAKKRVLEPLGLVEEPVKTAPGKKRPVEHSPAEPDSSSGTGKSGNQPARKRLNFGQTGDSDSVPDPQPLGQPPAAPSGLGTNTMATGSGAPMADNNEGADGVGNSSGNWHCDSTWMGDRVITTSTRTWALPTYNNHLYKQISSQSGASNDNHYFGYSTPWGYFDFNRFHCHFSPRDWQRLINNNWGFRPKRLNFKLFNIQVKEVTQNDGTTTIANNLTSTVQVFTDSEYQLPYVLGSAHQGCLPPFPADVFMVPQYGYLTLNNGSQAVGRSSFYCLGYFPSQMLRTGNNFTFSYTFEDVPFHSSYAHSQSLDRLMNPLIDQYLYYLSRTNTPSGTTTQSRLQFSQAGASDIRDQSRNWLPGPCYRQQRVSKTSADNNNSEYSWTGATKYHLNGRDSLVNPGPAMASHKDDEEKFFPQSGVLIFGKQGPEKTNVDIEKVMITDEEEIRTTNPVATEQYGSVSTNLQSGNTQAATADVNTQGVLPGMVWQDRDVYLQGPIWAKIPHTDGHFHPSPLMGGFGLKHPPPQILIKNTPVPANPSTTFSAAKFASFITQYSTGQVSVEIEWELQKENSKRWNPEIQYTSNYNKSVNVDFTVDTNGVYSEPRPIGTRYLTRNL

SEQ ID NO: 239 - protein, 735 aa, Artificial Sequence
  Description of Artificial Sequence: Synthetic polypeptide
MAADGYLPDWLEDTLSEGIRQWWKLKPGPPPPKPAERHKDDSRGLVLPGYKYLGPFNGLDKGEPVNEADAAALEHDKAYDRQLDSGDNPYLKYNHADAEFQERLKEDTSFGGNLGRAVFQAKKRVLEPLGLVEEPVKTAPGKKRPVEHSPAEPDSSSGTGKSGNQPARKRLNFGQTGDSDSVPDPQPLGQPPAAPSGLGTNTMATGSGAPMADNNEGADGVGNSSGNWHCDSTWMGDRVITTSTRTWALPTYNNHLYKQISSQSGASNDNHYFGYSTPWGYFDFNRFHCHFSPRDWQRLINNNWGFRPKRLNFKLFNIQVKEVTQNDGTTTIANNLTSTVQVFTDSEYQLPYVLGSAHQGCLPPFPADVFMVPQYGYLTLNNGSQAVGRSSFYCLEYFPSQMLRTGNNFTFSYTFEDVPFHSSYAHSQSLDRLMNPLIDQYLYYLSRTNTPSGTTTQSRLQFSQAGASDIRDQSRNWLPGPCYRQQRVSKTSADNNNSEYSWTGATKYHLNGRDSLVNPGPAMASHKDDEEKFFPQSGVLIFGKQGPEKTNVDIEKVMITDEEEIRTTNPVATEQYGSVSTNLQSGNTQAATADVNTQGVLPGMVWQDRDVYLQGPIWAKIPHTDGHFHPSPLMGGFGLKHPPPQILIKNTPVPANPSTTFSAAKFASFITQYSTGQVSVEIEWELQKENSKRWNPEIQYTSNYNKSVNVDFTVDTNGVYSEPRPIGTRYLTRNL

SEQ ID NO: 240 - protein, 735 aa, Artificial Sequence; identical to SEQ ID NO: 239
  Description of Artificial Sequence: Synthetic polypeptide

SEQ ID NO: 241 - DNA, 2211 bp, Artificial Sequence
  Description of Artificial Sequence: Synthetic polynucleotide
atggctgccgatggttatcttccagattggctcgaggacactctctctgaaggaataagacagtggtggaagctcaaacctggcccaccaccaccaaagcccgcagagcggcataaggacgacagcaggggtcttgtgcttcctgggtacaagtacctcggacccttcaacggactcgacaagggggagccggtcaacgaggcagacgccgcggccctcgagcacgacaaggcctacgaccggcagctcgacagcggagacaacccgtacctcaagtacaaccacgccgacgcagagtttcaggagcgccttaaagaagatacgtcttttgggggcaacctcggacgagcagtcttccaggcgaaaaagagggttcttgaacctctgcggcctggtttgaggaaacctgttaagacggctccgggaaaaaagaggccggtagagcactctcctgtggagccagactcctcctcgggaaccggaaaagcgggccagcagcctgcaagaaaaagattaaattttggtcagactggagacgcagactccgtacctgacccccagcctctcggacagccaccagcagccccctctggtctgggatctactacaatggctacaggcagtggcgcaccaatggcagacaataacgagggtgccgatggagtgggtaattcctcaggaaattggcattgcgattcccaatggctggacgacagagtcatcgccaccagcacccgaacctgggccctgcccacatacaacaaccacctctacaagcaaatctccagccaatcaggagcctgcaacgacaaccactactttggctacagcaccccctgggggtattttgacttcaacagattccactgccacttttcaccacgtgactggcaaagactcatcaacagcaactggggattccggcccaaaagactcaacttcaagctctttaatattcaagtcaaagaggtcacgcagaatgacggtacgacgacgattgccaataaccttaccagcacggttcaggtgtttactgactcggagtaccagctcccgtacgtcccgggctcggcgcatcaaggatgcctcccgccgtttccagcggacgtcttcatggtcccacagtatggatacctcaccctgaacaacgggagtcaggcggtaggacgctcttccttttactgcctggagtactttccttctcagatgctgcgtactggaaacaactttcagttcagctacacttttgaagacgtgcctttccacagcagctacgctcactgccagagtctggatcggctgatgaatcctctgatcgaccagtacctgtattatctgaacaagacacaaacaaatagtggaactcttcagcagtctcggctactgtttagccaagctggaccaaccaacatgtctcttcaagctaaaaactggctgcctggaccttgctacagacagcagcgtctgtcaaaacaggcaaacgacaataacaactgcaactttccctggactgcagctacaaagtatcatctaaatggccgggactcgttggttaatccaggaccagctatggccagtcacaaggatgacgaagaaaagtttttccccatgcatggaaccctgatatttggtaaacaaggaacaaatgccaacgacgcggatttggaaaatgtcatgattacagatgaagaagaaatcaggcccaccaatcccgtggctacggagcagtacgggactgtgtcaaataatttgcaaaactcaaacactggtccaactacaggaactgtcaatcaccaaggagcgttacctggtatggtgtggcaggatcgagacgtgtacctgcagggacccatttgggccaagattcctcacaccgatggacactttcatccttctccactgatgggaggttttggactcaaacacccgcctcctcagatcatgatcaaaagcactcccgttccagccaatcctcccacaaacttcagttctgccaagtttgcttcttccatcacacagtattccacgggacaggtcagcgtggagatcgagtgggagctgcagaaggagaacagcaaacgctggaatcccgaaattcagtacacttccaactacaacaagtctgttaatgtggactttactgtggacactaatggtgtgtattcagagcctcgccccattggcaccagatacctgactcgtaatctgtaa

SEQ ID NO: 242 - protein, 736 aa, Artificial Sequence
  Description of Artificial Sequence: Synthetic polypeptide
MAADGYLPDWLEDTLSEGIRQWWKLKPGPPPPKPAERHKDDSRGLVLPGYKYLGPFNGLDKGEPVNEADAAALEHDKAYDRQLDSGDNPYLKYNHADAEFQERLKEDTSFGGNLGRAVFQAKKRVLEPLRPGLRKPVKTAPGKKRPVEHSPVEPDSSSGTGKAGQQPARKRLNFGQTGDADSVPDPQPLGQPPAAPSGLGSTTMATGSGAPMADNNEGADGVGNSSGNWHCDSQWLDDRVIATSTRTWALPTYNNHLYKQISSQSGACNDNHYFGYSTPWGYFDFNRFHCHFSPRDWQRLINSNWGFRPKRLNFKLFNIQVKEVTQNDGTTTIANNLTSTVQVFTDSEYQLPYVPGSAHQGCLPPFPADVFMVPQYGYLTLNNGSQAVGRSSFYCLEYFPSQMLRTGNNFQFSYTFEDVPFHSSYAHCQSLDRLMNPLIDQYLYYLNKTQTNSGTLQQSRLLFSQAGPTNMSLQAKNWLPGPCYRQQRLSKQANDNNNCNFPWTAATKYHLNGRDSLVNPGPAMASHKDDEEKFFPMHGTLIFGKQGTNANDADLENVMITDEEEIRPTNPVATEQYGTVSNNLQNSNTGPTTGTVNHQGALPGMVWQDRDVYLQGPIWAKIPHTDGHFHPSPLMGGFGLKHPPPQIMIKSTPVPANPPTNFSSAKFASSITQYSTGQVSVEIEWELQKENSKRWNPEIQYTSNYNKSVNVDFTVDTNGVYSEPRPIGTRYLTRNL

SEQ ID NO: 243 - DNA, 2208 bp, Artificial Sequence
  Description of Artificial Sequence: Synthetic polynucleotide
atggctgccgatggttatcttccagattggctcgaggacactctctctgaaggaataagacagtggtggaagctcaaacctggcccaccaccaccaaagcccgcagagcggcataaggacgacagcaggggtcttgtgcttcctgggtacaagtacctcggacccttcaacggactcgacaagggagagccggtcaacgaggcagacgccgcggccctcgagcacgacaaggcctacgaccggcagctcgacagcggagacaacccgtacctcaagtacaaccacgccgacgcggagtttcaggagcgccttaaagaggatacgtcttttgggggcaacctcggacgagcagtcttccaggcaaaaaagagggttctggaacctctgggcctggttgaggagcctgttaagacggctccgggaaaaaagaggccggtagagcactctcctgcagagccagattcctcctccggaactggaaagtcgggcaaccagcctgcaagaaagagattgaatttcggtcagactggagactcagactccgtacctgacccccagcctctcggacagccaccagcagccccctctggtctgggaactaatacgatggctacaggcagtggcgcaccaatggcagacaataacgagggcgccgacggagtgggtaattcctcgggaaattggcattgcgattccacatggatgggcgacagagtcatcaccaccagcacccgaacctgggccctgcccacctacaacaaccatctgtacaagcaaatatccagccagtctggagccagcaacgacaatcactactttggctacagcaccccctgggggtattttgacttcaacagattccactgccacttttcaccacgtgactggcaaagactcatcaacaacaactggggattccgacccaagagactcaacttcaagctctttaacattcaagtcaaagaggtcacgcagaatgacggtacgacgacgattgccaataaccttaccagcacggttcaggtgtttactgactcggagtaccagctcccgtacgtcctcggctcggcgcatcaaggatgcctcccgccgttcccagcagacgtcttcatggtgccacagtatggatacctcaccctgaacaacgggagtcaggcagtaggacgctcttcattttactgcctagagtactttccttctcagatgctgcgtaccggaaacagctttaccttcagctacacctttgaggacgttcctttccacagcagctacgctcacagccagagtttggaccgtctcatgaatcctctcatcgaccagtacctgtattacttgagcagaacaaacactccaagcggaaccaccacgcagtccaggcttcagttttctcaggccggagcgagtgacattcgggaccagtctaggaactggcttcctggaccctgttaccgtcagcagcgagtatcaaagacatctgcggataacaacaacagtgaatactcgtggactggagctaccaagtaccacctcaatggcagagactctctggtgaatccgggcccggccatggccagccacaaagacgatgaagaaaagttctttcctcagagcggggttcttatctttgggaagcaaggctcagagaaaacaaatgtggatattgaaaaggtcatgattacagacgaagaggaaatcaggaccaccaatcccgtggctacggagcagtatggttctgtatctaccaacctccagagcggcaacacacaagcagctaccgcagatgtcaacacacaaggcgttcttccaggcatggtctggcaagacagagacgtgtacctgcaggggcctatttgggcaaagattccacacacggacggacattttcacccctctcccctcatgggcggatttggacttaaacaccctcctccacagattctcatcaagaacaccccggtacctgcgaatccttcgaccaccttcagtgcggcaaagtttgcttccttcattacacagtactccacggggcaggtcagcgtggagatcgagtgggagctgcagaaggagaacagcaaacgctggaatcccgagatccagtacacttccaactacaacaagtctgttaatgtggactttactgtggacactaatggcgtgtattcagagcctcgccccattggcaccagatacctgactcgtaatctgtaa

SEQ ID NO: 244 - protein, 735 aa, Artificial Sequence
  Description of Artificial Sequence: Synthetic polypeptide
MAADGYLPDWLEDTLSEGIRQWWKLKPGPPPPKPAERHKDDSRGLVLPGYKYLGPFNGLDKGEPVNEADAAALEHDKAYDRQLDSGDNPYLKYNHADAEFQERLKEDTSFGGNLGRAVFQAKKRVLEPLGLVEEPVKTAPGKKRPVEHSPAEPDSSSGTGKSGNQPARKRLNFGQTGDSDSVPDPQPLGQPPAAPSGLGTNTMATGSGAPMADNNEGADGVGNSSGNWHCDSTWMGDRVITTSTRTWALPTYNNHLYKQISSQSGASNDNHYFGYSTPWGYFDFNRFHCHFSPRDWQRLINNNWGFRPKRLNFKLFNIQVKEVTQNDGTTTIANNLTSTVQVFTDSEYQLPYVLGSAHQGCLPPFPADVFMVPQYGYLTLNNGSQAVGRSSFYCLEYFPSQMLRTGNSFTFSYTFEDVPFHSSYAHSQSLDRLMNPLIDQYLYYLSRTNTPSGTTTQSRLQFSQAGASDIRDQSRNWLPGPCYRQQRVSKTSADNNNSEYSWTGATKYHLNGRDSLVNPGPAMASHKDDEEKFFPQSGVLIFGKQGSEKTNVDIEKVMITDEEEIRTTNPVATEQYGSVSTNLQSGNTQAATADVNTQGVLPGMVWQDRDVYLQGPIWAKIPHTDGHFHPSPLMGGFGLKHPPPQILIKNTPVPANPSTTFSAAKFASFITQYSTGQVSVEIEWELQKENSKRWNPEIQYTSNYNKSVNVDFTVDTNGVYSEPRPIGTRYLTRNL

SEQ ID NO: 245 - DNA, 2211 bp, Artificial Sequence; identical to SEQ ID NO: 135
  Description of Artificial Sequence: Synthetic polynucleotide

SEQ ID NO: 246 - protein, 736 aa, Artificial Sequence
  Description of Artificial Sequence: Synthetic polypeptide
MAADGYLPDWLEDTLSEGIRQWWKLKPGPPPPKPAERHKDDSRGLVLPGYKYLGPGNGLDKGEPVNAADAAALEHDKAYDQQLKAGDNPYLKYNHADAEFQERLKEDTSFGGNLGRAVFQAKKRLLEPLGLVEEAAKTAPGKKRPVEQSPQEPDSSAGIGKSGSQPAKKKLNFGQTGDTESVPDPQPIGEPPAAPSGVGSLTMASGGGAPVADNNEGADGVGSSSGNWHCDSQWLGDRVITTSTRTWALPTYNNHLYKQISNSTSGGSSNDNAYFGYSTPWGYFDFNRFHCHFSPRDWQRLINNNWGFRPKRLNFKLFNIQVKEVTDNNGVKTIANNLTSTVQVFTDSDYQLPYVLGSAHEGCLPPFPADVFMIPQYGYLTLNDGGQAVGRSSFYCLEYFPSQMLRTGNNFQFSYEFENVPFHSSYAHSQSLDRLMNPLIDQYLYYLSKTINGSGQNQQTLKFSVAGPSNMAVQGRNYIPGPSYRQQRVSTTVTQNNNSEFAWPGASSWALNGRNSLMNPGPAMASHKEGEDRFFPLSGSLIFGKQGTGRDNVDADKVMITNEEEIKTTNPVATESYGQVATNHQSAQAQAQTGWVQNQGILPGMVWQDRDVYLQGPIWAKIPHTDGNFHPSPLMGGFGMKHPPPQILIKNTPVPADPPTAFNKDKLNSFITQYSTGQVSVEIEWELQKENSKRWNPEIQYTSNYYKSNNVEFAVSTEGVYSEPRPIGTRYLTRNL

SEQ ID NO: 247 - DNA, 2211 bp, Artificial Sequence
  Description of Artificial Sequence: Synthetic polynucleotide
atggctgccgatggttatcttccagattggctcgaggacactctctctgaaggaataagacagtggtggaagctcaaacctggcccaccaccaccaaagcccgcagagcggcataaggacgacagcaggggtcttgtgcttcctgggtacaagtacctcggacccggcaacggactcgacaagggggagccggtcaacgcagcagacgcggcggccctcgagcacgacaaggcctacgaccagcagctcaaggccggagacaacccgtacctcaagtacaaccacgccgacgccgagttccaggagcggctcaaagaagatacgtcttttgggggcaacctcgggcgagcagtcttccaggccaaaaagaggcttcttgaacctcttggtctggttgaggaagcggctaagacggctcctggaaagaagaggcctgtagagcagtctcctcaggaaccggactcctccgcgggtattggcaaatcgggttcacagcccgctaaaaagaaactcaatttcggtcagactggcgacacagagtcagtccccgaccctcaaccaatcggagaacctcccgcagccccctcaggtgtgggatctcttacaatggcttcaggtggtggcgcaccagtggcagacaataacgaaggtgccgatggagtgggtagttcctcgggaaattggcattgcgattcccaatggctgggggacagagtcatcaccaccagcacccgaacctgggccctgcccacctacaacaatcacctctacaagcaaatctccaacagcacatctggaggatcttcaaatgacaacgcctacttcggctacagcaccccctgggggtattttgacttcaacagattccactgccacttctcaccacgtgactggcagcgactcatcaacaacaactggggattccggcctaagcgactcaacttcaagctcttcaacattcaggtcaaagaggttacggacaacaatggagtcaagaccatcgccaataaccttaccagcacggtccaggtcttcacggactcagactatcagctcccgtacgtgctcgggtcggctcacgagggctgcctcccgccgttcccagcggacgttttcatgattcctcagtacgggtatctgacgcttaatgatgggagccaggccgtgggtcgttcgtccttttactgcctggaatatttcccgtcgcaaatgctaagaacgggtaacaacttccagttcagctacgagtttgagaacgtacctttccatagcagctacgctcacagccaaagcctggaccgactaatgaatccactcatcgaccaatacttgtactatctctcaaagactattaacggttctggacagaatcaacaaacgctaaaattcagcgtggccggacccagcaacatggctgtccagggaagaaactacatacctggacccagctaccgacaacaacgtgtctcaaccactgtgactcaaaacaacaacagcgaatttgcttggcctggagcttcttcttgggctctcaatggacgtaatagcttgatgaatcctggacctgctatggccagccacaaagaaggagaggaccgtttctttcctttgtctggatctttaatttttggcaaacaaggaactggaagagacaacgtggatgcggacaaagtcatgataaccaacgaagaagaaattaaaactactaacccggtagcaacggagtcctatggacaagtggccacaaaccaccagagtgcccaagcacaggcgcagaccggctgggttcaaaaccaaggaatacttccgggtatggtttggcaggacagagatgtgtacctgcaaggacccatttgggccaaaattcctcacacggacggcaactttcacccttctccgctaatgggagggtttggaatgaagcacccgcctcctcagatcctcatcaaaaacacacctgtacctgcggatcctccaacggctttcaataaggacaagctgaactctttcatcacccagtattctactggccaagtcagcgtggagattgagtgggagctgcagaaggaaaacagcaagcgctggaacccggagatccagtacacttccaactattacaagtctaataatgttgaatttgctgttaatactgaaggtgtatatagtgaaccccgccccattggcaccagatacctgactcgtaatctgtaa

SEQ ID NO: 248 - protein, 736 aa, Artificial Sequence
  Description of Artificial Sequence: Synthetic polypeptide
MAADGYLPDWLEDTLSEGIRQWWKLKPGPPPPKPAERHKDDSRGLVLPGYKYLGPGNGLDKGEPVNAADAAALEHDKAYDQQLKAGDNPYLKYNHADAEFQERLKEDTSFGGNLGRAVFQAKKRLLEPLGLVEEAAKTAPGKKRPVEQSPQEPDSSAGIGKSGSQPAKKKLNFGQTGDTESVPDPQPIGEPPAAPSGVGSLTMASGGGAPVADNNEGADGVGSSSGNWHCDSQWLGDRVITTSTRTWALPTYNNHLYKQISNSTSGGSSNDNAYFGYSTPWGYFDFNRFHCHFSPRDWQRLINNNWGFRPKRLNFKLFNIQVKEVTDNNGVKTIANNLTSTVQVFTDSDYQLPYVLGSAHEGCLPPFPADVFMIPQYGYLTLNDGSQAVGRSSFYCLEYFPSQMLRTGNNFQFSYEFENVPFHSSYAHSQSLDRLMNPLIDQYLYYLSKTINGSGQNQQTLKFSVAGPSNMAVQGRNYIPGPSYRQQRVSTTVTQNNNSEFAWPGASSWALNGRNSLMNPGPAMASHKEGEDRFFPLSGSLIFGKQGTGRDNVDADKVMITNEEEIKTTNPVATESYGQVATNHQSAQAQAQTGWVQNQGILPGMVWQDRDVYLQGPIWAKIPHTDGNFHPSPLMGGFGMKHPPPQILIKNTPVPADPPTAFNKDKLNSFITQYSTGQVSVEIEWELQKENSKRWNPEIQYTSNYYKSNNVEFAVNTEGVYSEPRPIGTRYLTRNL

SEQ ID NO: 249 - DNA, 2208 bp, Artificial Sequence
  Description of Artificial Sequence: Synthetic polynucleotide
atggctgccgatggttatcttccagattggctcgaggacactctctctgaaggaataagacagcggtggaagctcaaacctggcccaccaccaccagagcccgcagagcggcataaggacgacagcaggggtcttgtgcttcctgggtacaagtacctcggacccttcaacggactcgacaagggagagccggtcaacgaggcagacgccgcggccctcgagcacgacaaagcctacgaccggcagctcgacagcggagacaacccgtacctcaagtacaaccacgccgacgcggagtttcaggagcgccttaaagaagatacgtcttttgggggcaacctcggacgagcagtcttccaggcgaaaaagagggtacttgaacctctgggcctggttgaggaacctgttaagacggctccgggaaaaaagaggccggtagagcactctcctgtggagccagactcctcctcgggaaccggaaaggcgggccagcagcctgcaagaaaaagattgaattttggtcagactggagacgcagactcagtacctgacccccagcctctcggacagccaccagcagccccctctggtctgggaactaatacgatggctacaggcagtggcgcaccaatggcagacaataacgagggcgccgacggagtgggtaattcctcgggaaattggcattgcgattccacatggatgggcgacagagtcatcaccaccagcacccgaacctgggccctgcccacctacaacaaccacctctacaaacaaatttccagccaatcaggagcctcgaacgacaatcactactttggctacagcaccccttgggggtattttgacttcaacagattccactgccacttttcaccacgtgactggcaaagactcatcaacaacaactggggattccgacccaagagactcaacttcaagctctttaacattcaagtcaaagaggtcacgcagaatgacggtacgacgacgattgccaataaccttaccggcacggttcaggtgtttactgactcggagtaccagctcccgtacgtcctcggctcggcgcatcaaggatgcctcccgccgttcccagcagacgtcttcatggtgccacagtatggatacctcaccctgaacaacgggagtcaggcagtaggacgctcttcattttactgcctggagtactttccttctcagatgctgcgtaccggaaacaactttaccttcagctacacttttgaggacgttcctttccacagcagctacgctcacagccagagtctgggccgtctcatgaatcctctcatcgaccagtacctgtattacttgagcagaacaaacactccaagtggaaccaccacgcagtcaaggcttcagttttctcaggccggagcgagtgacattcgggaccagtctaggaactggcttcctggaccctgttaccgccagcagcgagtatcaaagacatctgcggataacaacaacagtgaatactcgtggactggagctaccaagtaccacctcaatggcagagactctctggtgaatccgggcccggccatggcaagccacaaggacgatgaagaaaagttttttcctcagagcggggttctcatctttgggaagcaaggctcagagaaaacaaatgtggacattgaaaaggtcatgattacagacgaagaggaaatcaggacaaccaatcccgtggctacggagcagtatggttctgtatctaccaacctccagagaggcaacagacaagcagctaccgcagatgtcaacacacaaggcgttcttccaggcatggtctggcaggacagagatgtgtaccttcaggggcccatctgggcaaagattccacacacggacggacattttcacccctctcccctcatgggtggattcggacttaaacaccctcctccacagattctcatcaagaacaccccggtacctgcgaatccttcgaccaccttcagtgcggcaaagtttgcttccttcatcacacagtactccacgggacaggtcagcgtggagatcgagtgggagctgcagaaggaaaacagcaaacgctggaatcccgaaattcagtacacttccaactacaacaagtctgttaatgtggactttactgtggacactaatggcgtgtattcagagcctcgccccattggcaccagatacctgactcgtaatctgtaa

SEQ ID NO: 250 - protein, 735 aa, Artificial Sequence
  Description of Artificial Sequence: Synthetic polypeptide
MAADGYLPDWLEDTLSEGIRQRWKLKPGPPPPEPAERHKDDSRGLVLPGYKYLGPFNGLDKGEPVNEADAAALEHDKAYDRQLDSGDNPYLKYNHADAEFQERLKEDTSFGGNLGRAVFQAKKRVLEPLGLVEEPVKTAPGKKRPVEHSPVEPDSSSGTGKAGQQPARKRLNFGQTGDADSVPDPQPLGQPPAAPSGLGTNTMATGSGAPMADNNEGADGVGNSSGNWHCDSTWMGDRVITTSTRTWALPTYNNHLYKQISSQSGASNDNHYFGYSTPWGYFDFNRFHCHFSPRDWQRLINNNWGFRPKRLNFKLFNIQVKEVTQNDGTTTIANNLTGTVQVFTDSEYQLPYVLGSAHQGCLPPFPADVFMVPQYGYLTLNNGSQAVGRSSFYCLEYFPSQMLRTGNNFTFSYTFEDVPFHSSYAHSQSLGRLMNPLIDQYLYYLSRTNTPSGTTTQSRLQFSQAGASDIRDQSRNWLPGPCYRQQRVSKTSADNNNSEYSWTGATKYHLNGRDSLVNPGPAMASHKDDEEKFFPQSGVLIFGKQGSEKTNVDIEKVMITDEEEIRTTNPVATEQYGSVSTNLQRGNRQAATADVNTQGVLPGMVWQDRDVYLQGPIWAKIPHTDGHFHPSPLMGGFGLKHPPPQILIKNTPVPANPSTTFSAAKFASFITQYSTGQVSVEIEWELQKENSKRWNPEIQYTSNYNKSVNVDFTVDTNGVYSEPRPIGTRYLTRNL

SEQ ID NO: 251 - DNA, 2208 bp, Artificial Sequence
  Description of Artificial Sequence: Synthetic polynucleotide
atggctgccgatggttatcttccagattggctcgaggacactctctctgaaggaataagacagcggtggaagctcaaacctggcccaccaccaccagagcccgcagagcggcataaggacgacagcaggggtcttgtgcttcctgggtacaagtacctcggacccttcaacggactcgacaagggagagccggtcaacgaggcagacgccgcggccctcgagcacgacaaagcctacgaccggcagctcgacagcggagacaacccgtacctcaagtacaaccacgccgacgcggagtttcaggagcgccttaaagaagatacgtcctttgggggcaacctcggacgagcagtcttccaggcgaaaaagagggtacttgaacctctgggcctggttgaggaacctgttaagacggctccgggaaaaaagaggccggtagagcactctcctgtggagccagactcctcctcgggaaccggaaaggcgggccagcagcctgcaagaaaaagattgaattttggtcagactggagacgcagactcagtacctgacccccagcctctcggacagccaccagcagccccctctggtctgggaactaatacgatggctacaggcagtggcgcaccaatggcagacaataacgagggcgccgacggagtgggtaattcctcgggaaattggcattgcgattccacatggatgggcgacagagtcatcaccaccagcacccgaacctgggccctgcccacctacaacaaccacctctacaaacaaatttccagccaatcaggagcctcgaacgacaatcactactttggctacagcaccccttgggggtattttgacttcaacagattccactgccacttttcaccacgtgactggcaaagactcatcaacaacaactggggattccgacccaagagactcaacttcaagctctttaacattcaagtcaaagaggtcacgcagaatgacggtacgacgacgattgccaataaccttaccagcacggttcaggtgtttactgactcggagtaccagctcccgtacgtcctcggctcggcgcatcaaggatgcctcccgccgttcccagcagacgtcttcatggtgccacagtatggatacctcaccctgaacaacgagagtcaggcagtaggacgctcttcattttactgcctggagtactttccttctcagatgctgcgtaccggaaacaactttaccttcagctacacttttgaggacgttcctttccacagcagctacgctcacagccagagtctgggccgtctcatgaatcctctcatcgaccagtacctgtattacttgagcagaacaaacactccaagtggaaccaccacgcagtcaaggcttcagttttctcaggccggagcgagtgacattcgggaccagtctaggaactggcttcctggaccctgttaccgccagcagcgagtatcaaagacatctgcggataacaacaacagtgaatactcgtggactggagctaccaagtaccacctcaatggcagagactctctggtgaatccgggcccggccatggcaagccacaaggacgatgaagaaaagttttttcctcagagcggggttctcatctttgggaagcaaggctcagagaaaacaaatgtggacattgaaaaggtcatgattacagacgaagaggaaatcaggacaaccaatcccgtggctacggagcagtatggttctgtatctaccaacctccagagaggcaacagacaagcagctaccgcagatgtcaacacacaaggcgttcttccaggcatggtctggcaggacagagatgtgtaccttcaggggcccatctgggcaaagattccacacacggacggacattttcacccctctcccctcatgggtggattcggacttaaacaccctcctccacagattctcatcaagaacaccccggtacctgcgaatccttcgaccaccttcagtgcggcaaagtttgcttccttcatcacacagtactccacgggacaggtcagcgtggagatcgagtgggagctgcagaaggaaaacagcaaacgctggaatcccgaaattcagtacacttccaactacaacaagtctgttaatgtggactttactgtggacactaatggcgtgtattcagagcctcgccccattggcaccagatacctgactcgtaatctgtaa

SEQ ID NO: 252 - protein, 735 aa, Artificial Sequence
  Description of Artificial Sequence: Synthetic polypeptide
MAADGYLPDWLEDTLSEGIRQRWKLKPGPPPPEPAERHKDDSRGLVLPGYKYLGPFNGLDKGEPVNEADAAALEHDKAYDRQLDSGDNPYLKYNHADAEFQERLKEDTSFGGNLGRAVFQAKKRVLEPLGLVEEPVKTAPGKKRPVEHSPVEPDSSSGTGKAGQQPARKRLNFGQTGDADSVPDPQPLGQPPAAPSGLGTNTMATGSGAPMADNNEGADGVGNSSGNWHCDSTWMGDRVITTSTRTWALPTYNNHLYKQISSQSGASNDNHYFGYSTPWGYFDFNRFHCHFSPRDWQRLINNNWGFRPKRLNFKLFNIQVKEVTQNDGTTTIANNLTSTVQVFTDSEYQLPYVLGSAHQGCLPPFPADVFMVPQYGYLTLNNESQAVGRSSFYCLEYFPSQMLRTGNNFTFSYTFEDVPFHSSYAHSQSLGRLMNPLIDQYLYYLSRTNTPSGTTTQSRLQFSQAGASDIRDQSRNWLPGPCYRQQRVSKTSADNNNSEYSWTGATKYHLNGRDSLVNPGPAMASHKDDEEKFFPQSGVLIFGKQGSEKTNVDIEKVMITDEEEIRTTNPVATEQYGSVSTNLQRGNRQAATADVNTQGVLPGMVWQDRDVYLQGPIWAKIPHTDGHFHPSPLMGGFGLKHPPPQILIKNTPVPANPSTTFSAAKFASFITQYSTGQVSVEIEWELQKENSKRWNPEIQYTSNYNKSVNVDFTVDTNGVYSEPRPIGTRYLTRNL

SEQ ID NO: 253 - DNA, 2208 bp, Artificial Sequence
  Description of Artificial Sequence: Synthetic polynucleotide
atggctgccgatggttatcttccagattggctcgaggacactctctctgaaggaataagacagcggtggaagctcaaacctggcccaccaccaccagagcccgcagagcggcataaggacgacagcaggggtcttgtgcttcctgggtacaagtacctcggacccttcaacggactcgacaagggagagccggtcaacgaggcagacgccgcggccctcgagcacgacaaagcctacgaccggcagctcgacagcggagacaacccgtacctcaagtacaaccacgccgacgcggagtttcaggagcgccttaaagaagatacgtcttttgggggcaacctcggacgagcagtcttccaggcgaaaaagagggtacttgaacctctgggcctggttgaggaacctgttaagacggctccgggaaaaaagaggccggtagagcactctcctgtggagccagactcctcctcgggaaccggaaaggcgggccagcagcctgcaagaaaaagattgaattttggtcagactggagacgcagactcagtacctgacccccagcctctcggacagccaccagcagccccctctggtctgggaactaatacgatggctacaggcagtggcgcaccaatggcagacaataacgagggcgccgacggagtgggtaattcctcgggaaattggcattgcgattccacatggatgggcgacagagtcatcaccaccagcacccgaacctgggccctgcccacctacaacaaccacctctacaaacaaatttccagccaatcaggagcctcgaacgacaatcactactttggctacagcaccccttgggggtattttgacttcaacagattccactgccacttttcaccacgtgactggcaaagactcatcaacaacaactggggattccgacccaagagactcaacttcaagctctttaacattcaagtcaaagaggtcacgcagaatgacggtacgacgacgattgccaataaccttaccagcacggttcaggtgtttactgactcggagtaccagctcccgtacgtcctcggctcggcgcatcaaggatgcctcccgccgttcccagcagacgtcttcatggtaccacagtatggatacctcaccctgaacaacgggagtcaggcagtaggacgctcttcattttactgcctggagtactttccttctcagatgctgcgtaccggaaacaactttaccttcagctacacttttgaggacgttcctttccacagcagctacgctcacagccagagtctgggccgtctcatgaatcctctcatcgaccagtacctgtattacttgagcagaacaaacactccaagtggaaccaccacgcagtcaaggcttcagttttctcaggccggagcgagtgacattcgggaccagtctaggaactggcttcctggaccctgttaccgccagcagcgagtatcaaagacatctgcggataacaacaacagtgaatactcgtggactggagctaccaagtaccacctcaatggcagagactctctggtgaatccgggcccggccatggcaagccacaaggacgatgaagaaaagttttttcctcagagcggggttctcatctttgggaagcaaggctcagagaaaacaaatgtggacattgaaaaggtcatgattacagacgaagaggaaatcaggacaaccaatcccgtggctacggagcagtatggttctgtatctaccaacctccagagaggcaacagacaagcagctaccgcagatgtcaacacacaaggcgttcttccaggcatggtctggcaggacagagatgtgtaccttcaggggcccatctgggcaaagattccacacacggacggacattttcacccctctcccctcatgggtggattcggacttaaacaccctcctccacagattctcatcaagaacaccccggtacctgcgaatccttcgaccaccttcagtgcggcaaagtttgcttccttcatcacacagtactccacgggacaggtcagcgtggagatcgagtgggagctgcagaaggaaaacagcaaacgctggaatcccgaaattcagtacacttccaactacaacaagtctgttaatgtggactttactgtggacactaatggcgtgtattcagagcctcgccccattggcaccagatacctgactcgtaatctgtaa

SEQ ID NO: 254 - protein, 735 aa, Artificial Sequence
  Description of Artificial Sequence: Synthetic polypeptide
MAADGYLPDWLEDTLSEGIRQRWKLKPGPPPPEPAERHKDDSRGLVLPGYKYLGPFNGLDKGEPVNEADAAALEHDKAYDRQLDSGDNPYLKYNHADAEFQERLKEDTSFGGNLGRAVFQAKKRVLEPLGLVEEPVKTAPGKKRPVEHSPVEPDSSSGTGKAGQQPARKRLNFGQTGDADSVPDPQPLGQPPAAPSGLGTNTMATGSGAPMADNNEGADGVGNSSGNWHCDSTWMGDRVITTSTRTWALPTYNNHLYKQISSQSGASNDNHYFGYSTPWGYFDFNRFHCHFSPRDWQRLINNNWGFRPKRLNFKLFNIQVKEVTQNDGTTTIANNLTSTVQVFTDSEYQLPYVLGSAHQGCLPPFPADVFMVPQYGYLTLNNGSQAVGRSSFYCLEYFPSQMLRTGNNFTFSYTFEDVPFHSSYAHSQSLGRLMNPLIDQYLYYLSRTNTPSGTTTQSRLQFSQAGASDIRDQSRNWLPGPCYRQQRVSKTSADNNNSEYSWTGATKYHLNGRDSLVNPGPAMASHKDDEEKFFPQSGVLIFGKQGSEKTNVDIEKVMITDEEEIRTTNPVATEQYGSVSTNLQRGNRQAATADVNTQGVLPGMVWQDRDVYLQGPIWAKIPHTDGHFHPSPLMGGFGLKHPPPQILIKNTPVPANPSTTFSAAKFASFITQYSTGQVSVEIEWELQKENSKRWNPEIQYTSNYNKSVNVDFTVDTNGVYSEPRPIGTRYLTRNL

SEQ ID NO: 255 - DNA, 2208 bp, Artificial Sequence
  Description of Artificial Sequence: Synthetic polynucleotide
atggctgccgatggttatcttccagattggctcgaggacactctctctgaaggaataagacagcggtggaagctcaaacctggcccaccaccaccagagcccgcagagcggcataaggacgacagcaggggtcttgtgcttcctgggtacaagtacctcggacccttcaacggactcgacaagggagagccggtcaacgaggcagacgccgcggccctcgagcacgacaaagcctacgaccggcagctcgacagcggagacaacccgtacctcaagtacaaccacgccgacgcggagtttcaggagcgccttaaagaagatacgtcttttgggggcaacctcggacgagcagtcttccaggcgaaaaagagggtactcgaacctctgggcctggttgaggaacctgttaagacggctccgggaaaaaagaggccggtagagcactctcctgtggagccagactcctcctcgggaaccggaaaggcgggccagcagcctgcaagaaaaagattgaattttggtcagactggagacgcagactcagtacctgacccccagcctctcggacagccaccagcagccccctctggtctgggaactaatacgatggctacaggcagtggcgcaccaatggcagacaataacgagggcgccgacggagtgggtaattcctcgggaaattggcattgcgattccacatggatgggcgacagagtcatcaccaccagcacccgaacctgggccctgcccacctacaacaaccacctctacaaacaaatttccagccaatcaggagcctcgaacgacaatcactactttggctacagcaccccttgggggtattttgacttcaacagattccactgccacttttcaccacgtgactggcaaagactcatcaacaacaactggggattccgacccaagagactcaacttcaagctctttaacattcaagtcaaagaggtcacgcagaatgacggtacgacgacgattgccaataaccttaccagcacggttcaggtgtttactgactcggagtaccagctcccgtacgtcctcggctcggcgcatcaaggatgcctcccgccgttcccagcagacgtcttcatggtgccacagtatggatacctcaccctgaacaacgggagtcaggcagcaggacgctcttcattttactgcctggagtactttccttctcagatgctgcgtaccggaaacaactttaccttcagctacacttttgaggacgttcctttccacagcagctacgctcacagccagagtctgggccgtctcatgaatcctctcatcgaccagtacctgtattacttgagcagaacaaacactccaagtggaaccaccacgcagtcaaggcttcagttttctcaggccggagcgagtgacattcgggaccagtctaggaactggcttcctggaccctgttaccgccagcagcgagtatcaaagacatctgcggataacaacaacagtgaatactcgtggactggagctaccaagtaccacctcaatggcagagactctctggtgaatccgggcccggccatggcaagccacaaggacgatgaagaaaagttttttcctcagagcggggttctcatctttgggaagcaaggctcagagaaaacaaatgtggacattgaaaaggtcatgattacagacgaagaggaaatcaggacaaccaatcccgtggctacggagcagtatggttctgtatctaccaacctccagagaggcaacagacaagcagctaccgcagatgtcaacacacaaggcgttcttccaggcatggtctggcaggacagagatgtgtaccttcaggggcccatctgggcaaagattccacacacggacggacattttcacccctctcccctcatgggtggattcggacttaaacaccctcctccacagattctcatcaagaacaccccggtacctgcgaatccttcgaccaccttcagtgcggcaaagtttgcttccttcatcacacagtactccacgggacaggtcagcgtggagatcgagtgggagctgcagaaggaaaacagcaaacgctggaatcccgaaattcagtacacttccaactacaacaagtccgttaatgtggactttactgtggacactaatggcgtgtattcagagcctcgccccattggcaccagatacctgactcgtaatctgtaa

SEQ ID NO: 256 - protein, 735 aa, Artificial Sequence
  Description of Artificial Sequence: Synthetic polypeptide
MAADGYLPDWLEDTLSEGIRQRWKLKPGPPPPEPAERHKDDSRGLVLPGYKYLGPFNGLDKGEPVNEADAAALEHDKAYDRQLDSGDNPYLKYNHADAEFQERLKEDTSFGGNLGRAVFQAKKRVLEPLGLVEEPVKTAPGKKRPVEHSPVEPDSSSGTGKAGQQPARKRLNFGQTGDADSVPDPQPLGQPPAAPSGLGTNTMATGSGAPMADNNEGADGVGNSSGNWHCDSTWMGDRVITTSTRTWALPTYNNHLYKQISSQSGASNDNHYFGYSTPWGYFDFNRFHCHFSPRDWQRLINNNWGFRPKRLNFKLFNIQVKEVTQNDGTTTIANNLTSTVQVFTDSEYQLPYVLGSAHQGCLPPFPADVFMVPQYGYLTLNNGSQAAGRSSFYCLEYFPSQMLRTGNNFTFSYTFEDVPFHSSYAHSQSLGRLMNPLIDQYLYYLSRTNTPSGTTTQSRLQFSQAGASDIRDQSRNWLPGPCYRQQRVSKTSADNNNSEYSWTGATKYHLNGRDSLVNPGPAMASHKDDEEKFFPQSGVLIFGKQGSEKTNVDIEKVMITDEEEIRTTNPVATEQYGSVSTNLQRGNRQAATADVNTQGVLPGMVWQDRDVYLQGPIWAKIPHTDGHFHPSPLMGGFGLKHPPPQILIKNTPVPANPSTTFSAAKFASFITQYSTGQVSVEIEWELQKENSKRWNPEIQYTSNYNKSVNVDFTVDTNGVYSEPRPIGTRYLTRNL

SEQ ID NO: 257 - protein, 738 aa, Artificial Sequence; identical to SEQ ID NO: 99
  Description of Artificial Sequence: Synthetic polypeptide

SEQ ID NO: 258 - DNA, 2217 bp, Artificial Sequence
  Description of Artificial Sequence: Synthetic polynucleotide
atggctgctgacggttatcttccagattggctcgaggacaacctctctgagggcattcgcgagtggtgggacctgaaacctggagcccccaagcccaaggccaaccagcagaagcaggacgacggccggggtctggtgcttcctggctacaagtacctcggacccttcaacggactcgacaagggggagcccgtcaacgcggcggacgcagcggccctcgagcacgacaaggcctacgaccagcagctcaaagcgggtgacaatccgtacctgcggtataaccacgccgacgccgagtttcaggagcgtctgcaagaagatacgtcttttgggggcaacctcgggcgagcagtcttccaggccaagaagcgggttctcgaacctctcggtctggttgaggaagctgctaagacggctcctggaaagaagagaccggtagaaccgtcacctcagcgttcccccgactcctccacgggcatcggcaagaaaggccagcagcccgctaaaaagagactgaactttggtcagactggcgactcagagtcagtccccgaccctcaaccaatcggagaaccaccagcaggcccctctggtctgggatctggtacaatggctgcaggcggtggcgctccaatggcagacaataacgaaggcgccgacggagtgggtagttcctcaggaaattggcattgcgattccacatggctgggcgacagagtcatcaccaccagcacccgaacctgggccctgcccacctacaacaaccacctctacaagcaaatatccaatgggacatcgggaggaagcaccaacgacaacacctacttcggctacagcaccccctgggggtattttgacttcaacagattccactgccacttctcaccacgtgactggcagcgactcatcaacaacaactggggattccggccaaaaagactcagcttcaagctcttcaacatccaggtcaaggaggtcacgcagaatgaaggcaccaagaccatcgccaataaccttaccagcacgattcaggtatttacggactcggaataccagctgccgtacgtcctcggctccgcgcaccagggctgcctgcctccgttcccggcggacgtcttcatgattccccagtacggctaccttacactgaacaatggaagtcaagccgtaggccgttcctccttctactgcctggaatattttccatctcaaatgctgcgaactggaaacaattttgaattcagctacaccttcgaggacgtgcctttccacagcagctacgcacacagccagagcttggaccgactgatgaatcctctcatcgaccagtacctgtactacttatccagaactcagtccacaggaggaactcaaggtacccagcaattgttattttctcaagctgggcctgcaaacatgtcggctcaggctaagaactggctacctggaccttgctaccggcagcagcgagtctctacgacactgtcgcaaaacaacaacagcaactttgcttggactggtgccaccaaatatcacctgaacggaagagactctttggtaaatcccggtgtcgccatggcaacccacaaggacgacgaggaacgcttcttcccgtcgagtggagtcctgatgttcggaaaacagggtgctggaagagacaatgtggactacagcagcgttatgctaaccagcgaagaagaaattaaaaccactaaccccgtagccacagaacaatacggtgtggtggctgacaacttgcagcaaaccaatacagggcctattgtgggaaatgtcaacagccaaggagccttacctggcatggtctggcagaaccgagacgtgtacctgcagggtcccatctgggccaagattcctcacacggacggcaacttccacccttcaccgctaatgggaggatttggactgaagcacccacctcctcagatcctgatcaagaacacgccggtacctgcggatcctccaacaacgttcagccaggcgaaattggcttccttcattacgcagtacagcaccggacaggtcagcgtggaaatcgagtgggagctgcagaaggagaacagcaaacgctggaacccagagattcagtacacttcaaactactacaaatctacaaatgtggactttgctgtcaatacagagggaacttattctgagcctcgccccattggtactcgttacctcacccgtaatctgtaa

SEQ ID NO: 259 - protein, 738 aa, Artificial Sequence
  Description of Artificial Sequence: Synthetic polypeptide
MAADGYLPDWLEDNLSEGIREWWDLKPGAPKPKANQQKQDDGRGLVLPGYKYLGPFNGLDKGEPVNAADAAALEHDKAYDQQLKAGDNPYLRYNHADAEFQERLQEDTSFGGNLGRAVFQAKKRVLEPLGLVEEAAKTAPGKKRPVEPSPQRSPDSSTGIGKKGQQPAKKRLNFGQTGDSESVPDPQPIGEPPAGPSGLGSGTMAAGGGAPMADNNEGADGVGSSSGNWHCDSTWLGDRVITTSTRTWALPTYNNHLYKQISNGTSGGSTNDNTYFGYSTPWGYFDFNRFHCHFSPRDWQRLINNNWGFRPKRLSFKLFNIQVKEVTQNEGTKTIANNLTSTIQVFTDSEYQLPYVLGSAHQGCLPPFPADVFMIPQYGYLTLNNGSQAVGRSSFYCLEYFPSQMLRTGNNFEFSYTFEDVPFHSSYAHSQSLDRLMNPLIDQYLYYLSRTQSTGGTQGTQQLLFSQAGPANMSAQAKNWLPGPCYRQQRVSTTLSQNNNSNFAWTGATKYHLNGRDSLVNPGVAMATHKDDEERFFPSSGVLMFGKQGAGRDNVDYSSVMLTSEEEIKTTNPVATEQYGVVADNLQQTNTGPIVGNVNSQGALPGMVWQNRDVYLQGPIWAKIPHTDGNCHPSPLMGGFGLKHPPPQILIKNTPVPADPPTTFSQAKLASFITQYSTGQVSVEIEWELQKENSKRWNPEIQYTSNYYKSTNVDFAVNTEGTYSEPRPIGTRYLTRNL

SEQ ID NO: 260 - protein, 738 aa, Artificial Sequence
  Description of Artificial Sequence: Synthetic polypeptide
MAADGYLPDWLEDNLSEGIREWWDLKPGAPKPKANQQKQDDGRGLVLPGYKYLGPFNGLDKGEPVNAADAAALEHDKAYDQQLKAGDNPYLRYNHADAEFQERLQEDTSFGGNLGRAVFQAKKRVLEPLGLVEEGAKTAPGKKRPVEPSPQRSPDSSTGIGKKGQQPARKRLNFGRTGDSESVPDPQPIGEPPAAPSSVGSGTMAAGGGAPMADNNEGADGVGSSSGNWHCDSTWLGDRVITTSTRTWALPTYNNHLYKQISNGTSGGSTNDNTYFGYSTPWGYLDFNRFHCHFSPRDWQRLINNNWGFRPKRLSFKLFNIQVKEVTQNEGTKTIANNLASTIQVFTDSEYQPPYVLGSAHQGCLPPFPADVFMIPQYGYLTLNNGSQAVGRSSFYCLEYFPSQMLRTGNNFSFSYTFEDVPFHSSYAHSQSLDRLMNPLIDQYLYYLSRTQSTGGTAGTQQLLFSRAGPSNMSAQARNWLPGPCYRQQRVSTTLSQNNNSNFAWTGATKYHLNGRDSLVNPGVAMATNKDDEDRFFPSSGILMFGKQGAGKDNVDYSNVMLTSEEEIKTTNPVATEQYGVVADNLQQQNTAPTVGAVNSQGALPGMVWQNRDVYLQGPIWAKIPHTDGNFHPSPLMGGFGLKHPPPQILIKNTPVPADPPTAFNQAKLNSFIAQYSTGQVSVEIEWELQKENSKRWNPEIQYTSNYYKSTNADFAVNTEGVYSEPRPIGTRYLTRNL

SEQ ID NO: 261 - DNA, 2217 bp, Artificial Sequence
  Description of Artificial Sequence: Synthetic polynucleotide
atggctgccgatggttatcttccagattggctcgaggacaacctctctgagggcattcgcgagtggtgggacctgaaacctggagccccgaaacccaaagccaaccagcaaaagcaggacgacggccggggtctggtgcttcctggctacaagtacctcggacccttcaacggactcgacaagggggagcccgtcaacgcggcggacgcagcggccctcgagcacgacaaggcctacgaccagcagctcaaagcgggtgacaatccgtacctgcggtataatcacgccgacgccgagtttcaggagcgtctgcaagaagatacgtcttttgggggcaacctcgggcgagcagtcttccaggccaagaagcgggttctcgaacctctcggtctggttgaggaaggcgctaagacggctcctggaaagaagagaccggtagagccgtcaccacagcgttcccccgactcctccacgggcatcggcaagaaaggccagcagcccgccagaaagagactcaatttcggtcggactggcgactcagagtcagtccccgaccctcaacctatcggagaacctccagcagcgccctctagtgtgggatctggtacaatggctgcaggcggtggcgcaccaatggcagacaataacgaaggtgccgacggagtgggtagttcctcgggaaattggcattgcgattccacatggctgggcgacagagttatcaccaccagcacccgaacctgggccctgcccacctacaacaaccacctctacaagcaaatctccaacgggacctcgggaggcagcaccaacgacaacacctactttggctacagcaccccctgggggtatcttgactttaacagattccactgccacttctcaccacgtgactggcagcgactcatcaacaacaactggggattccggcccaagagactcagcttcaagctcttcaacatccaggtcaaagaggtcacgcagaatgaaggcaccaagaccatcgccaataacctcgccagcaccatccaggtgtttacggactcggaataccagccgccgtacgtcctcggctctgcccaccagggctgcctgcctccgttcccggcggacgtcttcatgattcctcagtacggctacctgactctcaacaacggtagtcaggccgtgggacgttcctccttctactgcctggagtacttcccctctcagatgctgagaacgggcaacaacttttccttcagctacactttcgaggacgtgcctttccacagcagctacgcgcacagccagagtttggacaggctgatgaatcctctcatcgaccagtacctgtactacctgtcaagaacccagtctacgggaggcacagcgggaacccagcagttgctgttttctcgggccgggcctagcaacatgtcggctcaggccagaaactggctgcctggaccctgctacagacagcagcgcgtctccacgacactgtcgcaaaacaacaacagcaactttgcctggactggtgccaccaagtatcatctgaacggcagagactctctggtgaatccgggcgtcgccatggcaaccaacaaggacgacgaggaccgcttcttcccatccagcggcatcctcatgtttggcaagcagggagctggaaaagacaacgtggactatagcaacgtgatgctaaccagcgaggaagaaatcaagaccaccaaccccgtggccacagaacagtatggcgtggtggctgataacctacagcagcaaaacaccgctcctactgtgggggccgtcaacagccagggagccttacctggcatggtctggcagaaccgggacgtgtacctgcagggtcctatttgggccaagattcctcacacagatggcaactttcacccgtctcctttaatgggcggctttggacttaaacatccgcctcctcagatcctcatcaaaaacactcctgttcctgcggatcctccaacagcgttcaaccaggccaagctgaattctttcatcgcgcagtacagcaccggacaagtcagcgtggagatcgagtgggagctgcagaaggagaacagcaagcgctggaacccagagattcagtatacttccaactactacaaatctacaaatgcggactttgctgttaatactgagggtgtttactctgagcctcgccccattggcactcgttacctcacccgtaatctgtaa

SEQ ID NO: 262 - DNA, 2208 bp, Artificial Sequence
  Description of Artificial Sequence: Synthetic polynucleotide
atggctgccgatggttatcttccagattggctcgaggacactctctctgaaggaataagacagtggtggaagctcaaacctggcccaccaccaccaaagcccgcagagcggcataaggacgacagcaggggtcttgtgcttcctgggtacaagtacctcggacccttcaacggactcgacaagggggagccggtcaacgaggcagacgccgcggccctcgagcacgacaaggcctacgaccggcagctcgacagcggagacaacccgtacctcaagtacaaccacgccgacgcagagtttcaggagcgccttaaagaagatacgtcttttgggggcaacctcggacgagcagtcttccaggcgaaaaagagggttcttgaacctctgggcctggttgaggagcctgttaagacggctccgggaaaaaagaggccggtagagcactctcctgtggagccagactcctcctcgggaaccggaaaagcgggccagcagcctgcaagaaaaagattaaattttggtcagactggagacgcagactccgtacctgacccccagcctctcggacagccaccagcagccccctctggtctgggatctactacaatggctacaggcagtggcgcaccaatggcagacaataacgagggtgccgatggagtgggtaattcctcaggaaattggcattgcgattcccaatggctgggcgacagagtcatcaccaccagcacccgaacctgggccctgcccacatacaacaaccacctctacaagcaaatctccagccaatcaggagccagcaacgacaaccactactttggctacagcaccccctgggggtattttgacttcaacagattccactgccacttttcaccacgtgactggcaaagactcgtcaacaacaaccggggattccggcccaaaagactcaacttcaagctctttaatattcaagtcaaagaggtcacgcagaatgacggtacgacgacgattgccaataaccttaccagcacggttcaggtgtttactgactcggagtaccagctcccgtacgtcctgggctcggcgcatcaaggatgcctcccgccgtttccagcggacgtcttcatggtcccacagtatggatacctcaccctgaacaacgggagtcaggcggtaggacgctcttccttttactgcctggagtactttccttctcagatgctgcgtactggaaacaactttcagttcagctacacttttgaagacgtgcctttccacagcagctacgctcacagccagagtctggatcggctgatgaatcctctgatcgaccagtacctgtattatctgaacaagacacaaacaaatagtggaactcttcagcagtctcggctactgtttagccaagctggaccaaccaacatgtctcttcaagctaaaaactggctgcctggaccttgctacagacagcagcgtctgtcaaaacaggcaaacgacaacaacaacagcaactttccctggactgcagctacaaagtatcatctaaatggccgggactcgttggttaatccaggaccagctatggccagtcacaaggatgacgaagaaaagtttttccccatgcatggaaccctgatatttggtaaacaaggaacaaatgccaacgacgcggatttggaaaatgtcatgattacagatgaagaagaaatcagggccaccaatcccgtggctacggagcagtacgggactgtgtcaaataatttgcaaaactcaaacactggtccaactactggaactgtcaatcaccaaggagcgttacctggtatggtgtggcaggatcgagacgtgtacctgcagggacccatttgggccaagattcctcacaccgatggacactttcatccttctccactgatgggaggttttggactcaaacacccgcctcctcagatcatgatcaaaaacactcccgttccagccaatcctcccacaaacttcagttctgccaagtttgcttctttcatcacacagtattccacgggacaggtcagcgtggagatcgagtgggagctgcagaaggagaacagcaaacgctggaatcccgaaattcagtacacttccaactacaacaagtctgttaatgtggactttactgtggacactaatggtgtgtattcagagcctcgccccattggcaccagatacctgactcgtaatctgtaa

SEQ ID NO: 263 - protein, 735 aa, Artificial Sequence
  Description of Artificial Sequence: Synthetic polypeptide
MAADGYLPDWLEDTLSEGIRQWWKLKPGPPPPKPAERHKDDSRGLVLPGYKYLGPFNGLDKGEPVNEADAAALEHDKAYDRQLDSGDNPYLKYNHADAEFQERLKEDTSFGGNLGRAVFQAKKRVLEPLGLVEEPVKTAPGKKRPVEHSPVEPDSSSGTGKAGQQPARKRLNFGQTGDADSVPDPQPLGQPPAAPSGLGSTTMATGSGAPMADNNEGADGVGNSSGNWHCDSQWLGDRVITTSTRTWALPTYNNHLYKQISSQSGASNDNHYFGYSTPWGYFDFNRFHCHFSPRDWQRLVNNNRGFRPKRLNFKLFNIQVKEVTQNDGTTTIANNLTSTVQVFTDSEYQLPYVLGSAHQGCLPPFPADVFMVPQYGYLTLNNGSQAVGRSSFYCLEYFPSQMLRTGNNFQFSYTFEDVPFHSSYAHSQSLDRLMNPLIDQYLYYLNKTQTNSGTLQQSRLLFSQAGPTNMSLQAKNWLPGPCYRQQRLSKQANDNNNSNFPWTAATKYHLNGRDSLVNPGPAMASHKDDEEKFFPMHGTLIFGKQGTNANDADLENVMITDEEEIRATNPVATEQYGTVSNNLQNSNTGPTTGTVNHQGALPGMVWQDRDVYLQGPIWAKIPHTDGHFHPSPLMGGFGLKHPPPQIMIKNTPVPANPPTNFSSAKFASFITQYSTGQVSVEIEWELQKENSKRWNPEIQYTSNYNKSVNVDFTVDTNGVYSEPRPIGTRYLTRNL

SEQ ID NO: 264 - protein, 738 aa, Artificial Sequence
  Description of Artificial Sequence: Synthetic polypeptide
MAADGYLPDWLEDNLSEGIREWWDLKPGAPKPKANQQKQDDGRGLVLPGYKYLGPFNGLDKGEPVNAADAAALEHDKAYDQQLKAGDNPYLRYNHADAEFQERLQEDTSFGGNLGRAVFQAKKRVLEPLGLVEEAAKTAPGKKRPVEPSPQRSPDSSTGIGKKGQQPAKKRLSFGQTGDSESVPDPQPIGEPPAGPSGLGSGTMAAGGGAPMADNNEGADGVGSSSGNWHCDSTWLGDRVITTSTRTWALPTYNNHLYKQISNGTSGGSTNDNTYFGYSTPWGYFDFNRFHCHFSPRDWQRLINNNWGFRPKRLSFKLFNIQVKEVTQNEGTKTIANNLTSTIQVFTDSEYQLPYVLGSAHQGCLPPFPADVFMIPQYGYLTLNNGSQAVGRSSFYCLEYFPSQMLRTGNNSEFSYTFEDVPFHSSYAHSQSLDRLMNPLIDQYLYYLSRTQSTGGTQGTQQLLFSQAGPANMSAQAKNWLPGPCYRQQRVSTTLSQNNNSNFAWTGATKYHLNGRDSLVNPGVAMATHKDDEERFFPSSGVLMFGKQGAGRDNVDYSSVMLTSEEEIKTTNPVATEQYGVVADNLQQTNTGPIVGNVNSQGALPGMVWQNRDVYLQGPIWAKIPHTDGNFHPSPLMGGFGLKHPPPQILIKNTPVPADPPTTFSQAKLASFITQYSTGQVSVEIEWELQKENSKRWNPEIQYTSNYYKSTNVDFAVNTEGTYSEPRPIGTRYLTRNL

SEQ ID NO: 265 - DNA, 2217 bp, Artificial Sequence
  Description of Artificial Sequence: Synthetic polynucleotide
atggctgctgacggttatcttccagattggctcgaggacaacctctctgagggcattcgcgagtggtgggacctgaaacctggagcccccaagcccaaggccaaccagcagaagcaggacgacggccggggtctggtgcttcctggctacaagtacctcggacccttcaacggactcgacaagggggagcccgtcaacgcggcggacgcagcggccctcgagcacgacaaggcctacgaccagcagctcaaagcgggtgacaatccgtacctgcggtataaccacgccgacgccgagtttcaggagcgtctgcaagaagatacgtcttttgggggcaacctcgggcgagcagtcttccaggccaagaagcgggttctcgaacctctcggtctggttgaggaagctgctaagacggctcctggaaagaagagaccggtagaaccgtcacctcagcgttcccccgactcctccacgggcatcggcaagaaaggccagcagcccgctaaaaagagactgagctttggtcagactggcgactcagagtcagtccccgaccctcaaccaatcggagaaccaccagcaggcccctctggtctgggatctggtacaatggctgcaggcggtggcgctccaatggcagacaataacgaaggcgccgacggagtgggtagttcctcaggaaattggcattgcgattccacatggctgggcgacagagtcatcaccaccagcacccgaacctgggccctgcccacctacaacaaccacctctacaagcaaatatccaatgggacatcgggaggaagcaccaacgacaacacctacttcggctacagcaccccctgggggtattttgacttcaacagattccactgccacttctcaccacgtgactggcagcgactcatcaacaacaactggggattccggccaaaaagactcagcttcaagctcttcaacatccaggtcaaggaggtcacgcagaatgaaggcaccaagaccatcgccaataaccttaccagcacgattcaggtatttacggactcggaataccagctgccgtacgtcctcggctccgcgcaccagggctgcctgcctccgttcccggcggacgtcttcatgattccccagtacggctaccttacactgaacaatggaagtcaagccgtaggccgttcctccttctactgcctggaatattttccatctcaaatgctgcgaactggaaacaattctgaattcagctacaccttcgaggacgtgcctttccacagcagctacgcacacagccagagcttggaccgactgatgaatcctctcatcgaccagtacctgtactacttatccagaactcagtccacaggaggaactcaaggtacccagcaattgttattttctcaagctgggcctgcaaacatgtcggctcaggctaagaactggctacctggaccttgctaccggcagcagcgagtctctacgacactgtcgcaaaacaacaacagcaactttgcttggactggtgccaccaaatatcacctgaacggaagagactctttggtaaatcccggtgtcgccatggcaacccacaaggacgacgaggaacgcttcttcccgtcgagtggagtcctgatgtttggaaaacagggtgctggaagagacaatgtggactacagcagcgttatgctaaccagcgaagaagaaattaaaaccactaaccctgtagccacagaacaatacggtgtggtggctgacaacttgcagcaaaccaatacagggcctattgtgggaaatgtcaacagccaaggagccttacctggcatggtctggcagaaccgagacgtgtacctgcagggtcccatctgggccaagattcctcacacggacggcaacttccacccttcaccgctaatgggaggatttggactgaagcacccacctcctcagatcctgatcaagaacacgccggtacctgcggatcctccaacaacgttcagccaggcgaaattggcttccttcattacgcagtacagcaccggacaggtcagcgtggaaatcgagtgggagctgcagaaggagaacagcaaacgctggaacccagagattcagtacacttcaaactactacaaatctacaaatgtggactttgctgtcaatacagagggaacttattctgagcctcgccccattggtactcgttacctcacccgtaatctgtaa

SEQ ID NO: 266 - protein, 738 aa, Artificial Sequence
  Description of Artificial Sequence: Synthetic polypeptide
MAADGYLPDWLEDNLSEGIREWWDLKPGAPKPKANQQKQDDGRGLVLPGYKYLGPFNGLDKGEPVNAADAAALEHDKAYDQQLKAGDNPYLRYNHADAEFQERLQEDTSFGGNLGRAVFQAKKRVLEPLGPVEEAAKTAPGKKRPVEPPPQRSPDSSTGIGKKGQQPAKKRLNFGQTGDSESVPDPQPIGEPPAGPSGLGSGTMAAGGGAPMADNNEGADGVGSSSGNWHCDSTWLGDRVITTSTRTWALPTYNNHLYKQISNGTSGGSTNDNTYFGYSTPWGYFDFNRFHCHFSPRDWQRLINNNWGFRPKRLSFKLFNIQVKEVTQNEGTKTVANNLTSTIQVFTDSEYQLPYVLGSAHQGCLPPFPADVFMIPQYGYLTLNNGSQAVGRSSFYCLEYFPSQMLRTGNNFEFSYTFEDVPFHSSYAHSQSLDRLMNPLIDQYLYYLSRTQSTGGTQGTQQLLFSQAGPANMSAQAKNWLPGPCYRQQRVSTTLSQNNNSNFAWTGATKYHLNGRDSLVNPGVAMATHKDDEERFFPSSGVLMFGKQGAGRDNVDYSSVMLTSEEEIKTTNPVATEQYGVVADNLQQTNTGPIVGNVNSQGALPGMVWQNRDVYLQGPIWAKIPHTDGNFHPSPLMGGFGLKHPPPQILIKNTPVPADPPTTFSQAKLASFITQYSTGQVSVEIEWELQKENSKRWNPEIQYTSNYYKSTNVDFAVNTEGTYSEPRPIGTRYLTRNL

SEQ ID NO: 267 - DNA, 2217 bp, Artificial Sequence
  Description of Artificial Sequence: Synthetic polynucleotide
atggctgctgacggttatcttccagattggctcgaggacaacctctctgagggcattcgcgagtggtgggacctgaaacctggagcccccaagcccaaggccaaccagcagaagcaggacgacggccggggtctggtgcttcctggctacaagtacctcggacccttcaacggactcgacaagggggagcccgtcaacgcggcggacgcagcggccctcgagcacgacaaggcctacgaccagcagctcaaagcgggtgacaatccgtacctgcggtataaccacgccgacgccgagtttcaggagcgtctacaagaagatacgtcttttgggggcaacctcgggcgagcagtcttccaggccaagaagcgggttctcgaacctctcggtccggttgaggaagctgctaagacggctcctggaaagaagagaccggtagaaccgccacctcagcgttcccccgactcctccacgggcatcggcaagaaaggccagcagcccgctaaaaagagactgaactttggtcagactggcgactcagagtcagtccccgaccctcaaccaatcggagaaccaccagcaggcccctctggtctgggatctggtacaatggctgcaggcggtggcgctccaatggcagacaataacgaaggcgccgacggagtgggtagttcctcaggaaattggcattgcgattccacatggctgggcgacagagtcatcaccaccagcacccgaacctgggccctgcccacctacaacaaccacctctacaagcaaatatccaatgggacatcgggaggaagcaccaacgacaacacctacttcggctacagcaccccctgggggtattttgacttcaacagattccactgccacttctcaccacgtgactggcagcgactcatcaacaacaactggggattccggccaaaaagactcagcttcaagctcttcaacatccaggtcaaggaggtcacgcagaatgaaggcaccaagaccgtcgccaataaccttaccagcacgattcaggtatttacggactcggaataccagctgccgtacgtcctcggctccgcgcaccagggctgcctgcctccgttcccggcggacgtcttcatgattccccagtacggctaccttacactgaacaatggaagtcaagccgtaggccgttcctccttctactgcctggaatattttccatctcaaatgctgcgaactggaaacaattttgaattcagctacaccttcgaggacgtgcctttccacagcagctacgcacacagccagagcttggaccgactgatgaatcctctcatcgaccagtacctgtactacttatccagaactcagtccacaggaggaactcaaggtacccagcaattgttattttctcaagctgggcctgcaaacatgtcggctcaggctaagaactggctacctggaccttgctaccggcagcagcgagtctctacgacactgtcgcaaaacaacaacagcaactttgcttggactggtgccaccaaatatcacctgaacggaagagactctttggtaaatcccggtgtcgccatggcaacccacaaggacgacgaggaacgcttcttcccgtcgagtggagtcctgatgtttggaaaacagggtgctggaagagacaatgtggactacagcagcgttatgctaaccagcgaagaagaaattaaaaccactaaccctgtagccacagaacaatacggtgtggtggctgacaacttgcagcaaaccaatacagggcctattgtgggaaatgtcaacagccaaggagccttacctggcatggtctggcagaaccgagacgtgtacctgcagggtcccatctgggccaagattcctcacacggacggcaacttccacccttcaccgctaatgggaggatttggactgaagcacccacctcctcagatcctgatcaagaacacgccggtacctgcggatcctccaacaacgttcagccaggcgaaattggcttccttcattacgcagtacagcaccggacaggtcagcgtggaaatcgagtgggagctgcagaaggagaacagcaaacgttggaacccagagattcagtacacttcaaactactacaaatctacaaatgtggactttgctgtcaatacagagggaacttattctgagcctcgccccattggtactcgttacctcacccgtaatctgtaa

SEQ ID NO: 268 - protein, 738 aa, Artificial Sequence
  Description of Artificial Sequence: Synthetic polypeptide
MAADGYLPDWLEDNLSEGIREWWDLKPGAPKPKANQQKQDDGRGLVLPGYKYLGPFNGLDKGEPVNAADAAALEHDKAYDQQLKAGDNPYLRYNHADAEFQERLQEDTSFGGNLGRAVFQAKKRVLEPLGLVEEAAKTAPGKKRPVEPSPQRSPDSSTGIGKKGQQPAKKRLNFGQTGDSESVPDPQPIGEPPAGPSGLGSGTMAAGGGAPMADNNEGADGVGSSSGNWHCDSTWLGDRVITTSTRTWALPTYNNHLYKQISNGTSGGSTNDNTYFGYSTPWGYFDFNRFHCHFSPRDWQRLINNNWGFRPKRLSFKLFNIQVKEVTQNEGTKTIANNLTSTIQVFTDSEYQLPYVLGSAHQGCLPPFPADVFMIPQYGYLTLNNGSQAVGRSSFYCLEYFPSQMLRTGNNFEFSYTFEDVPFHSSYAHSQSLDRLMNPLIDQYLYYLSRTQSTGGTQGTQQLLFSQAGPANMSAQAKNWLPGPCYRQQRVSTTLSQSNNSNFAWTGATKYHLNGRDSLVNPGVAMATHKDDEERFFPSSGVLMFGKQGAGRDNVDYSSVMLTSEEEIKTTNPVATEQYGVVADNLQQTNTGPIVGNVNSQGALPGMVWQNRDVYLQGPIWAKIPHTDGNFHPSPLMGGLGLKHPPPQILIKNTPVPADPPTTFSQAKLASFITQYSTGQVSVEIEWELQKENSKRWNPEIQYTSNYYKSTNVDFAVNTEGTYSEPRPIGTRYLTRNL

SEQ ID NO: 269 - DNA, 2217 bp, Artificial Sequence
  Description of Artificial Sequence: Synthetic polynucleotide
atggctgctgacggttatcttccagattggctcgaggacaacctctctgagggcattcgcgagtggtgggacctgaaacctggagcccccaagcccaaggccaaccagcagaagcaggacgacggccggggtctggtgcttcctggctacaagtacctcggacccttcaacggactcgacaagggggagcccgtcaacgcggcggacgcagcggccctcgagcacgacaaggcctacgaccagcagctcaaagcgggtgacaatccgtacctgcggtataaccacgccgacgccgagtttcaggagcgtctgcaagaagatacgtcttttgggggcaacctcgggcgagcagtcttccaggccaagaagcgggttctcgaacctctcggtctggttgaggaagcggctaagacggctcctggaaagaagagaccggtagaaccgtcacctcagcgttcccccgactcctccacgggcatcggcaagaaaggccagcagcccgctaaaaagagactgaactttggtcagactggcgactcagagtcagtccccgaccctcaaccaatcggagaaccaccagcaggcccctctggtctgggatctggtacaatggctgcaggcggtggcgctccaatggcagacaataacgaaggcgccgacggagtgggtagttcctcaggaaattggcattgcgattccacatggctgggcgacagagtcatcaccaccagcacccgaacctgggccctgcccacctacaacaaccacctctacaagcaaatatccaatgggacatcgggaggaagcaccaacgacaacacctacttcggctacagcaccccctgggggtattttgacttcaacagattccactgccacttctcaccacgtgactggcagcgactcatcaacaacaactggggattccggccaaaaagactcagcttcaagctcttcaacatccaggtcaaggaggtcacgcagaatgaaggcaccaagaccatcgccaataaccttaccagcacgattcaggtatttacggactcggaataccagctgccgtacgtcctcggctccgcgcaccagggctgcctgcctccgttcccggcggacgtcttcatgattccccagtacggctaccttacactgaacaatggaagtcaagccgtaggccgttcctccttctactgcctggaatattttccatctcaaatgctgcgaactggaaacaattttgaattcagctacaccttcgaggacgtgcctttccacagcagctacgcacacagccagagcttggaccgactgatgaatcctctcatcgaccagtacctgtactacttatccagaactcagtccacaggaggaactcaaggtacccagcaattgttattttctcaagctgggcctgcaaacatgtcggctcaggctaagaactggctacctggaccttgctaccggcagcagcgagtctctacgacactgtcgcaaagcaacaacagcaactttgcttggactggtgccaccaaatatcacctgaacggaagagactctttggtaaatcccggtgtcgccatggcaacccacaaggacgacgaggaacgcttcttcccgtcgagtggagtcctgatgtttggaaaacagggtgctggaagagacaatgtggactacagcagcgttatgctaaccagcgaagaagaaattaaaaccactaaccctgtagccacagaacaatacggtgtggtggctgacaacttgcagcaaaccaatacagggcctattgtgggaaatgtcaacagccaaggagccttacctggcatggtctggcagaaccgagacgtgtacctgcagggtcccatctgggccaagattcctcacacggacggcaacttccacccttcaccgctaatgggaggacttggactgaagcacccacctcctcagatcctgatcaagaacacgccggtacctgcggatcctccaacaacgttcagccaggcgaaattggcttccttcattacgcagtacagcaccggacaggtcagcgtggaaatcgagtgggagctgcagaaggagaacagcaaacgctggaacccagagattcagtacacttcaaactactacaaatctacaaatgtggactttgctgtcaatacagagggaacttattctgagcctcgccccattggtactcgttacctcacccgtaatctgtaa

SEQ ID NO: 270 - protein, 737 aa, Artificial Sequence
  Description of Artificial Sequence: Synthetic polypeptide
MAADGYLPDWLEDNLSEGIREWWDLKPGAPKPKANQQKQDDGRGLVLPGYKYLGPFNGLDKGEPVNAADAAALEHDKAYDQQLKAGDNPYPRYNHADAEFQERLQEDTPFGGNLGRAVFQAKKRVLEPLGLVEEAAKTAPGKKRPVEPSPQRSPDSSTGIGKKGQQPAKKRLNFGQTGDSESVPDPQPIGEPPAGPSGLGSGTMAAGGGAPMADNNEGADGVGNASGNWHCDSTWLGDRVITTSTRTWALPTYNNHLYKQISSASTGASNDNHYFGYSTPWGYFDFNRFHCHFSPRDWQRLINNNWGFRPKRLNFKLFNIQVKEVTTNDGVTTIANNLTSTVQVFSDSEYQLPYVLGSAHQGCLPPFPADVFMIPQYGYLTLNNGSQAVGRSSFYCLEYFPSQMLRTGNNFTFSYTFEEVPLHSSYAHSQSLDRLMNPLIVQYLYYLNRTQNQSGSAQNKDLLFSRGSPAGMSVQPKNWLPGPCYRQQRVSKTKTDNNNSNFTWTGASKYNLNGRESIINPGTAMASHKDDEDKFFPMSGVMIFGKESAGASNTALDNVMITDEEEIKATNPVATERFGTVAVNFQSSSTDPATGDVHAMGALPGMVWQDRDVYLQGPIWAKIPHTDGHFHPSPLMGGFGLKNPPPQILIKNTPVPANPPAEFSATKFASFITQYSTGQVSVEIEWELQKENSKRWNPEVQYTSNYAKSASVDFTVDNNGLYTEPRPIGTRYLTRPL

SEQ ID NO: 271 - protein, 737 aa, Artificial Sequence
  Description of Artificial Sequence: Synthetic polypeptide
MAADGYLPDWLEDNLSEGIREWWDLKPGAPKPKANQQKQDDGRGLVLPGYKYLGPFNGLDKGEPVNAADAAALEHDKAYDQQLKAGDNPYPRYNHADAEFQERLQEDTSFGGNLGRAVFQAKKRVLEPLGLVEEAAKTAPGKKRPVEPSPQRSPDSSTGIGKKGQQPAKKRLNFGQTGDSESVPDPQPIGEPPAGPSGLGSGTMAAGGGAPMADNNEGADGVGNASGNWHCDSTWLGDRVITTSTRTWALPTYNNHLYKQISSASTGASNDNHYFGYSTPWGYFDFNRFHCHFSPRDWQRLINNNWGFRPKRLNFKLFNIQVKEVTTNDGVTTIANNLTSTVQVFSDSEYQLPYVLGSAHQGCLPPFPADVFMIPQYGYLTLNNGSQAVGRSSFYCLEYFPSQMLRTGNNFTFSYTFEEVPLHSSYAHSQSLDRLMNPLIDQYLYYLNRTQNQSGSAQNKDLLFSRGSPAGMSVQPKNWLPGPCYRQQRVSKTKTDNNNSNFTWTGASKYNLNGRESIINPGTAMASHKDDEDKFFPMSGVMIFGKESAGASNTALDNVMITDEEEIKATNPVATERFGTVAVNFQSSSTDPATGDVHAMGALPGMVWQDRDVYLQGPIWAKIPHTDGHFHPSPLMGGFGLKNPPPQILIKNTPVPANPPAEFSATKFASFITQYSTGQVSVEIEWELQKENSKRWNPEVQYTSNYAKSASVDFTVDNNGLYTEPRPIGTRYLTRPL

SEQ ID NO: 272 - DNA, 2214 bp, Artificial Sequence
  Description of Artificial Sequence: Synthetic polynucleotide
atggctgctgacggttatcttccagattggctcgaggacaacctctctgagggcattcgcgagtggtgggacctgaaacctggagcccccaagcccaaggccaaccagcagaagcaggacgacggccggggtctggtgcttcctggctacaagtacctcggacccttcaacggactcgacaagggggagcccgtcaacgcggcggacgcagcggccctcgagcacgacaaggcctacgaccagcagctcaaagcgggtgacaatccgtacccgcggtataaccacgccgacgccgagtttcaggagcgtctgcaagaagatacgccttttgggggcaacctcgggcgagcagtcttccaggccaagaagcgggttctcgaacctctcggtctggttgaggaagctgctaagacggctcctggaaagaagagaccggtagaaccgtcacctcagcgttcccccgactcctccacgggcatcggcaagaaaggccagcagcccgctaaaaagagactgaactttggtcagactggcgactcagagtcagtccccgaccctcaaccaatcggagaaccaccagcaggcccctctggtctgggatctggtacaatggctgcaggcggtggcgctccaatggcagacaataacgaaggcgccgacggagtgggtaatgcctcaggaaattggcattgcgattccacatggctgggcgacagagtcatcaccaccagcacccgcacctgggccttgcccacctacaataaccacctctacaagcaaatctccagtgcttcaacgggggccagcaacgacaaccactacttcggctacagcaccccctgggggtattttgatttcaacagattccactgccacttttcaccacgtgactggcagcgactcatcaacaacaattggggattccggcccaagagactcaacttcaaactcttcaacatccaagtcaaggaggtcacgacgaatgatggcgtcacaaccatcgctaataaccttaccagcacggttcaagtcttctcggactcggagtaccagcttccgtacgtcctcggctctgcgcaccagggctgcctccctccgttcccggcggacgtgttcatgattccgcaatacggctacctgacgctcaacaatggcagccaagccgtgggacgttcatccttttactgcctggaatatttcccttctcagatgctgagaacgggcaacaactttaccttcagctacacctttgaggaagtgcctctccacagcagctacgcgcacagccagagcctggaccggctgatgaatcctctcatcgtccaatacctgtattacctgaacagaactcaaaatcagtccggaagtgcccaaaacaaggacttgctgttcagccgtgggtctccagctggcatgtctgttcagcccaaaaactggctacctggaccctgttatcggcagcagcgcgtttctaaaacaaaaacagacaacaacaacagcaattttacctggactggtgcttcaaaatataacctcaatgggcgtgaatccatcatcaaccctggcactgctatggcctcacacaaagacgacgaagacaagttctttcccatgagcggtgtcatgatttttggaaaagagagcgccggagcttcaaacactgcattggacaatgtcatgattacagacgaagaggaaattaaagccactaaccctgtggccaccgaaagatttgggaccgtggcagtcaatttccagagcagcagcacagaccctgcgaccggagatgtgcatgctatgggagcattacctggcatggtgtggcaagatagagacgtgtacctgcagggtcccatttgggccaaaattcctcacacagatggacactttcacccgtctcctcttatgggcggctttggactcaagaacccgcctcctcagatcctcatcaaaaacacgcctgttcctgcgaatcctccggcggagttttcagctacaaagtttgcttcattcatcacccaatactccacaggacaagtgagtgtggaaattgaatgggagctgcagaaagaaaacagcaagcgctggaatcccgaagtgcagtacacatccaattatgcaaaatctgccagcgttgattttactgtggacaacaatggactttatactgagcctcgccccattggcacccgttaccttacccgtcccctgtaa

SEQ ID NO: 273 - protein, 736 aa, Artificial Sequence
  Description of Artificial Sequence: Synthetic polypeptide
MAADGYLPDWLEDTLSEGIRQWWKLRPGPPPPKPAERHKDDSRGLVLPGYKYLGPFNGLDKGEPVNEADAAALEHDKAYDRQLDSGDNPYLKYNHADAEFQERLKEDTSFGGNLGRAVFQAKKRVLEPLGLVEEGAETAPGKKRPVEQSPQGPDSSSGIGKTGQQPAKKRLNFGQTGDSESVPDPQPLGEPPATPAAVGPTTMASGGGAPMADNNEGADGVGNASGNWHCDSTWLGDRVITTSTRTWALPTYNNHLYKQISSASTGASNDNHYFGYSTPWGYFDFNRFHCHFSPRDWQRLINNNWGFRPKRLNFKLFNIQVKEVTTNDGVTTIANNLTSTVQVFSDSEYQLPYVLGSAHQGCLPPFPADVFMIPQYGYLTLNNGSQAVGRSSFYCLEYFPSQMLRTGNNFTFSYTFEEVPFHSSYAHSQSLDRLMNPLIDQYLYYPNRTQNQSGSAQNKDLLFSRGSPAGMSVQPKNWLPGPCYRQQRVSKTKTDNNNSNFTWTGASKYNLNGRESIINPGTAMASHKDDEDKFFPMSGVMIFGKESAGASNTALDNVMITDEEEIKATNPVATERFGTVAVNFQSSSTDPATGDVHAMGALPGMVWQGRDVYLQGPIWAKIPHTDGHFHPSPLMGGFGLKNPPPQILIKNTPVPANPPAEFSATKFASFITQYSTGQVSVEIEWELQKENSKRWNPEVQYTSNYAKSANVDFTVDNNGLYTEPRPIGTRYLTRPL

SEQ ID NO: 274 - DNA, 2211 bp, Artificial Sequence
  Description of Artificial Sequence: Synthetic polynucleotide
atggctgccgatggttatcttccagattggctcgaggacactctctctgaaggaataagacagtggtggaagctcagacctggcccaccaccaccaaagcccgcagagcggcataaggacgacagcaggggtcttgtgcttcctgggtacaagtacctcggacccttcaacggactcgacaagggagagccggtcaacgaggcagacgccgcggccctcgagcacgacaaagcctacgaccggcagctcgacagcggagacaacccgtacctcaagtacaaccacgccgacgcggagtttcaggagcgccttaaagaagatacgtcttttgggggcaacctcgggcgagcagtcttccaggccaagaagcgggttctcgaacctctcggtctggttgaggaaggcgctgagacggctcctggaaagaaacgtccggtagagcagtcgccacaagggccagactcctcctcgggcatcggcaagacaggccagcagcccgctaaaaagagactcaattttggtcagactggcgactcagagtcagtccccgatccacaacctctcggagaacctccagcaacccccgctgctgtgggacctactacaatggcttcaggcggtggcgcaccaatggcagacaataacgaaggcgccgacggagtgggtaatgcctcaggaaattggcattgcgattccacatggctgggcgacagagtcatcaccaccagcacccgcacctgggccttgcccacctacaataaccacctctacaagcaaatctccagtgcttcaacgggggccagcaacgacaaccactacttcggctacagcaccccctgggggtattttgatttcaacagattccactgccacttttcaccacgtgactggcagcgactcatcaacaacaattggggattccggcccaagagactcaacttcaaactcttcaacatccaagtcaaggaggtcacgacgaatgatggcgtcacaaccatcgctaataaccttaccagcacggttcaagtcttctcggactcggagtaccagcttccgtacgtcctcggctctgcgcaccagggctgcctccctccgttcccggcggacgtgttcatgattccgcaatacggctacctgacgctcaacaatggcagccaagccgtgggacgttcatccttttactgcctggaatatttcccttctcagatgctgagaacgggcaacaactttaccttcagctacacctttgaggaagtgcctttccacagcagctacgcgcacagccagagcctggaccggctgatgaatcctctcatcgaccaatacctgtattacccgaacagaactcaaaatcagtccggaagtgcccaaaacaaggacttgctgtttagccgtgggtctccagctggcatgtctgttcagcccaaaaactggctacctggaccctgttatcggcagcagcgcgtttctaaaacaaaaacagacaacaacaacagcaattttacctggactggtgcttcaaaatataacctcaatgggcgtgaatccatcatcaaccctggcactgctatggcctcacacaaagacgacgaagacaagttctttcccatgagcggtgtcatgatttttggaaaagagagcgccggagcttcaaacactgcattggacaatgtcatgattacagacgaagaggaaattaaagccactaaccctgtggccaccgaaagatttgggaccgtggcagtcaatttccagagcagcagcacagaccctgcgaccggagatgtgcatgctatgggagcattacctggcatggtgtggcaaggtagagacgtgtacctgcagggtcccatttgggccaaaattcctcacacagatggacactttcacccgtctcctcttatgggcggctttggactcaagaacccgcctcctcagatcctcatcaaaaacacgcctgttcctgcgaatcctccggcggagttttcagctacaaagtttgcttcattcatcacccaatactccacaggacaagtgagtgtggaaattgaatgggagctgcagaaagaaaacagcaagcgctggaatcccgaagtgcagtacacatccaattatgcaaaatctgccaacgttgattttactgtggacaacaatggactttatactgagcctcgccccattggcacccgttaccttacccgtcccctgtaa

SEQ ID NO: 275 - protein, 736 aa, Artificial Sequence
  Description of Artificial Sequence: Synthetic polypeptide
MAADGYLPDWLEDTLSEGIRQWWKLRPGPPPPKPAERHKDDSRGLVLPGYKYLGPFNGLDKGEPVNEADAAALEHDKAYDRQLDSGDNPYLKYNHADAEFQERLKEDTSFGGNLGRAVFQAKKRVLEPLGLVEEGAKTAPGKKRPVEQSPQGPDSSSGIGKTGQQPAKKRLNFGQTGDSESVPDPQPLGEPPATPAAVGPTTMASGGGAPMADNNEGADGVGNASGNWHCDSTWLGDRVITTSTRTWALPTYNNHLYKQISSASTGASNDNHYFGYSTPWGYFDFNRFHCHFSPRDWQRLINNNWGFRPKRLNFKLFNIQVKEVTTNDGVTTIANNLTSTVQVFSDSEYQLPYVLGSAHQGCLPPFPADVFMIPQYGYLTLNNGSQAVGRSSFYCLEYFPSQMLRTGNNFTFSYTFEEVPFHSSYAHSQSLDRLMNPLIDQYLYYPNRTQNQSGSAQNKDLLFSRGSPAGMSVQPKNWLPGPCYRQQRVSKTKTDNNNSNFTWTGASKYNLNGRESIINPGTAMASHKDDEDKFFPMSGVMIFGKESAGASNTALDNVMITDEEEIKATNPVATERFGTVAVNFQSSSTDPATGDVHAMGALPGMVWQGRDVYLQGPIWAKIPHTDGHFHPSPLMGGFGLKNPPPQILIKNTPVPANPPAEFSATKFASFITQYSTGQVSVEIEWELQKENSKRWNPEVQYTSNYAKSANVDFTVDNNGLYTEPRPIGTRYLTRPL

SEQ ID NO: 276 - protein, 736 aa, Artificial Sequence
  Description of Artificial Sequence: Synthetic polypeptide
MAADGYLPDWLEDTLSEGIRQWWKLRPGPPPPKPAERHKDDSRGLVLPGYKYLGPFNGLDKGEPVNEADAAALEHDKAYDRQLDSGDNPYLKYNHADAEFQERLKEDTSFGGNLGRAVFQAKKRVLEPLGLVEEGAKTAPGKKRPVEQSPQGPDSSSGIGKTGQQPAKKRLNFGQTGDSESVPDPQPLGEPPATPAAVGPTTMASGGGAPMADNNEGADGVGNASGNWHCDSTWLGDRVITTSTRTWALPTYNNHLYKQISSASTGASNDNHYFGYSTPWGYFDFNRFHCHFSPRDWQRLINNNWGFRPKRLNFKLFNIQVKEVTTNDGVTTIANNLTSTVQVFSDSEYQLPYVLGSAHQGCLPPFPADVFMIPQYGYLTLNNGSQAVGRSSFYCLEYFPSQMLRTGNNFTFSYTFEEVPFHSSYAHSQSLDRLMNPLIDQYLYYLNRTQNQSGSAQNKDLLFSRGSPAGMSVQPKNWLPGPCYRQQRVSKTKTDNNNSNFTWTGASKYNLNGRESIINPGTAMASHKDDEDKFFPMSGVMIFGKESAGASNTALDNVMITDEEEIKATNPVATERFGTVAVNFQSSSTDPATGDVHAMGALPGMVWQGRDVYLQGPIWAKIPHTDGHFHPSPLMGGFGLKNPPPQILIKNTPVPANPPAEFSATKFASFITQYSTGQVSVEIEWELQKENSKRWNPEVQYTSNYAKSANVDFTVDNNGLYTEPRPIGTRYLTRPL

SEQ ID NO: 277 - protein, 736 aa, Artificial Sequence
  Description of Artificial Sequence: Synthetic polypeptide
MAADGYLPDWLEDTLSEGIRQWWKLRPGPPPPKPAERHKDDSRGLVLPGYKYLGPFNGLDKGEPVNEADAAALEHDKAYDRQLDSGDNPYLKYNHADAEFQERLKEDTSFGGNLGRAVFQAKKRVLEPLGLVEEGAKTAPGKKRPVEQSPQGPDSSSGIGKTGQQPAKKRLNFGQTGDSESVPDPQPLGEPPATPAAVGPTTMASGGGAPMADNNEGADGVGNASGNWHCDSTWLGDRVITTSTRTWALPTYNNHLYKQISSASTGASNDNHYFGYSTPWGYFDFNRFHCHFSPRDWQRLINNNWGFRPKRLNFKLFNIQVKEVTTNDGVTTIANNLTSTVQVFSDSEYQLPYVLGSAHQGCLPPFPADVFMIPQYGYLTLNNGSQAVGRSSFYCLEYFPSQMLRTGNNFTFSYTFEEVPFHSSYAHSQSLDRLMNPLIDQYLYYLNRTQNQSGSAQNKDLLFSRGSPAGMSVQPKNWLPGPCYRQQRVSKTKTDNNNSNFTWTGASKYNLNGRESIINPGTAMASHKDDEDKFFPMSGVMIFGKESAGASNTALDNVMITDEEEIKATNPVATERFGTVAVNFQSSSTDPATGDVHAMGALPGMVWQDRDVYLQGPIWAKIPHTDGHFHPSPLMGGFGLKNPPPQILIKNTPVPANPPAEFSATKFASFITQYSTGQVSVEIEWELQKENSKRWNPEVQYTSNYAKSANVDFTVDNNGLYTEPRPIGTRYLTRPL

SEQ ID NO: 278 - DNA, 2208 bp, Artificial Sequence
  Description of Artificial Sequence: Synthetic polynucleotide
atggctgccgatggctatcttccagattggctcgaggacactctctctgaaggaataagacagtggtggaagctcaaacctggcccaccaccaccaaagcccgcagagcggcatagggacgacagcaggggtcttgtgcttcctgggtacaagtacctcggacccttcaacggactcgacaagggagagccggtcaacgaggcagacgccgcggccctcgagcacgacaaagcctacgaccggcagctcgacagcggagacaacccgtacctcaagtacaaccacgccgacgcggagtttcaggagcgccttaaagaagatacgtcttttgggggcaacctcggacgagcagtcttccaggcgaaaaagagggttcttgaacctctgggcctggttgaggaacctgttaagacggctccgggaaaaaagaggccggtagagcactctcctgtggagccagactcctcctcgggaaccggaaaggcgggccagcagcctgcaagaaaaagattgaattttggtcagactggagacgcagactcagtacctgacccccagcctctcggacagccaccagcagccccctctggtctgggaactaatacgatggctacaggcagtggcgcaccaatggcagacaataacgagggcgccgacggagtgggtaattcctcgggaaattggcattgcgattccacatggatgggcgacagagtcatcaccaccagcacccgaacctgggccctgcccacctacaacaaccacctctacaaacaaatttccagccaatcaggagcctcgaacgacaatcactactttggctacagcaccccttgggggtattttgacttcaacagattccactgccacttttcaccacgtgactggcaaagactcatcaacaacaactggggattccgacccaagagactcaacttcaagctctttaacattcaagtcaaagaggtcacgcagaatgacggtacgacgacgattgccaataaccttaccagcacggttcaggtgtttactgactcggggtaccagctcccgtacgtcctcggctcggcgcatcaaggatgcctcccgccgttcccagcagacgtcttcatggtgccacagtatggataccccaccctgaacaacgggagtcaggcagtaggacgctcttcattttactgcctggagtactttccttctcagatgctgcgtaccggaaacaactttaccttcagctacacttttgaggacgttcctttccacagcagctacgctcacagccagagtctggaccgtctcatgaatcctctcatcgaccagtacctgtattacttgagcacaacaaacactccaagtggaaccaccacgcagtcaaggcttcagttttctcaggccggagcgagtgacattcgggaccagtctaggaactggcttcctggaccctgttaccgccagcagcgagtatcaaagacatctgcggataacaacaacagtgaatactcgtggactggagctaccaagtaccacctcaatggcagagactctctggtgaatccgggcccggccgtggcaagccacaaggacgatgaagaaaagttttttcctcagagcggggttctcatctttgggaagcaaggctcagagaaaacaaatgtggacattgaaaaggtcatgattacagacgaagaggaaatcaggacaaccaatcccgtggctacggagcagtatggttctgtatctaccaacctccagagaggcaacagacaagcagctaccgcagatgtcaacacacaaggcgttcttccaggcatggtctggcaggacagagatgtgtaccttcaggggcccatctgggcaaagattccacacacggacggacattttcacccctctcccctcatgggtggattcggacttaaacaccctcctccacagattctcatcaagaacaccccggtacctgcgaatccttcgaccaccttcagtgcggcaaagtttgcttccttcatcacacagtactccacgggacaggtcagcgtggagatcgagtgggagctgcagaaggaaaacagcaaacgctggaatcccgaaattcagtacacttccaactacaacaagtctgttaatgtggactttactgtggacactaatggcgtgtattcagagcctcgccccattggcaccagatacctgactcgtaatctgtaa

SEQ ID NO: 279 - protein, 735 aa, Artificial Sequence
  Description of Artificial Sequence: Synthetic polypeptide
MAADGYLPDWLEDTLSEGIRQWWKLKPGPPPPKPAERHRDDSRGLVLPGYKYLGPFNGLDKGEPVNEADAAALEHDKAYDRQLDSGDNPYLKYNHADAEFQERLKEDTSFGGNLGRAVFQAKKRVLEPLGLVEEPVKTAPGKKRPVEHSPVEPDSSSGTGKAGQQPARKRLNFGQTGDADSVPDPQPLGQPPAAPSGLGTNTMATGSGAPMADNNEGADGVGNSSGNWHCDSTWMGDRVITTSTRTWALPTYNNHLYKQISSQSGASNDNHYFGYSTPWGYFDFNRFHCHFSPRDWQRLINNNWGFRPKRLNFKLFNIQVKEVTQNDGTTTIANNLTSTVQVFTDSGYQLPYVLGSAHQGCLPPFPADVFMVPQYGYPTLNNGSQAVGRSSFYCLEYFPSQMLRTGNNFTFSYTFEDVPFHSSYAHSQSLDRLMNPLIDQYLYYLSTTNTPSGTTTQSRLQFSQAGASDIRDQSRNWLPGPCYRQQRVSKTSADNNNSEYSWTGATKYHLNGRDSLVNPGPAVASHKDDEEKFFPQSGVLIFGKQGSEKTNVDIEKVMITDEEEIRTTNPVATEQYGSVSTNLQRGNRQAATADVNTQGVLPGMVWQDRDVYLQGPIWAKIPHTDGHFHPSPLMGGFGLKHPPPQILIKNTPVPANPSTTFSAAKFASFITQYSTGQVSVEIEWELQKENSKRWNPEIQYTSNYNKSVNVDFTVDTNGVYSEPRPIGTRYLTRNL

SEQ ID NO: 280 - DNA, 2211 bp, Artificial Sequence
  Description of Artificial Sequence: Synthetic polynucleotide
atggctgccgacggttatcttccagattggctcgaggacactctctctgaaggaataagacagtggtggaagctcaaacctggcccaccaccaccaaagcccgcagagcggcataaggacgacagcaggggtcttgtgcttcctgggtacaagtacctcggacccttcaacggactcgacaagggagagccggtcaacgaggcagacgccgcggccctcgagcacgacaaagcctacgaccggcagctcgacagcggagacaacccgtacctcaagtacaaccacgccgacgcggagtttcaggagcgccttaaagaagatacgtcttttgggggcaacctcgggcgggcagtcttccaggccaagaagcgggttctcgaacctctcggtctggttgaggaaggcgctaagacggctcctggaaagaaacgtccggtagagcagtcgccacaagagccagactccccctcgggcatcggcaagacaggccagcagcccgctaaaaagagactcaattttggtcagactggcgactcagagtcagtccccgatccacaacctctcggagaacctccagcaacccccgctgctgtgggacctactacaatggcttcaggcggtggcgcaccaatggcagacaataacgaaggcgccgacggagtgggtaatgcctcaggaaattggcactgcgattccacatggctgggcgacagagtcatcaccaccagcacccgcacctgggccttgcccacctacaataaccacctctacaagcaaatctccagtgcttcaacgggggccagcaacgacaaccactacttcggctacagcaccccctgggggtattttgatttcaacagattccactgccacttttcaccacgtgactggcagcgactcatcaacaacaattggggattccggcccaagagactcaacttcaaactcttcaacatccaagtcaaggaggtcacgacgaatgatggcgtcacaaccatcgctaataaccttaccagcacggttcaagtcttctcggactcggagtaccagcttccgtacgtcctcggctctgcgcaccagggccgcctccctccgttcccggcggacgtgttcatgattccgcaatacggctacctgacgctcaacaatggcagccaagccgtgggacgttcatcctcttactgcctggaatatttcccttctcagatgctgagaacgggcaacaactttaccttcagctacacctttgaggaagtgcctctccacagcagctgcgcgcacagccagagcctggaccggctgatgaatcctctcatcgaccaatacctgtattacctgaacagaactcaaaatcagtccggaagtgcccaaaacagggacttgctgttcagccgtgggtctccagctggcatgtctgttcagcccaaaaactggctacctggaccctgttatcggcagcagcgcgtttctaaaacaaaaacagacaacaacaacagcaattttacctggactggtgcttcaaaatataacctcaatgggcgtgaatccatcatcaaccctggcactgctatggcctcacacaaagacgacgaagacaagttctttcccatgagcggtgtcatgatttttggaaaagagagcgccggagcttcaaacactgcattggacaatgtcatgattacagacgaagaggaaattaaagccactaaccctgtggccaccgaaagatttgggaccgtggcagtcaatttccagagcagcagcacagaccctgcgaccggagatgtgcatgctatgggagcattacctggcatggtgtggcaagatagagacgtgtacctgcagggtcccatttgggccaaaattcctcacacagatggacactttcacccgtctcctcttatgggcggctttggactcaagaacccgcctcctcagatcctcatcaaaaacacgcctgttcctgcgaatcctccggcggagttttcagctacaaagtttgcttcattcatcacccaatactccgcaggacaagtgagtgtggaaattgaatgggagctgcagaaagaaaacagcaagcgctggaatcccgaagtgcagtacacatccaattatgcaaaatctgccaacgttgattttactgtggacaacaatggactttatactgagcctcgccccattggcacccgttaccttacccgtcccctgtaa

SEQ ID NO: 281 - protein, 736 aa, Artificial Sequence
  Description of Artificial Sequence: Synthetic polypeptide
MAADGYLPDWLEDTLSEGIRQWWKLKPGPPPPKPAERHKDDSRGLVLPGYKYLGPFNGLDKGEPVNEADAAALEHDKAYDRQLDSGDNPYLKYNHADAEFQERLKEDTSFGGNLGRAVFQAKKRVLEPLGLVEEGAKTAPGKKRPVEQSPQEPDSPSGIGKTGQQPAKKRLNFGQTGDSESVPDPQPLGEPPATPAAVGPTTMASGGGAPMADNNEGADGVGNASGNWHCDSTWLGDRVITTSTRTWALPTYNNHLYKQISSASTGASNDNHYFGYSTPWGYFDFNRFHCHFSPRDWQRLINNNWGFRPKRLNFKLFNIQVKEVTTNDGVTTIANNLTSTVQVFSDSEYQLPYVLGSAHQGRLPPFPADVFMIPQYGYLTLNNGSQAVGRSSSYCLEYFPSQMLRTGNNFTFSYTFEEVPLHSSCAHSQSLDRLMNPLIDQYLYYLNRTQNQSGSAQNRDLLFSRGSPAGMSVQPKNWLPGPCYRQQRVSKTKTDNNNSNFTWTGASKYNLNGRESIINPGTAMASHKDDEDKFFPMSGVMIFGKESAGASNTALDNVMITDEEEIKATNPVATERFGTVAVNFQSSSTDPATGDVHAMGALPGMVWQDRDVYLQGPIWAKIPHTDGHFHPSPLMGGFGLKNPPPQILIKNTPVPANPPAEFSATKFASFITQYSAGQVSVEIEWELQKENSKRWNPEVQYTSNYAKSANVDFTVDNNGLYTEPRPIGTRYLTRPL

SEQ ID NO: 282 - protein, 736 aa, Artificial Sequence
  Description of Artificial Sequence: Synthetic polypeptide
MAADGYLPDWLEDTLSEGIRQWWKLKPGPPPPKPAERHKDDSRGLVLPGYKYLGPFNGLDKGEPVNEADAAALEHDKAYDRQLDSGDNPYLKYNHADAEFQERLKEDTSFGGNLGRAVFQAKKRVLEPLGLVEEGAKTAPGKKRPVEQSPQEPDSSSGIGKTGQQPAKKRLNFGQTGDSESVPDPQPLGEPPATPAAVGPTTMASGGGAPMADNNEGADGVGNASGNWHCDSTWLGDRVITTSTRTWALPTYNNHLYKQISSASTGASNDNHYFGYSTPWGYFDFNRFHCHFSPRDWQRLINNNWGFRPKRLNFKLFNIQVKEVTTNDGVTTIANNLTSTVQVFSDSEYQLPYVLGSAHQGCLPPFPADVFMIPQYGYLTLNNGSQAVGRSSFYCLEYFPSQMLRTGNNFTFSYTFEEVPLHSSCAHSQSLDRLMNPLIDQYLYYLNRTQNQSGSAQNRDLLFSRGSPAGMSVQPKNWLPGPCYRQQRVSKTKTDNNNSNFTWTGASKYNLNGRESIINPGTAMASHKDDEDKFFPMSGVMIFGKESAGASNTALDNVMITDEEEIKATNPVATERFGTVAVNFQSSSTDPATGDVHAMGALPGMVWQDRDVYLQGPIWAKIPHTDGHFHPSPLMGGFGLKNPPPQILIKNTPVPANPPAEFSATKFASFITQYSTGQVSVEIEWELQKENSKRWNPEVQYTSNYAKSANVDFTVDNNGLYTEPRPIGTRYLTRPL

SEQ ID NO: 283 - DNA, 2208 bp, Artificial Sequence
  Description of Artificial Sequence: Synthetic polynucleotide
atggctgccgatggctatcttccagattggctcgaggacactctctctgaaggaataagacagtggtggaagctcaaacctggcccaccaccaccaaagcccgcagagcggcatagggacgacagcaggggtcttgtgcttcctgggtacaagtacctcggacccttcaacggactcgacaagggagagccggtcaacgaggcagacgccgcggccctcgagcacgacaaagcctacgaccggcagctcgacagcggagacaacccgtacctcaagtacaaccacgccgacgcggagtttcaggagcgccttaaagaagatacgtcttttgggggcaacctcggacgagcagtcttccaggcgaaaaagagggttcttgaacctctgggcctggttggggaacctgttaagacggctccgggaaaaaagaggccggtagagcactctcctgtggagccagactcctcctcgggaaccggaaaggcgggccagcagcctgcaagaaaaagattgaattttggtcagactggagacgcagactcagtacctgacccccagcctctcggacagccaccagcagccccctctggtctgggaactaatacgatggctacaggcagtggcgcaccaatggcagacaataacgagggcgccgacggagtgggtaattcctcgggaaattggcattgcgattccacatggatgggcgacagagtcatcaccaccagcacccgaacctgggccctgcccacctacaacaaccacctctacaaacaaatttccagccaatcaggagcctcgaacgacagtcactactttggctacagcaccccttgggggtattttgacttcaacagattccactgccacttttcaccacgtgactggcaaagactcatcaacaacaactggggattccgacccaagagactcaacttcaagctctttaacattcaagtcaaagaggtcacgcagaatgacggtacgacgacgattgccaataaccttaccagcacggttcaggtgtttactgactcggagtaccagctcccgtacgtcctcggctcggcgcatcaaggatgcctcccgccgttcccagcagacgtcttcatggtgccacagtatggatacctcaccctgaacaacgggagtcaggcagtaggacgctcttcattttactgcctggagtactttccttctcagatgctgcgtaccggaaacaactttaccttcagctacacttttgaggacgttcctttccacagcagctacgctcacagccagagtctggaccgtctcatgaatcctctcatcgaccagtacctgtattacttgagcacaacaaacactccaagtggaaccaccacgcagtcaaggctccagttttctcaggccggagcgagtgacattcgggaccagtctaggaactggcttcctggaccctgttaccgccagcagcgagtatcaaagacatctgcggataacaacaacagtgaatactcgtggactggagctaccaagtaccacctcaatggcagagactctctggtgaatccgggcccggccatggcaagccacaaggacaatgaagaaaagttttttcctcagagcggggttctcatctttgggaagcaaggctcagagaaaacaaatgtggacattgaaaaggtcatgattacagacgaagaggaaatcaggacaaccaatcccgtggctacggagcagtatggttctgtatctaccaacctccagagaggcaacagacaagcagctaccgcagatgtcaacacacaaggcgttcttccaggcatggtctggcaggacagagatgtgtaccttcaggggcccatctgggcaaagattccacacacggacggacattttcacccctctcccctcatgggtggattcggacttaaacaccctcctccacagattctcatcaagaacaccccggtacctgcgaatccttcgaccaccttcagtgcggcaaagtttgcttccttcatcacacagtactccacgggacaggtcagcgtggagatcgagtgggagctgcagaaggaaaacagcaaacgctggaatcccgaaattcagtacacttccaactacaacaagtctgttaatgtggactttactgtggacactaatggcgtgtattcagagcctcgccccattggcaccagatacctgactcgtaatctgtaa

SEQ ID NO: 284 - protein, 735 aa, Artificial Sequence
  Description of Artificial Sequence: Synthetic polypeptide
MAADGYLPDWLEDTLSEGIRQWWKLKPGPPPPKPAERHRDDSRGLVLPGYKYLGPFNGLDKGEPVNEADAAALEHDKAYDRQLDSGDNPYLKYNHADAEFQERLKEDTSFGGNLGRAVFQAKKRVLEPLGLVGEPVKTAPGKKRPVEHSPVEPDSSSGTGKAGQQPARKRLNFGQTGDADSVPDPQPLGQPPAAPSGLGTNTMATGSGAPMADNNEGADGVGNSSGNWHCDSTWMGDRVITTSTRTWALPTYNNHLYKQISSQSGASNDSHYFGYSTPWGYFDFNRFHCHFSPRDWQRLINNNWGFRPKRLNFKLFNIQVKEVTQNDGTTTIANNLTSTVQVFTDSEYQLPYVLGSAHQGCLPPFPADVFMVPQYGYLTLNNGSQAVGRSSFYCLEYFPSQMLRTGNNFTFSYTFEDVPFHSSYAHSQSLDRLMNPLIDQYLYYLSTTNTPSGTTTQSRLQFSQAGASDIRDQSRNWLPGPCYRQQRVSKTSADNNNSEYSWTGATKYHLNGRDSLVNPGPAMASHKDNEEKFFPQSGVLIFGKQGSEKTNVDIEKVMITDEEEIRTTNPVATEQYGSVSTNLQRGNRQAATADVNTQGVLPGMVWQDRDVYLQGPIWAKIPHTDGHFHPSPLMGGFGLKHPPPQILIKNTPVPANPSTTFSAAKFASFITQYSTGQVSVEIEWELQKENSKRWNPEIQYTSNYNKSVNVDFTVDTNGVYSEPRPIGTRYLTRNL

SEQ ID NO: 285 - protein, 737 aa, Artificial Sequence
  Description of Artificial Sequence: Synthetic polypeptide
RMAADGYLPDWLEDNLSEGIREWWDLKPGAPKPKANQQKQDDGRGLVLPGYKYLGPFNGLDKGEPVNAADAAALEHDKAYDQQLKAGDNPYLRYNHADAEFQERLQEDTSFGGNLGRAVFQAKKRVLEPLGLVEEGAKTAPGKKRPVEQSPQEPDSSSGIGKTGQQPAKKRLNFGQTGDSESVPDPQPLGEPPATPAAVGPTTMASGGGAPMADNNEGADGVGNASGNWHCDSTWLGDRVITTSTRTWALPTYNNHLYKQISSTSTGASNDNHYFGYGTPWGYFDFNRFHCHFSPRDWQRLINNNWGFRPKRLNFKLFNIQVEEVTTNDGVTTIANNLTSTVQVFSDSEYQLPYVLGSAHQGCLPPFPADVFMIPQYGYLTLNNGSQAVGRSSFYCLEYFPSQMLRTGNNFTFSYTFEEVPFHSSYAHSQSLDRLMNPLIDQYLYYLNRTQNQSGSAQNKDLLFSRGSPAGMSVQPKNWLPGPCYRQQRVSKTKTDNNNSNFTWTGASKYNLNGRESIINPGTAVASHKDDEDKFFPMSGVMIFGKESAGASSTALDNVMITDEEEIKATNPVATERFGTVAVNFQSSSTDPATGDVHAMGALPGMVWQDRDVYLQGPIWAKIPHTDGHFHPSPLMGGFGLKNPPPQILIKNTPVPANPPAEFSATKFASFITQYSTGQVSVEIEWELQKENSKRWNPEVQYTSNYAKSANVDFTVDNNGLYTEPRPIGTRYLTRPL

SEQ ID NO: 286 - protein, 736 aa, Artificial Sequence
  Description of Artificial Sequence: Synthetic polypeptide
MAADGYLPDWLEDNLSEGIREWWDLKPGAPKPKANQQKQDDGRGLVLPGYKYLGPFNGLDKGEPVNAADAAALEHDKAYDQQLKAGDNPYLRYNHADAEFQERLQEDTSFGGNLGRAVFQAKKRVLEPLGLVEEGAKTAPGKKRPVEQSPQEPDSSSGIGKTGQQPAKKRLNFGQTGDSESVPDPQPLGEPPATPAAVGPTTMASGGGAPMADNNEGADGVGNASGNWHCDSTWLGDRVITTSTRTWALPTYNNHLYKQISSTSTGASNDNHYFGYGTPWGYFDFNRFHCHFSPRDWQRLINNNWGFRPKRLNFKLFNIQVEEVTTNDGVTTIANNLTSTVQVFSDSEYQLPYVLGSAHQGCLPPFPADVFMIPQYGYLTLNNGSQAVGRSSFYCLEYFPSQMLRTGNNFTFSYTFEEVPFHSSYAHSQSLDRLMNPLIDQYLYYLNRTQNQSGSAQNKDLLFSRGSPAGMSVQPKNWLPGPCYRQQRVSKTKTDNNNSNFTWTGASKYNLNGRESIINPGTAVASHKDDEDKFFPMSGVMIFGKESAGASSTALDNVMITDEEEIKATNPVATERFGTVAVNFQSSSTDPATGDVHAMGALPGMVWQDRDVYLQGPIWAKIPHTDGHFHPSPLMGGFGLKNPPPQILIKNTPVPANPPAEFSATKFASFITQYSTGQVSVEIEWELQKENSKRWNPEVQYTSNYAKSANVDFTVDNNGLYTEPRPIGTRYLTRPL

SEQ ID NO: 287 - DNA, 2211 bp, Artificial Sequence
  Description of Artificial Sequence: Synthetic polynucleotide
atggctgccgatggttatcttccagattggctcgaggacaacctctctgagggcattcgcgagtggtgggacttgaaacctggagccccgaagcccaaagccaaccagcaaaagcaggacgacggccggggtctggtgcttcctggctacaagtacctcggacccttcaacggactcgacaagggggagcccgtcaacgcggcggacgcagcggccctcgagcacgacaaggcctacgaccagcagctcaaagcgggtgacaatccgtacctgcggtataaccacgccgacgccgagtttcaggagcgtctgcaagaagatacgtcttttgggggcaacctcgggcgagcagtcttccaggccaagaagcgggttctcgaacctctcggtctggttgaggaaggcgctaagacggctcctggaaagaaacgtccggtagagcagtcgccacaagagccagactcctcctcgggcatcggcaagacaggccagcagcccgctaaaaagagactcaattttggccagactggcgactcagagtcagtccccgatccacaacctctcggagaacctccagcaacccccgctgctgtgggacctactacaatggcttcaggcggtggcgcaccaatggcagacaataacgaaggcgccgacggagtgggtaatgcctcaggaaattggcattgcgattccacatggctgggcgacagagtcatcaccaccagcacccgcacctgggccttgcccacctacaataaccacctctacaagcaaatctccagtacttcaacgggggccagcaacgacaaccactacttcggctacggcaccccctgggggtattttgatttcaacagattccactgccacttttcaccacgtgactggcagcgactcatcaacaacaattggggattccggcccaagagactcaacttcaaactcttcaacatccaagtcgaggaggtcacgacgaatgatggcgtcacaaccatcgctaataaccttaccagcacggttcaagtcttctcggactcggagtaccagcttccgtacgtcctcggctctgcgcaccagggctgcctccctccgttcccggcggacgtgttcatgattccgcaatacggctacctgacgctcaacaatggcagccaagccgtgggacgttcatccttttactgcctggaatatttcccttctcagatgctgagaacgggcaacaactttaccttcagctacacctttgaggaagtgcctttccacagcagctacgcgcacagccagagcctggaccggctgatgaatcctctcatcgaccaatacctgtattacctgaacagaacacaaaatcagtccggaagtgcccaaaacaaggacttgctgtttagccgtgggtctccagctggcatgtctgttcagcccaaaaactggctacctggaccctgttatcggcagcagcgcgtttctaaaacaaaaacagacaacaacaacagcaattttacctggactggtgcttcaaaatataacctcaatgggcgtgaatccatcatcaaccctggcaccgctgtggcctcacacaaagacgacgaagacaagttctttcccatgagcggtgtcatgatttttggaaaagagagcgccggagcttcaagcactgcattggacaatgtcatgattacagacgaagaggaaattaaagccactaaccctgtggccaccgaaagatttgggaccgtggcagtcaatttccagagcagcagcacagaccctgcgaccggagatgtgcatgctatgggagcattacctggcatggtgtggcaagatagagacgtgtacctgcagggtcccatttgggccaaaattcctcacacagatggacactttcacccgtctcctcttatgggcggctttggactcaagaacccgcctcctcagatcctcatcaaaaacacgcctgttcctgcgaatcctccggcggagttttcagctacaaagtttgcttcattcatcacccaatactccacaggacaagtgagtgtggaaattgaatgggagctgcagaaagaaaacagcaagcgctggaatcccgaagtgcagtacacatccaattatgcaaaatctgccaacgttgattttactgtggacaacaatggactttatactgagcctcgccccattggcacccgttaccttacccgtcccctgtaa

SEQ ID NO: 288 - protein, 737 aa, Artificial Sequence
  Description of Artificial Sequence: Synthetic polypeptide
RMAADGYLPDWLEDNLSEGIREWWDLKPGAPKPKANQQKQDDGRGLVLPGYKYLGPFNGLDKGEPVNAADAAALEHDKAYDQQLKAGDNPYLRYNHADAEFQERLQEDTSFGGNLGRAVFQAKKRVLEPLGLVEEGAKTAPGKKRPVEQSPQEPDSSSGIGKTGQQPAKKRLNFGQTGDSESVPDPQPLGEPPATPAAVGPTTMASGGGAPMADNNEGADGVGNASGNWHCDSTWLGDRVITTSTRTWALPTYNNHLYKQISSTSTGASNDNHYFGYSTPWGYFDFNRFHCHFSPRDWQRLINNNWGFRPKRLNFKLFNIQVEEVTTNDGVTTIANNLTSTVQVFSDSEYQLPYVLGSAHQGCLPPFPADVFMIPQYGYLTLNNGSQAVGRSSFYCLEYFPSQMLRTGNNFTFSYTFEEVPFHSSYAHSQSLDRLMNPLIDQYLYYLNRTQNQSGSAQNKDLLFSRGSPAGMSVQPKNWLPGPCYRQQRVSKTKTDNNNSNFTWTGASKYNLNGRESIINPGTAVASHKDDEDKFFPMSGVMIFGKESAGASSTALDNVMITDEEEIKATNPVATERFGTVAVNFQSSSTDPATGDVHAMGALPGMVWQDRDVYLQGPIWAKIPHTDGHFHPSPLMGGFGLKNPPPQILIKNTPVPANPPAEFSATKFASFITQYSTGQVSVEIEWELQKENSKRWNPEVQYTSNYAKSANVDFTVDNNGLYTEPRPIGTRYLTRPL

SEQ ID NO: 289 - protein, 737 aa, Artificial Sequence
  Description of Artificial Sequence: Synthetic polypeptide
RMAADGYLPDWLEDNLSEGIREWWDLKPGAPKPKANQQKQDDGRGLVLPGYKYLGPFNGLDKGEPVNAADAAALEHDKAYDQQLKAGDNPYLRYNHADAEFQERLQEDTSFGGNLGRAVFQAKKRVLEPLGLVEEGAKTAPGKKRPVEQSPQEPDSSSGIGKTGQQPAKKRLNFGQTGDSESVPDPQPLGEPPATPAAVGPTTMASGGGAPMADNNEGADGVGNASGNWHCDSTWLGDRVITTSTRTWALPTYNNHLYKQISSTSTGASNDNHYFGYSTPWGYFDFNRFHCHFSPRDWQRLINNNWGFRPKRLNFKLFNIQVKEVTTNDGVTTIANNLTSTVQVFSDSEYQLPYVLGSAHQGCLPPFPADVFMIPQYGYLTLNNGSQAVGRSSFYCLEYFPSQMLRTGNNFTFSYTFEEVPFHSSYAHSQSLDRLMNPLIDQYLYYLNRTQNQSGSAQNKDLLFSRGSPAGMSVQPKNWLPGPCYRQQRVSKTKTDNNNSNFTWTGASKYNLNGRESIINPGTAVASHKDDEDKFFPMSGVMIFGKESAGASSTALDNVMITDEEEIKATNPVATERFGTVAVNFQSSSTDPATGDVHAMGALPGMVWQDRDVYLQGPIWAKIPHTDGHFHPSPLMGGFGLKNPPPQILIKNTPVPANPPAEFSATKFASFITQYSTGQVSVEIEWELQKENSKRWNPEVQYTSNYAKSANVDFTVDNNGLYTEPRPIGTRYLTRPL

SEQ ID NO: 290 - protein, 737 aa, Artificial Sequence
  Description of Artificial Sequence: Synthetic polypeptide
RMAADGYLPDWLEDNLSEGIREWWDLKPGAPKPKANQQKQDDGRGLVLPGYKYLGPFNGLDKGEPVNAADAAALEHDKAYDQQLKAGDNPYLRYNHADAEFQERLQEDTSFGGNLGRAVFQAKKRVLEPLGLVEEGAKTAPGKKRPVEQSPQEPDSSSGIGKTGQQPAKKRLNFGQTGDSESVPDPQPLGEPPATPAAVGPTTMASGGGAPMADNNEGADGVGNASGNWHCDSTWLGDRVITTSTRTWALPTYNNHLYKQISSTSTGASNDNHYFGYSTPWGYFDFNRFHCHFSPRDWQRLINNNWGFRPKRLNFKLFNIQVKEVTTNDGVTTIANNLTSTVQVFSDSEYQLPYVLGSAHQGCLPPFPADVFMIPQYGYLTLNNGSQAVGRSSFYCLEYFPSQMLRTGNNFTFSYTFEEVPFHSSYAHSQSLDRLMNPLIDQYLYYLNRTQNQSGSAQNKDLLFSRGSPAGMSVQPKNWLPGPCYRQQRVSKTKTDNNNSNFTWTGASKYNLNGRESIINPGTAVASHKDDEDKFFPMSGVMIFGKESAGANSTALDNVMITDEEEIKATNPVATERFGTVAVNFQSSSTDPATGDVHAMGALPGMVWQDRDVYLQGPIWAKIPHTDGHFHPSPLMGGFGLKNPPPQILIKNTPVPANPPAEFSATKFASFITQYSTGQVSVEIEWELQKENSKRWNPEVQYTSNYAKSANVDFTVDNNGLYTEPRPIGTRYLTRPL

SEQ ID NO: 291 - DNA, 2208 bp, Artificial Sequence
  Description of Artificial Sequence: Synthetic polynucleotide
atggctgccgatggttatcttccagattggctcaaggacactctctctgaaggaataagacagtggtggaagctcaaacctggcccaccaccaccaaagcccgcagagcggcataaggacgacagcgggggtcttgtgcttcctgggtacaagtacctcggacccttcaacggactcgacaagggagagccggtcaacgaggcagacgccgcggccctcgagtacgacaaggcctacgaccggcagctcgacagcggagacaacccgtacctcaagtacaaccacgccgacgcggagtttcaggagcgccttaaagaagatacgtcttttgggggcaacctcggacgagcagtcttccaggcgaaaaagagggttcttgaacctctgggcctggttgaggaacctgttaagacggctccgggaaaaaagaggccggtagagcactctcctgtggagccagactcctcctcgggaacaggaaaagcgggccagcagcctgcgagaaagagattgaattttggtcagactggagacgcagactccgtacctgacccccagcctctcggacagccaccagcagccccctctggtctgggaactaatacgatggctacaggcagtggcgcaccaatggcagacaataacgagggcgccgacggagtgggtaattcctcgggaagttggcattgcgattccacatggatgggcgacagagtcatcaccaccagcacccgaacctgggctctgcccacctacaacaaccatctgtacaagcagatctccagccaatcaggagccagcaacgacaaccactactttggctacagcaccccttgggggtattttgacttcaacagattccactgccacttttcaccacgtgactggcaaagactcatcaacaacaactggggattccggcccaagagactcaacttcaagctctttaacattcaagtcaaggaggtcacgcagaatgacggtacgacgacgattgccaataaccttaccagcacggttcaggtgtttactgactcggagtaccagctcccgtacgtccccggctcggcgcatcaaggatgcctcccgccgttcccagcagacgtcttcatggtgccacagtatggatacctcaccctgaacaacgggagtcaggcagtaggacgctcttcattttactgcctggagtactttccttctcagatgcttcgtaccggaaacaactttaccttcagctacacctttgaggatgttcctttccacagcagctacgctcacagccagagtttggaccgtctcatgaatcctctcatcgaccagtacctgtattacttgagcagaacaaacactccaagcggaaccaccacgcagtccaggcttcagttttctcaggccggagcaagtgacattcgggaccagtctaggaactggcttcctggaccctgttaccgccagcagcgagtatcaaagacagctgcggacaacaacaacagtgaatactcgtggactggagctaccaagtaccacctcaatggcagagactctctggtgaatccgggcccggccatggccagccacaaggacgatgaagaaaagttttttcctcaaagcggggttctcatctttgggaagcaaggctcagagaaaacaaatgtggacattgaaaaggtcatgattacagacgaagaggaaatcagaaccaccaatcccgtggccacggagcagtatggttctgtatctaccaacctccagagcggcaacacacaagcagctactgcagatgtcaacacacaaggcgttcttccaggcatggtctggcaggacagagacgtgcacctgcaggggcctatctgggcaaagattccacacacggacggacattttcacccctctcccctcatgggcggatttggacttaaacaccctcctccacagattctcatcaagaacaccccggtacctgcaaatccttcgaccaccttcagtgcggcaaagtttgcttccttcatcacacagtattccacagggcaggtcagcgtggagatcgagtgggagctgcagaaggagaacagcaaacgctggaaccccgagatccagtacacttccaactacaacaaatctgttaatgtggactttactgtggacactaatggtgtgtattcagagcctcgccccattggcaccagatacctgactcgtaatctgtaa

SEQ ID NO: 292 - protein, 735 aa, Artificial Sequence
  Description of Artificial Sequence: Synthetic polypeptide
MAADGYLPDWLKDTLSEGIRQWWKLKPGPPPPKPAERHKDDSGGLVLPGYKYLGPFNGLDKGEPVNEADAAALEYDKAYDRQLDSGDNPYLKYNHADAEFQERLKEDTSFGGNLGRAVFQAKKRVLEPLGLVEEPVKTAPGKKRPVEHSPVEPDSSSGTGKAGQQPARKRLNFGQTGDADSVPDPQPLGQPPAAPSGLGTNTMATGSGAPMADNNEGADGVGNSSGSWHCDSTWMGDRVITTSTRTWALPTYNNHLYKQISSQSGASNDNHYFGYSTPWGYFDFNRFHCHFSPRDWQRLINNNWGFRPKRLNFKLFNIQVKEVTQNDGTTTIANNLTSTVQVFTDSEYQLPYVPGSAHQGCLPPFPADVFMVPQYGYLTLNNGSQAVGRSSFYCLEYFPSQMLRTGNNFTFSYTFEDVPFHSSYAHSQSLDRLMNPLIDQYLYYLSRTNTPSGTTTQSRLQFSQAGASDIRDQSRNWLPGPCYRQQRVSKTAADNNNSEYSWTGATKYHLNGRDSLVNPGPAMASHKDDEEKFFPQSGVLIFGKQGSEKTNVDIEKVMITDEEEIRTTNPVATEQYGSVSTNLQSGNTQAATADVNTQGVLPGMVWQDRDVHLQGPIWAKIPHTDGHFHPSPLMGGFGLKHPPPQILIKNTPVPANPSTTFSAAKFASFITQYSTGQVSVEIEWELQKENSKRWNPEIQYTSNYNKSVNVDFTVDTNGVYSEPRPIGTRYLTRNL

SEQ ID NO: 293 - DNA, 2208 bp, Artificial Sequence
  Description of Artificial Sequence: Synthetic polynucleotide
atggctgccgatggttatcttccagattggctcgaggacactctctctgaaggaataagacagtggtggaagctcaaacctggcccaccaccaccaaagcccgcagagcggcataaggacgacagcaggggtcttgtgcttcctgggtacaagtacctcggacccttcaacggactcgacaagggggagccggtcaacgaggcagacgccgcggccctcgagcacgacaaggcctacgaccggcagctcgacagcggagacaacccgtacctcaagtacaaccacgccgacgcagagtttcaggagcgccttaaagaagatacgtcttttgggggcaacctcggacgagcagtcttccaggcgaaaaagagggttcttgaacctctgggcctggttgaggaacctgttaagacggctccgggaaaaaagaggccggtagagcactctcctgtggagccagactcctcctcgggaaccggaaaagcgggccagcagcctgcaagaaaaagattaaattttggtcagactggagacgcagactccgtacctgacccccagcctctcggacagccaccagcagccccctctggtctgggatctactacaatggctacaggcagtggcgcaccaatggcagacaataacgagggtgccgatggagtgggtaattcctcaggaaattggcattgcgattcccaatggctgggcgacagagtcatcaccaccagcacccgaacctgggccctgcccacatacaacaaccacctctacaagcaaatctccagccaatcaggagccagcaacgacaaccactactttggctacagcaccccctgggggtattttgacttcaacagattccactgccacttttcaccacgtgactggcaaagactcatcaacaacaactggggattccggcccaaaagactcaacttcaagctctttaatattcaagtcaaagaggtcacgcagaatgacggtacgacgacgattgccaataaccttaccagcacggttcaggtgtttactgactcggagtaccagctcccgtacgtcctgggctcggcgcatcaaggatgcctcccgccgtttccagcggacgtcttcatggtcccacagtatggatacctcaccctgaacaacgggagtcaggcggtaggacgctcttccttttactgcctggagtactttccttctcagatgctgcgtactggaaacaactttcagttcagctacacttttgaagacgtgcctttccacagcagctacgctcacagccagagtctggatcggctgatgaatcctctgatcgaccagtacctgtattatctgaacaagacacaaacaaatagtggaactcttcagcagtctcggctactgtttagccaagctggaccaaccaacatgtctcttcaagctaaaaactggctgcctggaccttgctacagacagcagcgtctgtcaaaacaggcaaacgacaacaacaacagcaactttccctggactgcagctacaaagtatcatctaaatggccgggactcgttggttaatccaggaccagctatggccagtcgcaaggatgacgaagaaaagtttttccccatgcatggaaccctgatatttggtaaacaaggaacaaatgccaacgacgcggatttggaaaatgtcatgattacagatgaagaagaaatcagggccaccaatcccgtggctacggagcagtacgggactgtgtcaaataatttgcaaaactcaaacactggtccaactactggaactgtcaatcaccaaggagcgttacctggtatggtgtggcaggatcgagacgtgtacctgcagggacccatttgggccaagattcctcacaccgatggacactttcatccttctccactgatgggaggttttggactcaaacacccgcctcctcagatcatgatcaaaaacactcccgttccagccaatcctcccacaaacttcagttctgccaagtttgcttctttcatcacacagtattccacgggacaggtcagcgtggagatcgagtgggagctgcagaaggagaacagcaaacgctggaatcccgaaattcagtacacttccaactacaacaagtctgttaatgtggactttactgtggacactaatggtgtgtattcagagcctcgccccattggcaccagatacctgactcgtaatctgtaa

SEQ ID NO: 294 - protein, 735 aa, Artificial Sequence
  Description of Artificial Sequence: Synthetic polypeptide
MAADGYLPDWLEDTLSEGIRQWWKLKPGPPPPKPAERHKDDSRGLVLPGYKYLGPFNGLDKGEPVNEADAAALEHDKAYDRQLDSGDNPYLKYNHADAEFQERLKEDTSFGGNLGRAVFQAKKRVLEPLGLVEEPVKTAPGKKRPVEHSPVEPDSSSGTGKAGQQPARKRLNFGQTGDADSVPDPQPLGQPPAAPSGLGSTTMATGSGAPMADNNEGADGVGNSSGNWHCDSQWLGDRVITTSTRTWALPTYNNHLYKQISSQSGASNDNHYFGYSTPWGYFDFNRFHCHFSPRDWQRLINNNWGFRPKRLNFKLFNIQVKEVTQNDGTTTIANNLTSTVQVFTDSEYQLPYVLGSAHQGCLPPFPADVFMVPQYGYLTLNNGSQAVGRSSFYCLEYFPSQMLRTGNNFQFSYTFEDVPFHSSYAHSQSLDRLMNPLIDQYLYYLNKTQTNSGTLQQSRLLFSQAGPTNMSLQAKNWLPGPCYRQQRLSKQANDNNNSNFPWTAATKYHLNGRDSLVNPGPAMASRKDDEEKFFPMHGTLIFGKQGTNANDADLENVMITDEEEIRATNPVATEQYGTVSNNLQNSNTGPTTGTVNHQGALPGMVWQDRDVYLQGPIWAKIPHTDGHFHPSPLMGGFGLKHPPPQIMIKNTPVPANPPTNFSSAKFASFITQYSTGQVSVEIEWELQKENSKRWNPEIQYTSNYNKSVNVDFTVDTNGVYSEPRPIGTRYLTRNL

SEQ ID NO: 295 - DNA, 2208 bp, Artificial Sequence
  Description of Artificial Sequence: Synthetic polynucleotide
atggctgccgatggttatcttccagattggctcgaggacactctctctgaaggaataagacagtggtggaagctcaaacctggcccaccaccaccaaagcccgcagagcggcataaggacgacagcaggggtcttgtgcttcctgggtacaagtacctcggacccttcaacggactcgacaagggagagccggtcaacgaggcagacgccgcggccctcgagcacgacaaagcctacgaccggcagctcgacagcggagacaacccgtacctcaagtacaaccacgccgacgcggagtttcaggagcgccttaaagaagatacgtcttttgggggcaacctcggacgagcagtcttccaggcgaaaaagagggttcttgaacctctgggcctggttggggaacctgtcaagacggctccaggaaaaaagaggccggtagagcactctcctgtggagccagactcctcctcgggaaccggaaaggcgggccagcagcctgcaagaaaaagattgaattttggtcagactggagacgcagactcagtacctgacccccagcctctcggacagccaccagcagccccctctggtctgggaactaatacgatggctacaggcagtggcgcaccaatggcagacaataacgagggcgccgacggagtgggtaattcctcgggaaattggcattgcgattccacatggatgggcgacagagtcatcaccaccagcacccgaacctgggccctgcccacctacaacaaccacctctacaaacaaatttccagccaatcaggagcctcgaacgacaatcactactttggctacagcaccccttgggggtattttgacttcaacagattccactgccacttttcaccacgtgactggcaaagactcatcaacaacaactggggattccgacccaagagactcaacttcaagctctttaacattcaagtcaaagaggtcacgcagaatgacggtacgacgacgattgccaataaccttaccagcacggttcaggtgtttactgactcggagtaccagctcccgtacgtcctcggctcggcgcatcaaggatgcctcccgccgttcccagcagacgtcttcatggtgccacagtatggatacctcaccctgaacaacgggagtcaggcagtaggacgctcttcattttactgcctggagtactttccttctcagatgctgcgtaccggaaacaactttaccttcagctacacttttgaggacgttcctttccacagcggctacgctcacagccagagtctggaccgtctcatgaatcctctcatcgaccagtacctgtattacttgagcacaacaaacactccaagtggaaccaccacgcagtcaaggcttcagttttctcaggccggagcgagtgacattcgggaccagtctaggaactggcttcctggaccctgttaccgccagcagcgagtatcaaagacatctgcggataacaacaacagtgaatactcgtggactggagctaccaagtaccacctcaatggcagagactctctggtgaatccgggcccggccatggcaagccacaaggacaatgaagaaaagttttttcctcagagcggggttctcatctttgggaagcaaggctcagagaaaacaaatgtggacattgaaaaggtcatgattacagacgaagaggaaatcaggacaaccaatcccgtggctacggagcagtacggttctgtatctaccaacctccagagaggcaacagacaagcagctaccgcagatgtcaacacacaaggcgttcttccaggcatggtctggcaggacagagatgtgtaccttcaggggcccatctgggcaaagattccacacacggacggacattttcacccctctcccctcatgggtggattcggacttaaacaccctcctccacagattctcatcaagaacaccccggtacctgcgaatccttcgaccaccttcagtgcggcaaagtttgcttccttcatcacacagtactccacgggacaggtcagcgtggagatcgagtgggagctgcagaaggaaaacagcaaacgctggaatcccgaaattcagtacacttccaactacaacaagtctgttaatgtggactttactgtggacactaatggcgtgtattcagagcctcgccccattggcaccagatacctgactcgtaatctgtaa

SEQ ID NO: 296 - protein, 735 aa, Artificial Sequence
  Description of Artificial Sequence: Synthetic polypeptide
MAADGYLPDWLEDTLSEGIRQWWKLKPGPPPPKPAERHKDDSRGLVLPGYKYLGPFNGLDKGEPVNEADAAALEHDKAYDRQLDSGDNPYLKYNHADAEFQERLKEDTSFGGNLGRAVFQAKKRVLEPLGLVGEPVKTAPGKKRPVEHSPVEPDSSSGTGKAGQQPARKRLNFGQTGDADSVPDPQPLGQPPAAPSGLGTNTMATGSGAPMADNNEGADGVGNSSGNWHCDSTWMGDRVITTSTRTWALPTYNNHLYKQISSQSGASNDNHYFGYSTPWGYFDFNRFHCHFSPRDWQRLINNNWGFRPKRLNFKLFNIQVKEVTQNDGTTTIANNLTSTVQVFTDSEYQLPYVLGSAHQGCLPPFPADVFMVPQYGYLTLNNGSQAVGRSSFYCLEYFPSQMLRTGNNFTFSYTFEDVPFHSGYAHSQSLDRLMNPLIDQYLYYLSTTNTPSGTTTQSRLQFSQAGASDIRDQSRNWLPGPCYRQQRVSKTSADNNNSEYSWTGATKYHLNGRDSLVNPGPAMASHKDNEEKFFPQSGVLIFGKQGSEKTNVDIEKVMITDEEEIRTTNPVATEQYGSVSTNLQRGNRQAATADVNTQGVLPGMVWQDRDVYLQGPIWAKIPHTDGHFHPSPLMGGFGLKHPPPQILIKNTPVPANPSTTFSAAKFASFITQYSTGQVSVEIEWELQKENSKRWNPEIQYTSNYNKSVNVDFTVDTNGVYSEPRPIGTRYLTRNL

SEQ ID NO: 297 - DNA, 2208 bp, Artificial Sequence
  Description of Artificial Sequence: Synthetic polynucleotide
atggctgccgatggttatcttccagattggctcgaggacactctctctgaaggaataagacagtggtggaagctcaaacctggcccaccaccaccaaagcccgcagagcggcataaggacgacagcaggggtcttgtgcttcctgggtacaagtacctcggacccttcaacggactcgacaagggagagccggtcaacgaggcagacgccgcggccctcgagcacgacaaagcctacgaccggcagctcgacagcggagacaacccgtacctcaagtacaaccacgccgacgcggagtttcaggagcgccttaaagaagatacgtcttttgggggcaacctcggacgagcagtcttccaggcgaaaaagagggttcttgaacctctgggcctggttggggaacctgttaagacggctccgggaaaaaagaggccggtagagcactctcctgtggagccagactcctcctcgggaaccggaaaggcgggccagcagcctgcaagaaaaagattgaattttggtcagactggagacgcagactcagtacctgacccccagcctctcggacagccaccagcagccccctctggtctgggaactaatacgatggctacaggcagtggcgcaccaatggcagacaataacgagggcgccgacggagtgggtaattcctcgggaaatcggcattgcgattccacatggatgggcgacagagtcatcaccaccagcacccgaacctgggccctgcccacctacaacaaccacctctacagacaaatttccagccaatcaggagcctcgaacgacaatcactactttggctacagcaccccttgggggtattttgacttcaacagattccactgccacttttcaccacgtgactggcaaagactcatcaacaacaactggggattccgacccaagagactcaacttcaagctctttaacattcaagtcaaagaggtcacgcagaatgacggtacgacgacgattgccaataaccttaccagcacggttcaggtgtttactgactcggagtaccagctcccgtacgtcctcggctcggcgcatcaaggatgcctcccgccgttcccagcagacgtcttcatggtgccacagtatggatacctcaccctgagcaacgggagtcaggcagtaggacgctcttcattttactgcccggagtactttccttctcagatgctgcgtaccggaaacaactttaccttcagctacacttttgaggacgttcctttccacagcagctacgctcacagccagagtctggaccgtctcatgaatcctctcatcgaccagtacctgtattacttgagcacaacaaacactccaagtggaaccaccacgcagtcaaggcttcagttttctcaggccggagcgagtgacattcgggaccagtctaggaactggcttcctggaccctgttaccgccagcagcgagtatcaaagacatctgcggataacaacaacagtgaatactcgtggactggagctaccaagtaccacctcaatggcagagactctctggtgaatccgggcccggccatggcaagccacaaggacaatgaagaaaagttttttcctcagagcggggttctcatctttgggaagcaaggctcagagaaaacaaatgtggacattgaaaaggtcatgattacagacgaagaggaaatcaggacaaccaatcccgtggctacggagcagtatggttctgtatctaccaacctccagagaggcaacagacaagcagctaccgcagatgtcaacacacaaggcgttcttccaggcatggtctggcaggacagagatgtgtaccttcaggggcccatctgggcaaagattccacacacggacggacattttcacccctctcccctcatgggtggattcggacctaaacaccctcctccacagattctcatcaagaacaccccggtacctgcgaatccttcgaccaccttcagtgcggcaaagtttgcttccttcatcacacagtactccacgggacaggtcagcgtggagatcgagtgggagctgcagaaggaaaacagcaaacgctggaatcccgaaattcagtacacttccaactacaacaagtctgttaatgtggactttactgtggacactaatggcgtgtattcagagcctcgccccattggcaccagatacctgactcgtaatttgtaa

SEQ ID NO: 298 - protein, 735 aa, Artificial Sequence
  Description of Artificial Sequence: Synthetic polypeptide
MAADGYLPDWLEDTLSEGIRQWWKLKPGPPPPKPAERHKDDSRGLVLPGYKYLGPFNGLDKGEPVNEADAAALEHDKAYDRQLDSGDNPYLKYNHADAEFQERLKEDTSFGGNLGRAVFQAKKRVLEPLGLVGEPVKTAPGKKRPVEHSPVEPDSSSGTGKAGQQPARKRLNFGQTGDADSVPDPQPLGQPPAAPSGLGTNTMATGSGAPMADNNEGADGVGNSSGNRHCDSTWMGDRVITTSTRTWALPTYNNHLYRQISSQSGASNDNHYFGYSTPWGYFDFNRFHCHFSPRDWQRLINNNWGFRPKRLNFKLFNIQVKEVTQNDGTTTIANNLTSTVQVFTDSEYQLPYVLGSAHQGCLPPFPADVFMVPQYGYLTLSNGSQAVGRSSFYCPEYFPSQMLRTGNNFTFSYTFEDVPFHSSYAHSQSLDRLMNPLIDQYLYYLSTTNTPSGTTTQSRLQFSQAGASDIRDQSRNWLPGPCYRQQRVSKTSADNNNSEYSWTGATKYHLNGRDSLVNPGPAMASHKDNEEKFFPQSGVLIFGKQGSEKTNVDIEKVMITDEEEIRTTNPVATEQYGSVSTNLQRGNRQAATADVNTQGVLPGMVWQDRDVYLQGPIWAKIPHTDGHFHPSPLMGGFGPKHPPPQILIKNTPVPANPSTTFSAAKFASFITQYSTGQVSVEIEWELQKENSKRWNPEIQYTSNYNKSVNVDFTVDTNGVYSEPRPIGTRYLTRNL

SEQ ID NO: 299 - DNA, 2205 bp, Artificial Sequence
  Description of Artificial Sequence: Synthetic polynucleotide
atggctgccgatggttatcttccagattggctcgaggacactctctctgaaggaataagacagtggtggaagctcaaacctggcccaccaccaccaaagcccgcagagcggcataaggacgacagcaggggtcttgtgcttcctgggtacaagtacctcggacccttcaacggactcgacaagggagagccggtcaacgaggcagacgccgcggccctcgagcacgacaaggcctacgaccggcagctcgacagcggagacaacccgtacctcaagtacaaccacgccgacgcggagtttcaggagcgtcttaaagaagatacgtcttttgggggcaacctcggacgagcagtcttccaggcgaaaaagagggttcttgaacctctgggcctggttgaggaacctgttaagacggctccgggaaaaaagaggccggtagagcactctcctgcggagccagactcctcctcgggaaccggaaaagcgggccagcagcctgcaagaaaaagactgaatttcggtcagactggagacgcagactccgtacctgacccccagcctctcagacagccaccagcagcccccacaagtttgggatctactacaatggctacaggcagtggcgcaccaatggcagacaataacgagggtgccgatggagtgggtaattcctcaggaaattggcattgcgattcccaatggctgggcgacagagtcatcaccaccagcacccgaacctgggccctgcccacctacaacaaccacctttacaagcaaatctccagccaatcaggagcctcaaacgacaaccactactttggctacagcaccccctgggggtattttgacttcaacagattccactgccacttttcaccacgtgactggcaaagactcatcaacaacaactggggattccgacccaagagactcaacttcaagctctttaacattcaagtcaaagaggtcacgcagaatgacggtacgacgacgattgccaataaccttaccagcacggttcaggtgtttactgactcggagtaccagctcccgtacgtcctcggctcggcgcatcaaggatgcctcccgccgtttccagcggacgtcttcatggtcccacagtatggatacctcaccctgaacaacgggagtcaggcggtaggacgctcttccttttactgcctggagtactttccttctcagatgctgcgtactggaaacaactttcagttcagctacacttttgaagacgtgcctttccacagcagctacgctcacagccagagtttggatcggctgatgaatcctctgatcgaccagtacctgtattatctaaacagaacacaaacagctagtggaactcagcagtctcggctactgtttagccaagctggacccacaagcatgtctcttcaagctaaaaactggctgcctggaccgtgttatcgccagcagcgtttgtcaaagcaggcaaacgacaacaacaacagcaactttccctggactggagctaccaagtactacctcaatggcagagactctttggtgaacccgggcccggccatggccagccacaaggacgatgaagaaaagtttttccccatgcatggaaccctaatatttggtaaagaaggaacaaatgctaccaacgcggaattggaaaatgtcatgattacagatgaagaggaaatcaggaccaccaatcccgtggctacagagcagtacggatatgtgtcaaataatttgcaaaactcaaatactgctgcaagtactgaaactgtgaatcaccaaggagcattacctggtatggtgtggcaggatcgagacgtgtacctgcagggacccatttgggccaagattcctcacaccgatggacactttcatccttctccactgatgggaggttttggactcaaacacccgcctcctcagattatgatcaaaaacactcccgttccagccaatcctcccacaaacttcagttctgccaagtttgcttccttcatcacacagtattccacgggacaggtcagcgtggagatcgagtgggagctgcagaaggagaacagcaaacgctggaatcccgaaattcagtacacttccaactacaacaaatctgttaatgtggactttactgtggacactaatggtgtgtattcagagcctcgccccattggcaccagatacctgactcgtaatctgtaa

SEQ ID NO: 300 - protein, 734 aa, Artificial Sequence
  Description of Artificial Sequence: Synthetic polypeptide
MAADGYLPDWLEDTLSEGIRQWWKLKPGPPPPKPAERHKDDSRGLVLPGYKYLGPFNGLDKGEPVNEADAAALEHDKAYDRQLDSGDNPYLKYNHADAEFQERLKEDTSFGGNLGRAVFQAKKRVLEPLGLVEEPVKTAPGKKRPVEHSPAEPDSSSGTGKAGQQPARKRLNFGQTGDADSVPDPQPLRQPPAAPTSLGSTTMATGSGAPMADNNEGADGVGNSSGNWHCDSQWLGDRVITTSTRTWALPTYNNHLYKQISSQSGASNDNHYFGYSTPWGYFDFNRFHCHFSPRDWQRLINNNWGFRPKRLNFKLFNIQVKEVTQNDGTTTIANNLTSTVQVFTDSEYQLPYVLGSAHQGCLPPFPADVFMVPQYGYLTLNNGSQAVGRSSFYCLEYFPSQMLRTGNNFQFSYTFEDVPFHSSYAHSQSLDRLMNPLIDQYLYYLNRTQTASGTQQSRLLFSQAGPTSMSLQAKNWLPGPCYRQQRLSKQANDNNNSNFPWTGATKYYLNGRDSLVNPGPAMASHKDDEEKFFPMHGTLIFGKEGTNATNAELENVMITDEEEIRTTNPVATEQYGYVSNNLQNSNTAASTETVNHQGALPGMVWQDRDVYLQGPIWAKIPHTDGHFHPSPLMGGFGLKHPPPQIMIKNTPVPANPPTNFSSAKFASFITQYSTGQVSVEIEWELQKENSKRWNPEIQYTSNYNKSVNVDFTVDTNGVYSEPRPIGTRYLTRNL

SEQ ID NO: 301 - DNA, 3160 bp, Artificial Sequence
  Description of Artificial Sequence: Synthetic polynucleotide
acccttcactaaagggactagtcctgcaggtttaaacgaattcgcccttgctgcgtcaactggaccaatgagaactttcccttcaacgactgtgtcgacaagatggtgatttggtgggaggaggggaagatgaccgccaaggtcgtggagtcggccaaagccattctcggaggaagcaaggtgcgcgtggaccagaaatgcaagtcctcggcccagatagatccgactcccgtgatcgtcacctccaacaccaacatgtgcgccgtgattgacgggaactcaacgaccttcgaacaccagcagccgttgcaagaccggatgttcaaatttgaactcacccgccgtctggatcatgactttgggaaggtcaccaagcgggaagtcaaagactttttccggtgggcaaaggatcacgtggttgaggtggagcatgaattctacgtcaaaaagggtggagccaagaaaagacccgcccctagtgacgcagatataagtgagcccaaacgggtgcgcgagtcagttgcgcagccatcgacgtcagacgcggaagcttcgatcaactacgcggacaggtaccaaaacaaatgttctcgtcacgtgggcatgaatctgatgctgtttccctgcagacaatgcgagagaatgaatcaaaattcaaatatctgcttcactcacggacagaaagactgtttagagtgctttcccgtgtcagaatctcaacctgtttctgtcgtcaaaaaggcgtatcagaaactgtgctacattcatcatatcatgggaaaggtgccagacgcttgcactgcctgcgatctggtcaatgtggatttggatgactgcatctctgaacaataaatgatttaaatcaggtatggctgccgatggttatcttccagattggctcgaggacactctctctgaaggaataagacagtggtggaagctcaaacctggcccaccaccaccaaagcccgcagagcggcataaggacgacagcaggggtcttgtgcttcctgggtacaagtacctcggacccttcaacggactcgacaagggagagccggtcaacgaggcagacgccgcggccctcgagcacgacaaggcctacgaccggcagctcgacagcggagacaacccgtacctcaagtacaaccacgccgacgcggagtttcaggagcgtcttaaagaagatacgtcttttgggggcaacctcggacgagcagtcttccaggcgaaaaagagggttcttgaacctctgggcctggttgaggaacctgttaagacggctccgggaaaaaagaggccggtagagcactctcctgcggagccagactcctcctcgggaaccggaaaagcgggccagcagcctgcaagaaaaagactgaatttcggtcagactggagacgcagactccgtacctgacccccagcctctcagacagccaccagcagcccccacaagtttgggatctactacaatggctacaggcagtggcgcaccaatggcagacaataacgagggtgccgatggagtgggtaattcctcaggaaattggcattgcgattcccaatggctgggcgacagagtcatcaccaccagcacccgaacctgggccctgcccacctacaacaaccacctttacaagcaaatctccagccaatcaggagcctcaaacgacaaccactactttggctacagcaccccctgggggtattttgacttcaacagattccactgccacttttcaccacgtgactggcaaagactcatcaacaacaactggggattccgacccaagagactcaacttcaagctctttaacattcaagtcaaagaggtcacgcagaatgacggtacgacgacgattgccaataaccttaccagcacggttcaggtgtttactgactcggagtaccagctcccgtacgtcctcggctcggcgcatcaaggatgcctcccgccgtttccagcggacgtcttcatggtcccacagtatggatacctcaccctgaacaacgggagtcaggcggtaggacgctcttccttttactgcctggagtactttccttctcagatgctgcgtactggaaacaactttcagttcagctacacttttgaagacgtgcctttccacagcagctacgctcacagccagagtttggatcggctgatgaatcctctgatcgaccagtacctgtattatctaaacagaacacaaacagctagtggaactcagcagtctcggctactgtttagccaagctggacccacaagcatgtctcttcaagctaaaaactggctgcctggaccgtgttatcgccagcagcgtttgtcaaagcaggcaaacgacaacaacaacagcaactttccctggactggagctaccaagtactacctcaatggcagagactctttggtgaacccgggcccggccatggccagccacaaggacgatgaagaaaagtttttccccatgcatggaaccctaatatttggtaaagaaggaacaaatgctaccaacgcggaattggaaaatgtcatgattacagatgaagaggaaatcaggaccaccaatcccgtggctacagagcagtacggatatgtgtcaaataatttgcaaaactcaaatactgctgcaagtactgaaactgtgaatcaccaaggagcattacctggtatggtgtggcaggatcgagacgtgtacctgcagggacccatttgggccaagattcctcacaccgatggacactttcatccttctccactgatgggaggttttggactcaaacacccgcctcctcagattatgatcaaaaacactcccgttccagccaatcctcccacaaacttcagttctgccaagtttgcttccttcatcacacagtattccacgggacaggtcagcgtggagatcgagtgggagctgcagaaggagaacagcaaacgctggaatcccgaaattcagtacacttccaactacaacaaatctgttaatgtggactttactgtggacactaatggtgtgtattcagagcctcgccccattggcaccagatacctgactcgtaatctgtaattgcttgttaatcaataaaccgtttaattcgtttcagttgaactttggtctctgcgaagggcgaattcgcggccgctaaatcaatcg

SEQ ID NO: 302 - protein, 734 aa, Artificial Sequence
  Description of Artificial Sequence: Synthetic polypeptide
MAADGYLPDWLEDTLSEGIRQWWKLKPGPPPPKPAERHKDDSRGLVLPGYKYLGPFNGLDKGEPVNEADAAALEHDKAYDRQLDSGDNPYLKYNHADAEFQERLKEDTSFGGNLGRAVFQAKKRVLEPLGLVEEPVKTAPGKKRPVEHSPAEPDSSSGTGKAGQQPARKRLNFGQTGDADSVPDPQPLGQPPAAPTSLGSTTMATGSGAPMADNNEGADGVGNSSGNWHCDSQWLGDRVITTSTRTWALPTYNNHLYKQISSQSGASNDNHYFGYSTPWGYFDFNRFHCRFSPRDWQRLINNNWGFRPKRLNFKLFNIQVKEVTQNDGTTTIANNLTSTVQVFTDSEYQLPYVLGSAHQGCLPPFPADVFMVPQYGYLTLNNGSQAVGRSSFYCLEYFPSQMLRTGNNFQFSYTFEDVPFHSSYAHSQGLDRLMNPLIDQYLYYLNRTQTASGTQQSRLLFSQAGPTSMSLQAKNWLPGPCYRQQRLSKQANDNNNSNFPWTGATKYHLNGGDSLVNPGPAMASHKDDEEKFFPMHGTLIFGKEGTNATNAELENVMITDEEEIRTTNPVATEQYGYVSNNLQNSNTAASTETVNHQGALPGMVWQDRDVYLRGPIWAKIPHADGHFHPSPLMGGFGLKHPPPQIMIKNTPVPANPPTNFSSAKFASFITQYSTGQVSVEIEWELQKENSKRWNPEIQYTSNYNKSVNVDFTVDTNGVYSEPRPIGTRYLTRNL

SEQ ID NO: 303 - DNA, 3157 bp, Artificial Sequence
  Description of Artificial Sequence: Synthetic polynucleotide
ctcactaagggactagtcctgcaggtttaaacgaattcgcccttgctgcgtcaactggaccaatgagaactttcccttcaacgactgtgtcgacaagatggtgatttggtgggaggaggggaagatgaccgccaaggtcgtggagtcggccaaagccactctcggaggaagcaaggtgcgcgtggaccagaaacgcaagtcctcggcccagatagatccgactcccgtgatcgtcacctccaacaccaacatgtgcgccgtgattgacgggaactcaacgaccttcgaacaccagcagccgttgcaagaccgaatgttcaaatttgaactcacccgccgtctggatcatgacttcgggaaggtcaccaagcaggaagtcaaagactttttccggtgggcaaaggatcacgtggttgaggtggagcatgaattctacgtcaaaaagggtggagccaagaaaagacccgcccctagtgacgcagatataagtgagcccaaacgggtgcgcgagtcagttgcgcagccatcgacgtcagacgcggaagcttcgatcaactacgcggacaggtaccaaaacaaatgttctcgtcacgtgggcatgaatctgatgctgtttccctgcagacaatgcgagagaatgaatcaaaattcaaatatctgcttcactcacggacagaaagactgtttagagtgctttcccgtgtcagaatctcaacctgtttctgtcgtcaaaaaggcgtatcagaaactgtgctacattcatcatatcatgggaaaggtgccagacgcttgcactgcctgcgatctggtcaatgtggatttggatgactgcatctctgaacaataaatgatttaaatcaggtatggctgccgatggttatcttccagattggctcgaggacactctctctgaaggaataagacagtggtggaagctcaaacctggcccaccaccaccaaagcccgcagagcggcataaggacgacagcaggggtcttgtgcttcctgggtacaagtacctcggacccttcaacggactcgacaagggagagccggtcaacgaggcagacgccgcggctctcgagcacgacaaggcctacgaccggcagctcgacagcggagacaacccgtacctcaagtacaaccacgccgacgcggagtttcaggagcgtcttaaagaagatacgtcttttgggggcaacctcggacgagcagtcttccaggcgaaaaagagggttcttgaacctctgggcctggttgaggaacctgttaagacggctccgggaaaaaagaggccggtagagcactctcctgcggagccagactcctcctcgggaaccggaaaagcgggccagcagcctgcaagaaaaagactgaatttcggtcagactggagacgcagactccgtacctgacccccagcctctcggacagccaccagcagcccccacaagtttgggatctactacaatggctacaggcagtggcgcaccaatggcagacaataacgagggtgccgatggagtgggtaattcctcaggaaattggcattgcgattcccaatggctgggcgacagagtcatcaccaccagcacccgaacctgggccctgcccacctacaacaaccacctttacaagcaaatctccagccaatcaggagcctcaaacgacaaccactactttggctacagcaccccctgggggtattttgacttcaacagattccactgccgcttttcaccacgtgactggcaaagactcatcaacaacaactggggattccgacccaagagactcaacttcaagctctttaacattcaagtcaaagaggtcacgcagaatgacggtacgacgacgattgccaataaccttaccagcacggttcaggtgtttactgactcggagtaccagctcccgtacgtcctcggctcggcgcatcaaggatgcctcccgccgtttccagcggacgtcttcatggtcccacagtatggatacctcaccctgaacaacgggagtcaggcggtaggacgctcttccttttactgcctggagtactttccttctcagatgctgcgtactggaaacaactttcagttcagctacacttttgaagacgtgcctttccacagcagctacgctcacagccagggtttggatcggctgatgaatcctctgatcgaccagtacctgtattatctaaacagaacacaaacagctagtggaactcagcagtctcggctactgtttagccaagctggacccacaagcatgtctcttcaagctaaaaactggctgcctggaccgtgttatcgccagcagcgtttgtcaaagcaggcaaacgacaacaacaacagcaactttccctggactggagctaccaagtaccacctcaatggcggagactctttggtgaacccgggcccggccatggccagccacaaggacgatgaagaaaagtttttccccatgcatggaaccctaatatttggtaaagaaggaacaaatgctaccaacgcggaattggaaaatgtcatgattacagatgaagaggaaatcaggaccaccaatcccgtggctacagagcagtacggatatgtgtcaaataatttgcaaaactcaaatactgctgcaagtactgaaactgtgaatcaccaaggagcattacctggtatggtgtggcaggatcgagacgtgtacctgcggggacccatttgggccaagattcctcacgccgatggacactttcatccttctccactgatgggaggttttggactcaaacacccgcctcctcagattatgatcaaaaacactcccgttccagccaatcctcccacaaacttcagttctgccaagtttgcttccttcatcacacagtattccacgggacaggtcagcgtggagatcgagtgggagctgcagaaggagaacagcaaacgctggaatcccgaaattcagtacacttccaactacaacaaatctgttaatgtggactttactgtggacactaatggtgtgtattcagagcctcgccccattggcaccagatacctgactcgtaatctgtaattgcttgttaatcaataaaccgtttaattcgtttcagttgaactttggtctctgcgaagggcgaattcgcggccgctaaattcaattcg

SEQ ID NO: 304 - protein, 734 aa, Artificial Sequence
  Description of Artificial Sequence: Synthetic polypeptide
MAADGYLPDWLEDTLSEGIRQWWKLKPGPPPPKPAERHKDDSRGLVLPGYKYLGPFNGLDKGEPVNEADAAALEHDKAYDRQLDSGDNPYLKYNHADAEFQERLKEDTSFGGNLGRAVFQAKKRVLEPLGLVEEPVKTAPGKKRPVEHSPAEPDSSSGTGKAGQQPARKRLNFGQTGDADSVPDPQPLGQPPAAPTSLGSTTMATGSGAPMADNNEGADGVGNSSGNWHCDSQWLGDRVITTSTRTWALPTYNNHLYKQISSQSGASNDNHYFGYSTPWGYFDFNRFHCHFSPRDWQRLINNNWGFRPKRLNFKLFNIQVKEVTQNDGTTTIANNLTSTVQVFTDSEYQLPYVLGSAHQGCLPPFPADVFMVPQYGYLTLNNGSQAVGRSSFYCLECFPSQMLRTGNNFQFSYTFEDVPFHSSYAHSQSLDRLMNPLIDQYLYYLNRTQTASGTQQSRLLFSQAGPTSMSLQAKNWLPGPCYRQQRLSKQANDNNNSNFPWTGATKYHLNGRDSLVNPGPAMASHKDDEEKFFPMHGTLIFGKEGTNATNAELENVMITDEEEIRTTNPVATEQYGYVSNNLQNSNTAASTETVNHQGALPGMVWQDRDVYLQGPIWAKIPHTDGHFHPSPLMGGFGLKHPPPQIMIKNTPVPANPPTNFSSAKFASFITQYSTGQVSVEIEWELQKENSKRWNPEIQYTSNYNKSVNVDFTVDTNGVYSEPRPIGTRYLTRNL

SEQ ID NO: 305 - DNA, 2208 bp, Artificial Sequence
  Description of Artificial Sequence: Synthetic polynucleotide
atggctgccgatggttatcttccagattggctcgaggacactctctctgaaggaataagacagtggtggaagctcaaacctggcccaccaccaccaaagcccgcagagcggcataaggacgacagcaggggtcttgtgcttcctggatacaagtacctcggacccttcaacggactcgacaagggagagccggtcaacgaggcagacgccgcggccctcgagcacgacaaggcctacgaccggcagctcgacagcggagacaacccgtacctcaagtacaaccacgccgacgcggagtttcaggagcgccttaaagaagatacgtcttttgggggcaacctcggacgagcagtcttccaggcgaaaaagagggttcttgaacctctgggcctggttgaggaacctgttaagacggctccgggaaaaaagaggccggtagagcactctcctgtggagccagactcctcctcgggaaccggaaaagcgggcaaccagcctgcaagaaaaagattgaatttcggtcagactggagacgcagactccgtacctgacccccagcctctcggacagccaccagcatccccctctggtctgggaactaatacgatggctacaggcagtggcgcaccaatggcagacaataacgagggcgccgacggagtgggtaattcctcgggaaattggcattgcgattccacatggatgggcgacagagtcgtcaccaccagcacccgcacctgggccctgcccacctacaacaaccacctctacaagcagatttccagccaatcaggagccagcaacgacaaccactactttggctacagcaccccttgggggtattttgacttcaacagattccactgccacttttcgccacgcgactggcagagactcatcaacaacaactggggattccggcccaaaagactcaacttcaagctgtttaacattcaagtcaaggaggtcacgcagaatgacggtacgacgacgattgccaataaccttaccagcacggttcaggtgtttactgacttggagtaccagctcccgtacgtcctcggctcggcgcatcaaggatgcctcccgccgttcccagcagacgtcttcatggtgccacagtatggatacctcaccctgaacaacgggagtcaggcggtaggacgctcttccttttactgcctggagtactttccttctcagatgcttcgcaccggaaacaactttaccttcagctacacttttgaagacgttcctttccacagcagctacgctcacagtcaaagtctggaccgtctcatgaatcctctcatcgaccagtacctgtattacttgagcagaacaaacactccaagcggaaccactacgcagtccaggcttcagttttctcaggccggagcgagtgacattcgggaccagtctaggaactggcttcctggaccctgttaccgccagcagcgagtatcaaagacagctgcggataacaacaacagtgaatactcgtggactggagctaccaagtaccacctcaatggcagagactctctggtgaatccgggcccggccatggccagccacaaggacgatgaagaaaagttttttcctcaaagcggggttctcatctttgggaagcaaggctcagagaaaacaaatgtggacattgaaaaggtcatgattacagacgaagaggaaatcaggaccaccaatcccgtggctacggagcagtatggttctgtatctaccaacctccagagcggcaacacacaagcagctacctcagatgtcaacacacaaggcgttcttccaggcatggtctggcaggacagagacgtgtacctgcaggggcccatctgggcaaaaattccacacacggacggacattttcacccctctcccctcatgggcggatttggacttaaacaccctcctccacagattctcattaagaataccccggtacctgcgaatccttcgaccaccttcagcgcggcaaagtttgcttccttcatcacacagtattccacggggcaggtcagcgtggagatcgagtgggagctgcagaaggagaacagcaaacgctggaatcccgaaattcagtacacttccaactacaacaaatctgttaatgtggactttactgtggacactaatggggtgtattcagagcctcgccctattggcaccagatacctgactcgtaatctgtaa

SEQ ID NO: 306 - DNA, 3159 bp, Artificial Sequence
  Description of Artificial Sequence: Synthetic polynucleotide
gattgatttagcggccgcgaattcgcccttgctgcgtcaactggaccaatgagaactttcccttcaacgattgcgtcgacaagatggtgatctggtgggaggagggaaagatgaccgccaaggtcgtggagtcggccaaagccattctcggaggaagcaaggtgcgtgtggaccaaaagtgcaagtcttcggcccagatcgacccgactcccgtgatcgtcacctccaacaccaacatgtgcgccgtgattgatggaaactcaacgaccttcgagcaccagcagccgttgcaagaccggatgttcaaatttgaacttacccgccgtctggatcatgactttggaaaggtcaccaagcaggaagtgaaagactttttccggtgggcaaaggatcacgtggttgaggtggagcatgagttctacgtcaaaaagggtggagccaaaaaaagacccgcccccagtgacgcagatataagtgagcccaaacgggcgcgcgagtcagttgcgcagccatcgacgtcagacgcggaagcttcgatcaactacgcggacaggtaccaaaacaaatgttctcgtcacgtgggcatgaatctgatgctgtttccctgcagacaatgcgagagaatgaatcagaattcaaatatctgcttcactcacggacagaaagactgtccatagtgctttcccgtgtcagaatctcaacccgtttctgtcgtcaaaaaggcgtatcagaaactgtgctacattcatcacatcatgggaaaggtgccagacgcttgcactgcttgcgacctggtcaatgtggatttggatgactgcatctctgaacaataaatgatttaaatcaggtatggctgccgatggttatcttccagattggctcgaggacactctctctgaaggaataagacagtggtggaagctcaaacctggcccaccaccaccaaagcccgcagagcggcataaggacgacagcaggggtcttgtgcttcctggatacaagtacctcggacccttcaacggactcgacaagggagagccggtcaacgaggcagacgccgcggccctcgagcacgacaaggcctacgaccggcagctcgacagcggagacaacccgtacctcaagtacaaccacgccgacgcggagtttcaggagcgccttaaagaagatacgtcttttgggggcaacctcggacgagcagtcttccaggcgaaaaagagggttcttgaacctctgggcctggttgaggaacctgttaagacggctccgggaaaaaagaggccggtagagcactctcctgtggagccagactcctcctcgggaaccggaaaagcgggcaaccagcctgcaagaaaaagattgaatttcggtcagactggagacgcagactccgtacctgacccccagcctctcggacagccaccagcatccccctctggtctgggaactaatacgatggctacaggcagtggcgcaccaatggcagacaataacgagggcgccgacggagtgggtaattcctcgggaaattggcattgcgattccacatggatgggcgacagagtcgtcaccaccagcacccgcacctgggccctgcccacctacaacaaccacctctacaagcagatttccagccaatcaggagccagcaacgacaaccactactttggctacagcaccccttgggggtattttgacttcaacagattccactgccacttttcgccacgcgactggcagagactcatcaacaacaactggggattccggcccaaaagactcaacttcaagctgtttaacattcaagtcaaggaggtcacgcagaatgacggtacgacgacgattgccaataaccttaccagcacggttcaggtgtttactgacttggagtaccagctcccgtacgtcctcggctcggcgcatcaaggatgcctcccgccgttcccagcagacgtcttcatggtgccacagtatggatacctcaccctgaacaacgggagtcaggcggtaggacgctcttccttttactgcctggagtactttccttctcagatgcttcgcaccggaaacaactttaccttcagctacacttttgaagacgttcctttccacagcagctacgctcacagtcaaagtctggaccgtctcatgaatcctctcatcgaccagtacctgtattacttgagcagaacaaacactccaagcggaaccactacgcagtccaggcttcagttttctcaggccggagcgagtgacattcgggaccagtctaggaactggcttcctggaccctgttaccgccagcagcgagtatcaaagacagctgcggataacaacaacagtgaatactcgtggactggagctaccaagtaccacctcaatggcagagactctctggtgaatccgggcccggccatggccagccacaaggacgatgaagaaaagttttttcctcaaagcggggttctcatctttgggaagcaaggctcagagaaaacaaatgtggacattgaaaaggtcatgattacagacgaagaggaaatcaggaccaccaatcccgtggctacggagcagtatggttctgtatctaccaacctccagagcggcaacacacaagcagctacctcagatgtcaacacacaaggcgttcttccaggcatggtctggcaggacagagacgtgtacctgcaggggcccatctgggcaaaaattccacacacggacggacattttcacccctctcccctcatgggcggatttggacttaaacaccctcctccacagattctcattaagaataccccggtacctgcgaatccttcgaccaccttcagcgcggcaaagtttgcttccttcatcacacagtattccacggggcaggtcagcgtggagatcgagtgggagctgcagaaggagaacagcaaacgctggaatcccgaaattcagtacacttccaactacaacaaatctgttaatgtggactttactgtggacactaatggggtgtattcagagcctcgccctattggcaccagatacctgactcgtaatctgtaattgcttgttaatcaataaaccgtttaattcgtttcagttgaactttggtctctgcgaagggcgaattcgtttaaacctgcaggactagtccctttagtgagg

SEQ ID NO: 307 - protein, 735 aa, Artificial Sequence
  Description of Artificial Sequence: Synthetic polypeptide
MAADGYLPDWLEDTLSEGIRQWWKLKPGPPPPKPAERHKDDSRGLVLPGYKYLGPFNGLDKGEPVNEADAAALEHDKAYDRQLDSGDNPYLKYNHADAEFQERLKEDTSFGGNLGRAVFQAKKRVLEPLGLVEEPVKTAPGKKRPVEHSPVEPDSSSGTGKAGNQPARKRLNFGQTGDADSVPDPQPLGQPPASPSGLGTNTMATGSGAPMADNNEGADGVGNSSGNWHCDSTWMGDRVVTTSTRTWALPTYNNHLYKQISSQSGASNDNHYFGYSTPWGYFDFNRFHCHFSPRDWQRLINNNWGFRPKRLNFKLFNIQVKEVTQNDGTTTIANNLTSTVQVFTDLEYQLPYVLGSAHQGCLPPFPADVFMVPQYGYLTLNNGSQAVGRSSFYCLEYFPSQMLRTGNNFTFSYTFEDVPFHSSYAHSQSLDRLMNPLIDQYLYYLSRTNTPSGTTTQSRLQFSQAGASDIRDQSRNWLPGPCYRQQRVSKTAADNNNSEYSWTGATKYHLNGRDSLVNPGPAMASHKDDEEKFFPQSGVLIFGKQGSEKTNVDIEKVMITDEEEIRTTNPVATEQYGSVSTNLQSGNTQAATSDVNTQGVLPGMVWQDRDVYLQGPIWAKIPHTDGHFHPSPLMGGFGLKHPPPQILIKNTPVPANPSTTFSAAKFASFITQYSTGQVSVEIEWELQKENSKRWNPEIQYTSNYNKSVNVDFTVDTNGVYSEPRPIGTRYLTRNL

SEQ ID NO: 308 - DNA, 2205 bp, Artificial Sequence
  Description of Artificial Sequence: Synthetic polynucleotide
atggctgccgatggttatcttccagattggctcgaggacactctctctgaaggaataagacagtggtggaagctcaaacctggcccaccaccaaagcccgcagagcggcataaggacgacagcaggggtcttgtgcttcctggatacaagtacctcggacccttcaacggactcgacaagggagagccggtcaacgaggcagacgccgcggccctcgagcacgacaaggcctacgaccggcagctcgacagcggagacaacccgtacctcaagtacaaccacgccgacgcggagtttcaggagcgccttaaagaagatacgtcttttgggggcaacctcggacgagcagtcttccaggcgaaaaagagggttcttgaacctctgggcctggttgaggaacctgttaagacggctccgggaaaaaagaggcccgtagagcactctcctgtggagccagactcctcctcgggaaccggaaaagcgggcaaccagcctgcaagaaaaagattgaatttcggtcagactggagacgcagactccgtacctgacccccagcctctcggacagccaccagcagccccctctggtctgggaactaatacgatggctacaggcagtggcgcaccaatggcagacaataacgagggcgccgacggagtgggtaattcctcgggagattggcattgcgattccacatggatgggcgacagagtcatcaccaccagcacccgcacctgggccctgcccacctacaacaaccacctctacaagcagatttccagccaatcaggagccagcaatgacaaccactactttggctacagcaccccttgggggtattttgacttcaacagattccactgccacttttcgccacgcgactggcagagactcatcaacaacaactggggattccggcccaaaagactcaacctcaagctgtttaacattcaagtcaaggaggtcacgcagaatgacggtacgacgacgattgccaataaccttaccagcacggttcaggtgtttactgacttggagtaccagctcccgtacgtcctcggctcggcgcatcaaggatgcctcccgccgttcccagcagacgtcttcatggtgccacagtatggatacctcaccctgaacaacgggagtcaggcggtaggacgctcttccttttactgcctggagtactttccttctcagatgcttcgtaccggaaacaactttaccttcagctacacttttgaagacgttcctttccacagcagctacgctcacagtcaaagtctggaccgtctcatgaatcctctcatcgaccagtacctgtattacttgagcagaacaaacactccaagcggaaccactacgcagtccaggcttcagttttctcaggccggagcgagtgacattcgggaccagtctaggaactggcttcctggaccctgttaccgccagcagcgagtatcaaagacagctgcggataacaacaacggtgaatactcgtggactggagctaccaagtaccacctcaatggcagagactctctggtgaatccgggcccggccatggccagccacaaggacgatgaagaaaagttttttcctcaaagcggggttctcatctttgggaagcaaggctcagagaaaacaaatgtggacattgaaaaggtcatgattacagacgaagaggaaatcaggaccaccaatcccgtggctacggagcagtatggttctgtatctaccaacctccagagcggcaacacacgagcagctacctcagatgtcaacacacaaggcgttcttccaggcatggtctggcaggacagagacgtgtacctgcaggggcccatctgggcaaaaattccacacacggacggacattttcacccctctcccctcatgggcggatttggacttaaacaccctcctccacagattctcattaagaataccccggtacctgcgaatccttcgaccaccttcagcgcggcaaagtttgcttccttcatcacacagtattccacggggcaggtcagcgtggagatcgagtgggagctgcagaaggagaacagcaaacgctggaatcccgaaattcagtacacttccaactacaacaaatctgttaatgtggactttactgtggacactaatggggtgtattcagagcctcgccctattggcaccagatacctgactcgtaatctgtaa

SEQ ID NO: 309 - DNA, 3156 bp, Artificial Sequence
  Description of Artificial Sequence: Synthetic polynucleotide
cgattgaatttagcggccgcgaattcgcccttgctgcgtcaacggaccaatgagaactttcccttcaacgattgcgtcgacaagatggtgatctggtgggaggagggaaagatgaccgccaaggtcgtggagtcggccaaagccattctcggaggaagcaaggtgcgtgtggaccaaaagtgcaagtcttcggcccagatcgacccgactcccgtgatcgtcacctccaacaccaacatgtgcgccgtgattgatggaaactcaacgaccttcgagcaccagcagccgttgcaagaccggatgttcaaatttgaacttacccgccgtctggatcatgactttggaaaggtcaccaagcaggaagtgaaagactttttccggtgggcaaaggatcacgtggttgaggtggagcatgagttctacgtcaaaaagggtggagccaaaaaaagacccgcccccagtgacgcagatataagtgagcccaaacgggcgcgcgagtcagttgcgcagccatcgacgtcagacgcggaagcttcgatcaactacgcggacaggtaccaaaacaaatgttctcgtcacgtgggcatgaatctgatgctgtttccctgcagacaatgcgagcgaatgaatcagaattcaaatatctgcttcactcacggacagaaagactgtttagagtgctttcccgtgtcagaatctcaacccgtttctgtcgtcaaaaaggcgtatcagaaactgtgctacattcatcacatcatgggaaaggtgccagacgcttgcactgcttgcgacctggtcaatgtggatttggatgactgcatctctgaacaataaatgatttaaatcaggtatggctgccgatggttatcttccagattggctcgaggacactctctctgaaggaataagacagtggtggaagctcaaacctggcccaccaccaaagcccgcagagcggcataaggacgacagcaggggtcttgtgcttcctggatacaagtacctcggacccttcaacggactcgacaagggagagccggtcaacgaggcagacgccgcggccctcgagcacgacaaggcctacgaccggcagctcgacagcggagacaacccgtacctcaagtacaaccacgccgacgcggagtttcaggagcgccttaaagaagatacgtcttttgggggcaacctcggacgagcagtcttccaggcgaaaaagagggttcttgaacctctgggcctggttgaggaacctgttaagacggctccgggaaaaaagaggcccgtagagcactctcctgtggagccagactcctcctcgggaaccggaaaagcgggcaaccagcctgcaagaaaaagattgaatttcggtcagactggagacgcagactccgtacctgacccccagcctctcggacagccaccagcagccccctctggtctgggaactaatacgatggctacaggcagtggcgcaccaatggcagacaataacgagggcgccgacggagtgggtaattcctcgggagattggcattgcgattccacatggatgggcgacagagtcatcaccaccagcacccgcacctgggccctgcccacctacaacaaccacctctacaagcagatttccagccaatcaggagccagcaatgacaaccactactttggctacagcaccccttgggggtattttgacttcaacagattccactgccacttttcgccacgcgactggcagagactcatcaacaacaactggggattccggcccaaaagactcaacctcaagctgtttaacattcaagtcaaggaggtcacgcagaatgacggtacgacgacgattgccaataaccttaccagcacggttcaggtgtttactgacttggagtaccagctcccgtacgtcctcggctcggcgcatcaaggatgcctcccgccgttcccagcagacgtcttcatggtgccacagtatggatacctcaccctgaacaacgggagtcaggcggtaggacgctcttccttttactgcctggagtactttccttctcagatgcttcgtaccggaaacaactttaccttcagctacacttttgaagacgttcctttccacagcagctacgctcacagtcaaagtctggaccgtctcatgaatcctctcatcgaccagtacctgtattacttgagcagaacaaacactccaagcggaaccactacgcagtccaggcttcagttttctcaggccggagcgagtgacattcgggaccagtctaggaactggcttcctggaccctgttaccgccagcagcgagtatcaaagacagctgcggataacaacaacggtgaatactcgtggactggagctaccaagtaccacctcaatggcagagactctctggtgaatccgggcccggccatggccagccacaaggacgatgaagaaaagttttttcctcaaagcggggttctcatctttgggaagcaaggctcagagaaaacaaatgtggacattgaaaaggtcatgattacagacgaagaggaaatcaggaccaccaatcccgtggctacggagcagtatggttctgtatctaccaacctccagagcggcaacacacgagcagctacctcagatgtcaacacacaaggcgttcttccaggcatggtctggcaggacagagacgtgtacctgcaggggcccatctgggcaaaaattccacacacggacggacattttcacccctctcccctcatgggcggatttggacttaaacaccctcctccacagattctcattaagaataccccggtacctgcgaatccttcgaccaccttcagcgcggcaaagtttgcttccttcatcacacagtattccacggggcaggtcagcgtggagatcgagtgggagctgcagaaggagaacagcaaacgctggaatcccgaaattcagtacacttccaactacaacaaatctgttaatgtggactttactgtggacactaatggggtgtattcagagcctcgccctattggcaccagatacctgactcgtaatctgtaattgcttgttaatcaataaaccgtttaattcgtttcagttgaactttggtctctgcgaagggcgaattcgtttaaacctgcaggactagtccctttagtgag

SEQ ID NO: 310 - protein, 734 aa, Artificial Sequence
  Description of Artificial Sequence: Synthetic polypeptide
MAADGYLPDWLEDTLSEGIRQWWKLKPGPPPKPAERHKDDSRGLVLPGYKYLGPFNGLDKGEPVNEADAAALEHDKAYDRQLDSGDNPYLKYNHADAEFQERLKEDTSFGGNLGRAVFQAKKRVLEPLGLVEEPVKTAPGKKRPVEHSPVEPDSSSGTGKAGNQPARKRLNFGQTGDADSVPDPQPLGQPPAAPSGLGTNTMATGSGAPMADNNEGADGVGNSSGDWHCDSTWMGDRVITTSTRTWALPTYNNHLYKQISSQSGASNDNHYFGYSTPWGYFDFNRFHCHFSPRDWQRLINNNWGFRPKRLNLKLFNIQVKEVTQNDGTTTIANNLTSTVQVFTDLEYQLPYVLGSAHQGCLPPFPADVFMVPQYGYLTLNNGSQAVGRSSFYCLEYFPSQMLRTGNNFTFSYTFEDVPFHSSYAHSQSLDRLMNPLIDQYLYYLSRTNTPSGTTTQSRLQFSQAGASDIRDQSRNWLPGPCYRQQRVSKTAADNNNGEYSWTGATKYHLNGRDSLVNPGPAMASHKDDEEKFFPQSGVLIFGKQGSEKTNVDIEKVMITDEEEIRTTNPVATEQYGSVSTNLQSGNTRAATSDVNTQGVLPGMVWQDRDVYLQGPIWAKIPHTDGHFHPSPLMGGFGLKHPPPQILIKNTPVPANPSTTFSAAKFASFITQYSTGQVSVEIEWELQKENSKRWNPEIQYTSNYNKSVNVDFTVDTNGVYSEPRPIGTRYLTRNL

SEQ ID NO: 311 - DNA, 2208 bp, Artificial Sequence
  Description of Artificial Sequence: Synthetic polynucleotide
atggctgccgatggttatcttccagattggctcgaggacactctctctgaaggaataagacagtggtggaagctcaaacctggcccaccaccaccaaagcccgcagagcggcataaggacgacagcaggggtcttgtgcttcctgggtacaagtacctcggacccttcaacggactcgacaagggagagccggtcaacgaggcagacgccgcggccctcgagcacgacaaggcctacgaccggcagctcgacagcggagacaacccgtacctcaagtacgaccacgccgacgcggagtttcaggagcgccttaaagaagatacgtcttttgggggcaacctcggacgagcagtcttccaggcaaaaaagagggttcttgaacctctgggcctggttgaggagcctgttaagacggctccgggaaaaaagaggccggtagagcactctcctgtggagccagactcctcctcgggaaccggaaaagcgggcaaccagcctgcaagaaagagattgaatttcggtcagactggagacgcagactccgtacctgacccccagcctctcggacagccaccagcagccccctctggtctgggaactaatacgatggctacaggcagtggcgcaccaatggcagacaataacgatggcgccgacggagtgggtaattcctcgggaaattggcattgcgattccacatggatgggcgacagagtcatcaccaccagcacccgaacctgggctctgcccacctacaacaaccatctgtacaagcagatttccagccaatcaggagccagcaacgacaaccactactttggctacagcaccccttgggggtattttgacttcaacagattccactgccacttttcaccacgtgactggcaaagactcatcaacaacaactggggattccggcccaagagactcaacttcaagctctttaacattcaagtcagagaggtcacgcagaatgatggtacgacgacgattgccaataaccttaccagcacggttcaggtgtttactgactcggagtaccagctcccgtacgtcctcggctcggcgcatcaaggatgcctcccgccgttcccagcagacgtcttcatggtgccacagtatggatacctcaccctgaacaacgggagtcaggcagtaggacgctcttcattttactgcctggagtacttcccttctcagatgctgcgtaccggaaacaactttaccttcagctacacctttgaggatgttcctttccacagcagctacgctcacagccagagtttggaccgtctcatgaatcctctcatcgaccagtacctgtattacttgagcagaacaaacactccaagcggaaccaccacgcagtccaggcttcagttttctcaggccggagcgagtgacattcgggatcagtctaggaactggcttcctggaccctgttaccgccagcagcgagtatcaaagacatctgcggacaacaacaacagtgaatactcgtggattggagctaccaagtaccacctcaatggcagagactctctggtgaatccgggcccggcaatggccagccacaaggacgatgaagaaaagttttttcctcagagcggggttctcatctttggaaaacaaggatcagagaaaacaaatgtggacattgaaaaggtcatgattacagacgaagaggaaatcagaaccaccaatcccgtggccacggagcagtatggttctgtatctaccaacctccagagcggcaacacacaagcatctactgcagatgtcaacacacaaggcgttcttccaggcatggtctggcaggacagagacgtgtacctgcaggggcctatctgggcaaagattccgcacacggacggacattttcacccctctcccctcatgggcggattcggacttaaacaccctcctccacagattctcatcaaaaacaccccggtacctgcgaatccttcgaccaccttcagtgcggcaaagtttgcttccttcatcacacagtattccacggggcgggtcagcgtggagatcgagtgggagctacagaaggagaacagcaaacgctggaatcccgagatccagtacacttccaactacaacaaatctgttaatgtggactttactgtggacactaatggtgtgtattcagagcctcgccccattggcaccagatacctgactcgtaatctgtaa

SEQ ID NO: 312 - protein, 735 aa, Artificial Sequence
  Description of Artificial Sequence: Synthetic polypeptide
MAADGYLPDWLEDTLSEGIRQWWKLKPGPPPPKPAERHKDDSRGLVLPGYKYLGPFNGLDKGEPVNEADAAALEHDKAYDRQLDSGDNPYLKYDHADAEFQERLKEDTSFGGNLGRAVFQAKKRVLEPLGLVEEPVKTAPGKKRPVEHSPVEPDSSSGTGKAGNQPARKRLNFGQTGDADSVPDPQPLGQPPAAPSGLGTNTMATGSGAPMADNNDGADGVGNSSGNWHCDSTWMGDRVITTSTRTWALPTYNNHLYKQISSQSGASNDNHYFGYSTPWGYFDFNRFHCHFSPRDWQRLINNNWGFRPKRLNFKLFNIQVREVTQNDGTTTIANNLTSTVQVFTDSEYQLPYVLGSAHQGCLPPFPADVFMVPQYGYLTLNNGSQAVGRSSFYCLEYFPSQMLRTGNNFTFSYTFEDVPFHSSYAHSQSLDRLMNPLIDQYLYYLSRTNTPSGTTTQSRLQFSQAGASDIRDQSRNWLPGPCYRQQRVSKTSADNNNSEYSWIGATKYHLNGRDSLVNPGPAMASHKDDEEKFFPQSGVLIFGKQGSEKTNVDIEKVMITDEEEIRTTNPVATEQYGSVSTNLQSGNTQASTADVNTQGVLPGMVWQDRDVYLQGPIWAKIPHTDGHFHPSPLMGGFGLKHPPPQILIKNTPVPANPSTTFSAAKFASFITQYSTGRVSVEIEWELQKENSKRWNPEIQYTSNYNKSVNVDFTVDTNGVYSEPRPIGTRYLTRNL

SEQ ID NO: 313 - DNA, 2217 bp, Artificial Sequence
  Description of Artificial Sequence: Synthetic polynucleotide
atggctgccgatggttatcttccagattggctcgaggacaacctctctgagggcattcgcgagtggtgggacttgaaacctggagccccgaaacccaaagccaaccagcaaaagcaggacgacggccggggtctggtgcttcctggctacaagtacctcggacccttcaacggactcgacaagggggagcccgtcaacgcggcggacgcagcggccctcgagcacgacaaggcctacgaccagcagctcaaagcgggtgacaatccgtacctgcggtataaccacgccgacgccgagtttcaggagcgtctgcaagaagatacgtcttttgggggcaacctcgggcgagcagtcttccaggccaagaagcgggttctcgaacctctcggtctggttgaggaaggcgctaagacggctcctggaaagaagagaccggtagagccatcaccccagcgttctccagactcctctacgggcatcggcaagacaggccagcagcccgcgaaaaagagactcaactttgggcagactggcgactcagagtcagtgcccgaccctcaaccaatcggagaaccccccgcaggcccctctggtctgggatctggtacaatggctgcaggcggtggcgctccaatggcagacaataacgaaggcgccgacggagtgggtagttcctcaggaaattggcattgcgattccgcatggctgggcgacagagtcatcaccaccagcacccgaccctgggccctccccacctacaacaaccacctctacaagcaaatctccaacgggacatcgggaggaagcaccaacgacaacacctacttcggctacagcaccccctgggggtattttgactttaacagattccactgccacttctcaccacgtgactggcagcgactcatcaacaacaactggggattccggcccaagagactcaacttcaagctcttcaacatccaggtcaaggaggtcacgcagaatgaaggcaccaagaccatcgccaataaccttaccagcacgattcaggtctttacggactcggaataccagctcccgtacgtcctcggctctgcgcaccagggctgcccgcctccgttcccggcggacgtcttcatgattcctcagtacgggtacctgactctgaacaacggcagtcaggccgtgggccgttcctccttctactgcctggagtactttccttctcaaatgcggagaacgggcaacaactttgagttcagctaccagtttgaggacgtgccttttcacagcagctacgcgcatagccaaagcctggaccggctgatgaaccccctcatcgaccagtacctgtactacctgtctcggactcagtccacgggaggtaccgcaggaactcagcagttgctattttctcaggccgggcctaataacatgtcggctcaggccaaaaactggctacccgggccctgctaccggcagcaacgcgtctccacgacactgtcgcaaaataacaacagcaactttgcttggaccggtgccaccaagtatcatctgaatggcagagactctctggtaaatcccggtgtcgctatggcaacgcacaaggacgacgaagagcgattttttccatccagcggagtcttgatgtttgggaaacagggagctggaaaagacaacgtggactatagcagcgttatgctaaccagtgaggaagaaatcaaaaccaccaacccagtggccacagaacagtacggcgtggtggccgataacctgcaacagcaaaacgccgctcctattgtaggggccgtcaacagtcaaggagccttacctggcatggtctggcagaaccgggacgtgtacctgcagggtcctatctgggccaagattcctcacacggacggcaactttcatccttcgccgctgatgggaggctttggactgaaacacccgcctcctcagatcctgattaagaatacacctgttcccgcggatcctccaactaccttcagtcaagccaagctggcgtcgttcatcacgcagtacagcaccggacaggtcagcgtggaaattgaatgggagctgcagaaagagaacagcaagcgctggaacccagagattcagtatacttccaactactacaaatctacaaatgtggactttgctgtcaatactgagggtacttattcagagcctcgccccattggcacccgttacctcacccgtaacctgtaa

SEQ ID NO: 314 - protein, 738 aa, Artificial Sequence
  Description of Artificial Sequence: Synthetic polypeptide
MAADGYLPDWLEDNLSEGIREWWDLKPGAPKPKANQQKQDDGRGLVLPGYKYLGPFNGLDKGEPVNAADAAALEHDKAYDQQLKAGDNPYLRYNHADAEFQERLQEDTSFGGNLGRAVFQAKKRVLEPLGLVEEGAKTAPGKKRPVEPSPQRSPDSSTGIGKTGQQPAKKRLNFGQTGDSESVPDPQPIGEPPAGPSGLGSGTMAAGGGAPMADNNEGADGVGSSSGNWHCDSAWLGDRVITTSTRPWALPTYNNHLYKQISNGTSGGSTNDNTYFGYSTPWGYFDFNRFHCHFSPRDWQRLINNNWGFRPKRLNFKLFNIQVKEVTQNEGTKTIANNLTSTIQVFTDSEYQLPYVLGSAHQGCPPPFPADVFMIPQYGYLTLNNGSQAVGRSSFYCLEYFPSQMRRTGNNFEFSYQFEDVPFHSSYAHSQSLDRLMNPLIDQYLYYLSRTQSTGGTAGTQQLLFSQAGPNNMSAQAKNWLPGPCYRQQRVSTTLSQNNNSNFAWTGATKYHLNGRDSLVNPGVAMATHKDDEERFFPSSGVLMFGKQGAGKDNVDYSSVMLTSEEEIKTTNPVATEQYGVVADNLQQQNAAPIVGAVNSQGALPGMVWQNRDVYLQGPIWAKIPHTDGNFHPSPLMGGFGLKHPPPQILIKNTPVPADPPTTFSQAKLASFITQYSTGQVSVEIEWELQKENSKRWNPEIQYTSNYYKSTNVDFAVNTEGTYSEPRPIGTRYLTRNL

SEQ ID NO: 315 - protein, 735 aa, Artificial Sequence
  Description of Artificial Sequence: Synthetic polypeptide
MAADGYLPDWLEDTLSEGIRQWWKLKPGPPPPKPAERHKDDSRGLVLPGYKYLGPFNGLDKGEPVNEADAAALEHDKAYDRQLDSGDNPYLKYNHADAEFQERLKEDTSFGGNLGRAVFQAKKRVLEPLGLVEEPVKTAPGKKRPVEHSPVEPDSSSGTGKAGQQPARKRLNFGQTGDADSVPDPQPLGQPPAAPSGLGSTTMATGSGAPMADNNEGADGVGNSSGNWHCDSQWLGDRVITTSTRTWALPTYNNHLYKQISSQSGASNDNHYFGYSTPWGYFDFNRFHCHFSPRDWQRLINNNWGFRPKRLNFKLFNIQVKEVTQNDGTTTIANNLTSTVQVFTDSEYQLPYVLGSAHQGCLPPFPADVFMVPQYGYLTLNNGSQAVGRSSFYCLEYFPSQMLRTGNNFQFSYTFEDVPFHSSYAHSQSLDRLMNPLVDQYLYYLNKTQTNSGTLQQSRLLFSQAGPTNMSLQAKNWLPGPCYRQQRLSKQANDNNNSNFPWTAATKYHLNGRDSLVNPGPAMASHKDDEEKFFPMHGTLIFGKQGTNANDADLENVMITDEEEIRTTNPVATEQYGTVSNNLQNSNTGPTTGTVNHQGALPGMVWQDRDVYLQGPIWAKIPHTDGHFHPSPLMGGFGLKHPPPQIMIKNTPVPANPPTNFSSAKFASFITQYSTGQVSVEIEWELQKENSKRWNPEIQYTSNYNKSVNVDFTVDTNGVYSEPRPIGTRYLTRNL

SEQ ID NO: 316 - DNA, 3158 bp, Artificial Sequence
  Description of Artificial Sequence: Synthetic polynucleotide
gattgaatttagcggccgcgaattcgcccttgctgcgtcaactggaccaatgagaactttcctttcaatgattgcgtcgacaagatggtgatctggtgggaggagggaaagatgaccgccaaggtcgtggagtcggccaaagccattctcggaggaagcaaggtgcgcgcggaccagaaatgcaagtcctcggcccagatagacccgactcccgtgattgtcacctccaacaccaacatgtgcgccgtgattgacgggaactcaacgaccttcgaacaccagcagccgttgcaagaccggatgttcaaatttgaactcacccgccgtctggatcatgactttgggaaggtcaccaagcaggaagtcaaagactttttccggtgggcaaaggatcacgtggttgaggtggagcatgaattctacgtcaaaaagggtggagctaagaaaagacccgcccccagtgacgcagatataagtgagcccaaacgggcgcgcgagtcagttgcgcagccatcgacgtcagacgcggaagcttcgatcaactacgcgggcaggtaccaaaacaaatgttctcgtcacgtgggcatgaatctgatgctgtttccctgcagacaatgcgagagaatgaatcagaattcaaatatctgcttcactcacggacagaaagactgtttagagtgctttcccgtgtcagaatctcaacccgtttctgtcgtcaaaaaggcgtatcagaaactttgctacattcatcatatcatgggaaaggtgccagacgcttgcactgcctgcgatctggtcaatgtggatttggatgactgcatctctgaacaataaatgatttaaatcaggtatggctgccgatggttatcttccagattggctcgaggacactctctctgaaggaataagacagtggtggaagctcaaacctggcccaccaccaccaaagcccgcagagcggcataaggacgacagcaggggtcttgtgcttcctgggtacaagtacctcggacccttcaacggactcgacaagggggagccggtcaacgaggcagacgccgcggccctcgagcacgacaaggcctacgaccggcagctcgacagcggagacaacccgtacctcaagtacaaccacgccgacgcggagtttcaggagcgccttaaagaagatacgtcttttgggggcaacctcggacgagcagtcttccaggcaaaaaagagggttcttgaacctctgggcctggttgaggaacctgttaaaacggctccgggaaaaaagaggccggtagagcactctcctgtggagccagactcctcctcgggaaccggaaaagcgggccagcagcctgcaagaaaaagattgaatttcggtcagactggagacgcagactccgtacctgacccccagcctctcggacagccaccagcagccccctctggtctgggatctactacaatggctacaggcagtggcgcaccaatggcagacaataacgagggtgccgatggagtgggtaattcctcgggaaattggcattgcgattcccaatggctgggcgacagagtcatcaccaccagcacccgcacctgggccctgcccacctacaacaaccacctctacaagcaaatctccagccaatcaggagcctcaaacgacaaccactactttggctacagcaccccctgggggtattttgacttcaacagattccactgccacttttcaccacgtgactggcaaagactcatcaacaacaactggggattccgacccaagagactcaacttcaagctctttaacattcaagtcaaagaggtcacgcagaatgacggtacgacgacgattgccaataaccttaccagcacggttcaggtgtttactgactcggagtaccagctcccgtacgtcctcggctcggcgcatcaaggatgcctcccgccgtttccagcggacgtcttcatggtcccacagtatggatacctcaccctgaacaacgggagtcaggcagtaggacgctcttcattttactgcctggagtactttccttctcagatgctgcgtaccggaaacaactttcaattcagctacacttttgaagacgtgcctttccacagcagctacgctcacagccagagtctggatcggctgatgaatcctctggtcgaccagtacctgtattatctgaacaagacacaaacaaatagtggaactcttcagcagtctcggctactgtttagccaagctggacccaccaacatgtctcttcaagctaaaaactggctgcctggaccttgctacagacagcagcgtctgtcaaagcaggcaaacgacaacaacaacagcaactttccctggactgcagctacaaagtatcatctaaatggccgggactcgttggttaatccaggaccagctatggccagtcacaaggatgacgaagaaaagtttttccccatgcatggaacccttatatttggtaaacaaggaacaaatgccaacgacgcggatttggaaaatgtcatgattacagatgaagaagaaatcaggaccaccaatcccgtggctacggagcagtacggaactgtatcaaataatttgcaaaactcaaacactggtccaactactggaactgtcaatcaccaaggagcgttacctggtatggtgtggcaggatcgagacgtgtacctgcagggacccatttgggccaagattcctcacaccgatggacactttcatccttctccactgatgggaggttttggactcaaacacccacctcctcaaatcatgatcaaaaacactcccgttccagccaatcctcccacaaacttcagttctgccaagtttgcttctttcatcacacagtattccacggggcaggtcagcgtggagatcgagtgggagctgcagaaggagaacagcaaacgctggaatcccgaaattcagtacacttccaactacaacaaatctgttaatgtggactttactgtggacactaatggtgtgtattcagagcctcgccccattggcaccagatacctgactcgtaatctgtaattgcttgttaatcaataaaccgtttaattcgtttcagttgaactttggtctctgcgaagggcgaattcgtttaaacctgcaggactagtccctttagtga

SEQ ID NO: 317 - protein, 735 aa, Artificial Sequence
  Description of Artificial Sequence: Synthetic polypeptide
MAADGYLPDWLEDTLSEGIRQWWKLKPGPPPPKPAERHKDDSRGLVLPGYKYLGPFNGLDKGEPVNEADAAALEHDKAYDRQLDSGDNPYLKYNHADAEFQERLKEDTSFGGNLGRAVFQAKKRVLEPLGLVEEPVKTAPGKKRPVEHPPVEPDSSSGTGKAGQQPARKRLNFGQTGDADSVPDPQPLGQPPAAPSGLGSTTMATGSGAPMADNNEGADGVGNSSGNWHCDSQWLGDRVITTSTRTWALPTYNNHLYKQISSQSGASNDNHYFGYSTPWGYFDFNRFHCHFSPRDWQRLINNNWGFRPKRLNFKLFNIQVKEVTQNDGTTTIANNLTSTVQVFTDSEYQLPYVLGSAHQGCLPPFPADVFMVPQYGYLTLNNGSQAVGRSSFYCLEYFPSQMLRTGNNFQFSYTFEDVPFHSSYAHSQSLDRLMNPLIDQYLYYLNKTQTNSGTLQQSRLLFSQAGPTNMSLQAKNRLPGPCYRQQRLSKQANDNNNSNFPWTAATKYHLNGRDSLVNPGPAMASHKDDEEKFFPMHGTLIFGKQGTNANDADLENVMITDEEEIRTTNPVATEQYGTVSNNLQNSNTGPTTGTVNHQGALPGMVWQDRDVYLQGPIWAKIPHTDGHFHPSPLVGGFGLKHPPPQIMIKNTPVPANPPTNFSSAKFASFITQYSTGQVSVEIEWELQKENSKRWNPEIQYTSNYNKSVNVDFTVDTNGVYSEPRPIGTRYLTRNL

SEQ ID NO: 318 - DNA, 3159 bp, Artificial Sequence
  Description of Artificial Sequence: Synthetic polynucleotide
gattgaatttagcggccgcgaattcgcccttgctgcgtcaactggaccaatgagaactttcctttcaatgattgcgtcgacaagatggtgatctggtgggaggagggaaagatgaccgccaaggtcgtggagtcggccaaagccattctcggaggaagcaaggtgcgcgtggaccagaaatgcaagtcctcggcccagatagacccgactcccgtgattgtcacctccaacaccgacatgtgcgccgtgattgacgggaactcaacgaccttcgaacaccagcagccgttgcaagaccggatgttcaaatttgaactcacccgccgtctggatcatgactttgggaaggtcaccaagcaggaagtcaaagactttttccggtgggcaaaggatcacgtggttgaggtggagcatgaattctacgtcaaaaagggtggagctaagaaaagacccgcccccagtgacgcagatataagtgagcccaaacgggcgcgcgagtcagttgcgcagccatcgacgtcagacgcggaagcttcgatcaactacgcggacaggtaccaaaacaaatgttctcgtcacgtgggcatgaatctgatgctgtttccctgcagacaatgcgagagaatgaatcagaattcaaatatctgcttcactcacggacagaaagactgtttagagtgctttcccgtgtcagaatctcaacccgtttctgtcgtcaaaaaggcgtatcagaaactttgctacattcatcatatcatgggaaaggtgccagacgcttgcactgcctgcgatctggtcaatgtggatttggatgactgcatctctgaacaataaatgatttaaatcaggtatggctgccgatggttatcttccagattggctcgaggacactctctctgaaggaataagacagtggtggaagctcaaacctggcccaccaccaccaaagcccgcagagcggcataaggacgacagcaggggtcttgtgcttcctgggtacaagtacctcggacccttcaacggactcgacaagggggagccggtcaacgaggcagacgccgcggccctcgagcacgacaaggcctacgaccggcagctcgacagcggagacaacccgtacctcaagtacaaccacgccgacgcggagtttcaggagcgccttaaagaagatacgtcttttgggggcaacctcggacgagcagtcttccaggcaaaaaagagggttcttgaacctctgggcctggttgaggaacctgttaaaacggctccgggaaaaaagaggccggtagagcaccctcctgtggagccagactcctcctcgggaaccggaaaagcgggccagcagcctgcaagaaaaagattgaatttcggtcagactggagacgcagactccgtacctgacccccagcctctcggacagccaccagcagccccctctggtctgggatctactacaatggctacaggcagtggcgcaccaatggcagacaataacgagggtgccgatggagtgggtaattcctcgggaaattggcattgcgattcccaatggctgggcgacagagtcatcaccaccagcacccgcacctgggccctgcccacctacaacaaccacctctacaagcaaatctccagccaatcaggagcctcaaacgacaaccactactttggctacagcaccccctgggggtattttgacttcaacagattccactgccacttttcaccacgtgactggcaaagactcatcaacaacaactggggattccgacccaagagactcaacttcaagctctttaacattcaagtcaaagaggtcacgcagaatgacggtacgacgacgattgccaataaccttaccagcacggttcaggtgtttactgactcggagtaccagctcccgtacgtcctcggctcggcgcatcaaggatgcctcccgccgtttccagcggacgtcttcatggtcccacagtatggatacctcaccctgaacaacgggagtcaggcagtaggacgctcttcattttactgcctggagtactttccttctcagatgctgcgtaccggaaacaactttcagttcagctacacttttgaagacgtgcctttccacagcagctacgctcacagccagagtctggatcggctgatgaatcctctgatcgaccagtacctgtattatctgaacaagacacaaacaaatagtggaactcttcagcagtctcggctactgtttagccaagctggacccaccaacatgtctcttcaagctaaaaaccggctgcctggaccttgctacagacagcagcgtctgtcaaagcaggcaaacgacaacaacaacagcaactttccctggaccgcagctacaaagtatcatctaaatggccgggactcgttggttaatccaggaccagctatggccagtcacaaggatgacgaagaaaagtttttccccatgcatggaacccttatatttggtaaacaaggaacaaatgccaacgacgcggatttggaaaatgtcatgattacagatgaagaagaaatcaggaccaccaatcccgtggctacggagcagtacggaactgtatcaaataatttgcaaaactcaaacactggtccaactactggaactgtcaatcaccaaggagcgttacctggtatggtgtggcaggatcgagacgtgtacctgcagggacccatttgggccaagattcctcacaccgatggacactttcatccttctccactggtgggaggttttggactcaaacacccacctcctcaaatcatgatcaaaaacactcccgttccagccaatcctcccacaaacttcagttctgccaagtttgcttctttcatcacacagtattccacggggcaggtcagcgtggagatcgagtgggagctgcagaaggagaacagcaaacgctggaatcccgaaattcagtacacttccaactacaacaaatctgttaatgtggactttactgtggacactaatggtgtgtattcagagcctcgccccattggcaccagatacctgactcgtaatctgtaattgcttgttaatcaataaaccgtttaattcgtttcagttgaactttggtctctgcgaagggcgaattcgtttaaacctgcaggactagtccctttagtgag

SEQ ID NO: 319 - DNA, 2208 bp, Artificial Sequence
  Description of Artificial Sequence: Synthetic polynucleotide
atggctgccgatggttatcttccagattggctcgaggacactctctctgaaggaataagacagtggtggaagctcaaacctggcccaccaccaccaaagcccgcagagcggcataaggacgacagcaggggtcttgtgcttcctgggtacaagtaccttggacccttcaacggactcgacaagggagagccggtcaacgaggcagacgccgcggccctcgagcacgacaaggcctacgaccggcagctcgacagcggagacaacccgtaccccaagtacaaccacgccgacgcggagttccaggagcgtcttaaagaagatacgtcttttgggggcaacctcggacgagcagtcttccaggcgaaaaagagggttcttgaacctctgggcctggttgaggaacctgttaagacggctccgggaaaaaagaggccggtagagcactctcctgcggagccagactcctcctcgggaaccggaaaagcgggccagcagcctgcaagaaagagattgaatttcggtcagactggagacgcagactccgtacctgacccccagcctctcggacagccaccagcagccccctctggtctgggaactaatacgatggctacaggcagtggcgcaccaatggcagacaataacgagggcgccgacggagtgggtaattcctcgggaaattggcattgcgattccacatggatgggcgacagagtcatcaccaccagcacccgcacctgggctctgcccacctacaacaaccacctctacaagcagatttccagccaatcaggagcctcaaacgacaaccactactttggctacagcaccccttgggggtattttgacttcaacagattccactgccacttttcgccacgtgactggcaaagactcatcaacaacaattggggattccggcccaaaagactcaacttcaagctctttaacattcaagtcaaggaggtcacgcagaatgacggtacgacgacgattgccaataaccttaccagcacggttcaggtgtttactgactcggagtaccagctcccgtacgtcctcggctcggcgcatcaaggatgcctcccgccgttcccagcagacgtcttcatggtgccacagtatggatacctcaccctgaacaacgggagtcaggcagtaggacgctcttcattttactgcctggagtactttccttctcagatgctgcgtaccggaaacaactttaccttcagctacacctttgaggacgttcctttccacagcagctacgcccacagccagagtttggaccgtctcatgaatcctctcatcgaccagtacctgtattacttgagcagaacaaacactccaagcggaaccaccacgcagtcaaggcttcagttttctcaggccggagcaagtgacattcgggaccagtctaggaactggcttcctggaccctgttaccgccagcagcgagtatcaaagacatctgcggataacaacaacagtgaatactcgtggactggagctaccaagtaccaccttaatggaagagactctctggtgaatccgggcccggccatggccagccacaaggacgatgaagaaaagttttttcctcagagcggggttctcatctttggaaaacaagactcgggaaaaactaatgtggacattgaaaaggtcatgattacagacgaagaggaaatcaggaccaccaatcccgtggctacggagcagtatggttctgtatctaccaacctccagagcggcaacacacaagcagctacctcagatgtcaacacacaaggcgttcttccaggcatggtgtggcaggacagagacgtgtacctgcaggggcccatctgggcaaagattccacacacggacggacattttcacccctctcccctcatgggcggattcggacttaaacaccctcccccgcagattctcatcaagaacaccccggtacctgcgaatccttcgactaccttcagtgcggcaaagtttgcttccttcattacacagtactccacggggcaggtcagcgtggagatcgagtgggagctgcagaaggagaacagcaaacgctggaatcccgagattcagtacacttccaactacaacaaatctgttaatgtggactttactgtggacactaatggtgtgtattcagagcctcgccccattggcaccaggtacctgactcgtaatctgtaa

SEQ ID NO: 320 - protein, 735 aa, Artificial Sequence
  Description of Artificial Sequence: Synthetic polypeptide
MAADGYLPDWLEDTLSEGIRQWWKLKPGPPPPKPAERHKDDSRGLVLPGYKYLGPFNGLDKGEPVNEADAAALEHDKAYDRQLDSGDNPYPKYNHADAEFQERLKEDTSFGGNLGRAVFQAKKRVLEPLGLVEEPVKTAPGKKRPVEHSPAEPDSSSGTGKAGQQPARKRLNFGQTGDADSVPDPQPLGQPPAAPSGLGTNTMATGSGAPMADNNEGADGVGNSSGNWHCDSTWMGDRVITTSTRTWALPTYNNHLYKQISSQSGASNDNHYFGYSTPWGYFDFNRFHCHFSPRDWQRLINNNWGFRPKRLNFKLFNIQVKEVTQNDGTTTIANNLTSTVQVFTDSEYQLPYVLGSAHQGCLPPFPADVFMVPQYGYLTLNNGSQAVGRSSFYCLEYFPSQMLRTGNNFTFSYTFEDVPFHSSYAHSQSLDRLMNPLIDQYLYYLSRTNTPSGTTTQSRLQFSQAGASDIRDQSRNWLPGPCYRQQRVSKTSADNNNSEYSWTGATKYHLNGRDSLVNPGPAMASHKDDEEKFFPQSGVLIFGKQDSGKTNVDIEKVMITDEEEIRTTNPVATEQYGSVSTNLQSGNTQAATSDVNTQGVLPGMVWQDRDVYLQGPIWAKIPHTDGHFHPSPLMGGFGLKHPPPQILIKNTPVPANPSTTFSAAKFASFITQYSTGQVSVEIEWELQKENSKRWNPEIQYTSNYNKSVNVDFTVDTNGVYSEPRPIGTRYLTRNL

SEQ ID NO: 321 - DNA, 2208 bp, Artificial Sequence
  Description of Artificial Sequence: Synthetic polynucleotide
atggctgccgatggttatcttccagattggctcgaggacactctctctgaaggaataagacagtggtggaagctcaaacctggcccaccaccaccaaagcccgcagagcggcataaggacgacagcaggggtcttgtgcttcctgggtacaagtaccttggacccttcaacggactcgacaagggagagccggtcaacgaggcagacgccgcggccctcgagcacgacaaggcctacgaccggcagctcgacggcggagacaacccgtacctcaagtacaaccacgccgacgcggagttccaggagcgtcttaaagaagatacgtcttttgggggcaacctcggacgagcagtcttccaggcgaaaaagagggttcttgaacctctgggcctggttgaggaacctgttaagacggctccgggaaaaaagaggccggtagagcactctcttgcggagccagactcctcctcgggaaccggaaaagcgggccagcagcctgcaagaaggagattgaatttcggtcagactggagacgcagactccgtacctgacccccagcctctcggacagccaccagcagccccctctggtctgggaactaatacgatggctacaggcagtggcgcaccaatggcagacaataacgagggcgccgacggagtgggtaattcctcgggaaattggcattgcgattccacatggatgggcgacagagtcatcaccaccagcacccgcacctgggctctgcccacctacaacaaccacctctacaggcagatttccagccaatcaggagcctcaaacgacaaccactactttggctacagcaccccttgggggtattttgacttcaacagattccactgccacttttcgccacgtgactggcaaagactcatcaacaacaattggggatcccggcccaaaagactcaacttcaagctctttaacattcaagtcaaggaggtcacgcagaatgacggtacgacgacgattgccaataaccttaccagcacggttcaggtgtttactgactcggagtaccagctcccgtacgtcctcggctcggcgcatcaaggatgcctcccgccgttcccagcagacgtcttcatggtgccacagtatggatacctcaccctgaacaacgggagtcaggcagtaggacgctcttcattttactgcctggagtactttccttctcagatgctgcgtaccggaaacaactttaccttcagctacacctttgaggacgttcctttccacagcagctacgcccacagccagagtttggaccgtctcatgaatcctctcgtcgaccagtacctgtattacttgagcagaacaaacactccaagcggaaccaccacgcagtcaaggcttcagttttctcaggccggagcaagtgacattcgggaccagtctaggaactggcttcctggaccctgttaccgccagcagcgagtatcaaagacatctgcggataacaacaacagtgaatactcgtggactggagctaccaagtaccaccttaatggaagagactctctggtgaatccgggcccggccatggccagccacaaggacgatgaagaaaagttttttcctcagagcggggttctcatctttggaaaacaagactcgggaaaaactaatgtggacattgaaaaggtcatgattacagacgaagaggaaatcaggaccaccaatcccgtggctacggagcagtatggttctgtatctaccaacctccagagcggcaacacacaagcagctacctcagatgtcaacacacaaggcgttcttccaggcatggtgtggcaggacagagacgtgtacctgcaggggcccatctgggcaaagattccacacacggacggacattttcacccctctcccctcatgggcggattcggacttaaacaccctcccccgcagattctcatcaagaacaccccggtacctgcgaatccttcgactaccttcagtgcggcaaagtttgcttccttcattacacagtactccacggggcaggtcagcgtggagatcgagtgggagctgcagaaggagaacagcaaacgctggaatcccgagattcagtacacttccaactacaacaaatctgttaatgtggactttactgtggacactaatggtgtgtattcagagcctcgccccattggcaccagatacctgactcgtaatctgtaa

SEQ ID NO: 322 - protein, 735 aa, Artificial Sequence
  Description of Artificial Sequence: Synthetic polypeptide
MAADGYLPDWLEDTLSEGIRQWWKLKPGPPPPKPAERHKDDSRGLVLPGYKYLGPFNGLDKGEPVNEADAAALEHDKAYDRQLDGGDNPYLKYNHADAEFQERLKEDTSFGGNLGRAVFQAKKRVLEPLGLVEEPVKTAPGKKRPVEHSLAEPDSSSGTGKAGQQPARRRLNFGQTGDADSVPDPQPLGQPPAAPSGLGTNTMATGSGAPMADNNEGADGVGNSSGNWHCDSTWMGDRVITTSTRTWALPTYNNHLYRQISSQSGASNDNHYFGYSTPWGYFDFNRFHCHFSPRDWQRLINNNWGSRPKRLNFKLFNIQVKEVTQNDGTTTIANNLTSTVQVFTDSEYQLPYVLGSAHQGCLPPFPADVFMVPQYGYLTLNNGSQAVGRSSFYCLEYFPSQMLRTGNNFTFSYTFEDVPFHSSYAHSQSLDRLMNPLVDQYLYYLSRTNTPSGTTTQSRLQFSQAGASDIRDQSRNWLPGPCYRQQRVSKTSADNNNSEYSWTGATKYHLNGRDSLVNPGPAMASHKDDEEKFFPQSGVLIFGKQDSGKTNVDIEKVMITDEEEIRTTNPVATEQYGSVSTNLQSGNTQAATSDVNTQGVLPGMVWQDRDVYLQGPIWAKIPHTDGHFHPSPLMGGFGLKHPPPQILIKNTPVPANPSTTFSAAKFASFITQYSTGQVSVEIEWELQKENSKRWNPEIQYTSNYNKSVNVDFTVDTNGVYSEPRPIGTRYLTRNL

SEQ ID NO: 323 - protein, 738 aa, Artificial Sequence
  Description of Artificial Sequence: Synthetic polypeptide
MAADGYLPDWLEDNLSEGIREWWDLKPGAPKPKANQQKQDDGRGLVLPGYKYLGPFNGLDKGEPVNAADAAALEHDKAYDQQLKAGDNPYLRYNHADAEFQERLQEDTSFGGNLGRAVFQAKKRVLEPLGLVEEAAKTAPGKKRPVEPSPQRSPDSSAGIGKKGQQPAKKRLNFGQTGDSESVPDPQPIGEPPAGPSGLGSGTMAAGGGAPMADNNEGADGVGSSSGNWHCDSTWLGDRVITTSTRTWALPTYNNHLYKQISNGTSGGSTNDNTYFGYSTPWGYFDFNRFHCHFSPRDWQRLINNNWGFRPKRLSFKLFNIQVKEVTQNEGTETIANNLTSTIQVFTDSEYQLPYVLGSAHQGCLPPFPADVFMIPQYGYLTLNNGSQAVGRSSFYCLEYFPSQMLRTGNNFEFSYTFEDVPFHSSCAHSQSSDRLMNPLIDQYLYYLSRTRSTGGTQGTQQLLFSQAGPANMSAQAKNWLPGPCYRQQRVSTTLSQNNNSNFAWTGATKYHLNGRDSLVNPGVAMATHKDDEERFFPSSGVLMFGKQGAGRDNVDYSSVMLTSEEEIKTTNPVATEQYGVVADNLQQTNTGPIVGNVNSQGALPGMVWQNRDVYLQGPIWAKIPHTDGNFHPSPLMGGFGLKHPPPQILIKNTPVPADPPTTFSQAKLASFITQYSTGQVSVEIEWELQKENSKRWNPEIQYTSNYYKSTNVDFAVNTEGTYSEPRPIGTRYLTRNL

SEQ ID NO: 324 - DNA, 2217 bp, Artificial Sequence
  Description of Artificial Sequence: Synthetic polynucleotide
atggctgctgacggttatcttccagattggctcgaggacaacctctctgagggcattcgcgagtggtgggacctgaaacctggagcccccaagcccaaggccaaccagcagaagcaggacgacggccggggtctggtgcttcttggctacaagtacctcggacccttcaacggactcgacaagggggagcccgtcaatgcggcggacgcagcggccctcgagcacgacaaggcctacgaccagcagctcaaagcgggtgacaatccgtacctgcggtataaccacgccgacgccgagtttcaggagcgtctgcaagaagatacgtcttttgggggcaacctcgggcgagcagtcttccaggccaagaagcgggttctcgaacctctcggtctggttgaggaagctgctaagacggctcctggaaagaagagaccggtagaaccgtcacctcagcgttcccccgactcctccacgggcatcggcaagaaaggccagcagcccgctaaaaagagactgaactttggtcagactggcgactcagagtcagtccccgaccctcaaccaatcggagaaccaccagcaggcccctctggtctgggatctggtacaatggctgcaggcggtggcgctccaatggcagacaataacgaaggcgccgacggagtgggtagttcctcaggaaattggcattgcgattccacatggctgggcgacagagtcatcaccaccagcacccgaacctgggccctgcccacctacaacaaccacctctacaagcaaatatccaatgggacatcgggaggaagcaccaacgacaacacctacttcggctacagcaccccctgggggtattttgacttcaacagattccactgccacttctcaccacgtgactggcagcgactcatcaacaacaactggggattccggccaaaaagactcagcttcaagctcttcaacatccaggtcaaggaggtcacgcagaatgaaggcaccaagaccatcgccaataaccttaccagcacgattcaggtatttacggactcggaataccagctgccgtacgtcctcggctccgcgcaccagggctgcctgcctccgttcccggcggacgtcttcatgattccccagtacggctaccttacactgaacaatggaagtcaagccgtaggccgttcctccttctactgcctggaatattttccatctcaaatgctgcgaactggaaacaattttgaattcagctacaccttcgaggacgtgcctttccacagcggctacgcacacagccagagcttggaccgactgatgaatcctctcatcgaccagtacctgtactacttatccagaactcagtccacaggaggaactcaaggtacccagcaattgttattttctcaagctgggcctgcaaacatgtcggctcaggctaagaactggctacctggaccttgctaccggcagcagcgagtctctacgacactgtcgcaaaacaacaacagcaactttgcttggactggtgccaccaaatatcacctgaacggaagagactctttggtaaatcccggtgtcgccatggcaacccacaaggacgacgaggaacgcttcttcccgtcgagtggagtcctgatgtttggaaaacagggtgctggaagagacaatgtggactacagcagcgttatgctaaccagcgaagaagaaattaaaaccactaaccctgtagccacagaacaatacggtgtggtggctgacaacttgcagcaaaccaatacagggcctattgtgggaaatgtcaacagccaaggagccttacctggcatggtctggcagaaccgagacgtgtacctgcagggtcccatctgggccaagattcctcacacggacggcaacttccacccttcaccgctaatgggaggatttggactgaagcacccacctcctcagatcctgatcaagaacacgccggtacctgcggatcctccaacgacgttcagccaggcgaaattggcttccttcattacgcagtacagcaccggacaggtcagcgtggaaatcgagtgggagctgcagaaggagaacagcaaacgctggaacccagagattcagtacacttcaaactactacaaatctacaaatgtggactttgctgtcaatacagagggaacttattctgagcctcgccccattggtactcgttacctcacccgtaatctgtaa

SEQ ID NO: 325 - protein, 738 aa, Artificial Sequence
  Description of Artificial Sequence: Synthetic polypeptide
MAADGYLPDWLEDNLSEGIREWWDLKPGAPKPKANQQKQDDGRGLVLLGYKYLGPFNGLDKGEPVNAADAAALEHDKAYDQQLKAGDNPYLRYNHADAEFQERLQEDTSFGGNLGRAVFQAKKRVLEPLGLVEEAAKTAPGKKRPVEPSPQRSPDSSTGIGKKGQQPAKKRLNFGQTGDSESVPDPQPIGEPPAGPSGLGSGTMAAGGGAPMADNNEGADGVGSSSGNWHCDSTWLGDRVITTSTRTWALPTYNNHLYKQISNGTSGGSTNDNTYFGYSTPWGYFDFNRFHCHFSPRDWQRLINNNWGFRPKRLSFKLFNIQVKEVTQNEGTKTIANNLTSTIQVFTDSEYQLPYVLGSAHQGCLPPFPADVFMIPQYGYLTLNNGSQAVGRSSFYCLEYFPSQMLRTGNNFEFSYTFEDVPFHSGYAHSQSLDRLMNPLIDQYLYYLSRTQSTGGTQGTQQLLFSQAGPANMSAQAKNWLPGPCYRQQRVSTTLSQNNNSNFAWTGATKYHLNGRDSLVNPGVAMATHKDDEERFFPSSGVLMFGKQGAGRDNVDYSSVMLTSEEEIKTTNPVATEQYGVVADNLQQTNTGPIVGNVNSQGALPGMVWQNRDVYLQGPIWAKIPHTDGNFHPSPLMGGFGLKHPPPQILIKNTPVPADPPTTFSQAKLASFITQYSTGQVSVEIEWELQKENSKRWNPEIQYTSNYYKSTNVDFAVNTEGTYSEPRPIGTRYLTRNL

SEQ ID NO: 326 - protein, 735 aa, Artificial Sequence
  Description of Artificial Sequence: Synthetic polypeptide
MAADGYLPDWLEDTLSEGIRQWWKLKPGPPPPKPAERHKDDSRGLVLPGYKYLGPFNGLDKGEPVNEADAAALEHDKAYDRQLDSGDNPYLKYNHADAEFQERLKEDTSFGGNLGRAVFQAKKRVLEPLGLVEPPVKTAPGKKRPVEHSPAEPDSSSGTGKAGQQPARKRLNFGQTGDADSVPDPQPLGQPPAAPSGLGSTTMATGSGAPMADNNEGADGVGNSSGNWHCDSQWLGDRVITTSTRTWALPTYNNHLYKQISSQSGASNDNHYFGYSTPWGYFDFNRFHCHFSPRDWQRLINNNWGFRPKRLNFKLFNIQVKEVTQNDGTTTIANNLTSTVQVFTDSEYQLPYVLGSAHQGCLPPFPADVFMVPQYGYLTLNNGSQAVGRSSFYCLEYFPSQMLRTGNNFQFSYTFEDVPFHSSYAHSQSLDRLMNPLIDQYLYYLNKTQSNSGTLQQSRLLFSQAGPTSMSLQAKNWLPGPCYRQQRLSKQANDNNNSNFPWTAATKYHLNGRDSLVNPGPAMASHKDDEEKFFPMHGTLIFGKQGTNANDADLDNVMITDEEEIRTTNPVATEQYGYVSNNLQNSNTGPTTGTVNHQGALPGMVWQDRDVYLQGPIWAKIPHTDGHFHPSPLMGGFGLKHPPPQIMIKNTPVPANPPTNFSSAKFASFITQYSTGQVSVEIEWELQKENSKRWNPEIQYTSNYNKSVNVDFTVDTNGVYSEPRPIGTRYLTRNL

SEQ ID NO: 327 - protein, 735 aa, Artificial Sequence
  Description of Artificial Sequence: Synthetic polypeptide
MAADGYLPDWLEDTLSEGIRQWWKLKPGPPPPKPAERHKDDSRGLVLPGYKYLGPFNGLDKGEPVNEADAAALEHDKAYDRQLDSGDNPYLKYNHADAEFQERLKEDTSFGGNLGRAVFQAKKRVLEPLGLVEGPVKTAPGKKRPVEHSPAEPDSSSGTGKAGQQPARKRLNFGQTGDADSVPDPQPLGQPPAAPSGLGSTTMATGSGAPMADNNEGADGVGNSSGNWHCDSQWLGDRVITTSTRTWALPTYNNHLYKQISSQSGASNDNHYFGYSTPWGYFDFNRFHCHFSPRDWQRLINNNWGFRPKRLNFKLFNIQVKEVTQNDGTTTIANNLTSTVQVFTDSEYQLPYVLGSAHQGCLPPFPADVFMVPQYGYLTLNNGSQAVGRSSFYCLEYFPSQMLRTGNNFQFSYTFEDVPFHSSYAHSQSLDRLMNPLIDQYLYYLNKTQSNSGTLQQSRLLFSQAGPTSMSLQAKNWLPGPCYRQQRLSKQANDNNNSNFPWTAATKYHLNGRDSLVNPGPAMASHKDDEEKFFPMHGTLIFGKQGTNANDADLDNVMITDEEEIRTTNPVATEQYGYVSNNLQNSNTGPTTGTVNHQGALPGMVWQDRDVYLQGPIWAKIPHTDGHFHPSPLMGGFGLKHPPPQIMIKNTPVPANPPTNFSSAKFASFITQYSTGQVSVEIEWELQKENSKRWNPEIQYTSNYNKSVNVDFTVDTNGVYSEPRPIGTRYLTRNL

SEQ ID NO: 328 - DNA, 2208 bp, Artificial Sequence
  Description of Artificial Sequence: Synthetic polynucleotide
atggctgccgatggttatcttccagattggctcgaggacactctctctgaaggaataagacagtggtggaagctcaaacctggcccaccaccaccaaagcccgcagagcggcataaggacgacagcaggggtcttgtgcttcctgggtacaagtacctcggacccttcaacggactcgacaagggggagccggtcaacgaggcagacgccgcggccctcgagcacgacaaggcctacgaccggcagctcgacagcggagacaacccgtacctcaagtacaaccacgccgacgcggagtttcaggagcgtcttaaagaagatacgtcttttgggggcaacctcggacgagcagtcttccaggcgaaaaagagggttcttgaacctctgggcctggttgagggacctgttaagacggctccgggaaaaaagaggccggtagagcactctcctgcggagccagactcctcctcgggaaccggaaaagcgggccagcagcctgcaagaaaaagattgaattttggtcagactggagacgcagactccgtacctgacccccagcctctcggacagccaccagcagccccctctggtttgggatctactacaatggctacaggcagtggcgcaccaatggcagacaataacgagggtgccgatggagtgggtaattcctcaggaaattggcattgcgattcccaatggctgggcgacagagtcatcaccaccagcacccgaacctgggccctgcccacctacaacaaccacctctacaagcaaatctcaagccaatcaggagcctcaaacgacaaccactactttggctacagcaccccttgggggtattttgacttcaacagattccactgccacttttcaccacgtgactggcaaagactcatcaacaacaactggggattccgacccaagagactcaacttcaagctctttaacattcaagtcaaagaggtcacgcagaatgacggtacgacgacgattgccaataaccttaccagcacggttcaggtgtttactgactcggagtaccagctcccgtacgtcctcgggtcggcgcatcaaggatgcctcccgccgtttccagcggacgtcttcatggtcccacagtatggatacctcaccctgaacaacgggagtcaggcggtaggacgctcttccttttactgcctggagtactttccttctcagatgcttcgtactggaaacaactttcagttcagctacacctttgaagacgttcctttccacagcagctacgctcacagccagagtctggatcggctgatgaatcctctgatcgaccagtacctgtattatctgaacaaaacacaatcaaatagtggaactcttcagcagtctcggctactgtttagtcaagctggacccaccagcatgtctcttcaagctaaaaactggctacctggaccttgctacagacagcagcgtctgtcaaagcaggcaaacgacaacaacaacagcaactttccctggactgcggctacaaagtatcacctaaatggccgggactcgttggttaatccaggaccagctatggccagtcacaaagacgatgaagaaaagtttttccccatgcatggaaccctgatatttggtaaacaaggaacaaatgctaacgacgcggatttggacaatgtcatgattacagatgaagaagaaatccgcaccaccaatcccgtggctacggagcagtacggatatgtgtcaaataatttgcaaaactcaaatactggtccaactactggaactgtcaatcaccaaggagcgttacctggcatggtgtggcaggatcgagacgtgtacctgcagggacccatttgggccaagattcctcacaccgatggacactttcatccttctccactgatgggaggttttgggctcaaacacccgcctcctcagatcatgatcaaaaacactcccgttccagccaatcctcccacaaacttcagttctgccaagtttgcttctttcatcacacagtattccacggggcaggtcagcgtggagatcgagtgggagctgcagaaagagaacagcaaacgctggaatcccgaaattcagtacacttccaactacaacaaatctgttaatgtggactttactgtggacactaatggcgtgtattcagagcctcgccccattggcaccagatacctgactcgtaatctgtaa

SEQ ID NO: 329 - DNA, 2211 bp, Artificial Sequence; identical to SEQ ID NO: 10
  Description of Artificial Sequence: Synthetic polynucleotide

SEQ ID NO: 330 - DNA, 2208 bp, Artificial Sequence
  Description of Artificial Sequence: Synthetic polynucleotide
atggctgccgatggttatcttccagattggctcgaggacactctctctgaaggaacaagacagtggtggaagctcaaacctggcccaccaccaccaaagcccgcagagcggcataaggacgacagcaggggtcttgtgcttcctgggtacaagtacctcggacccttcaacggactcgacaagggggagccggtcaacgaggcagacgccgcggccctcgagcacgacaaggcctacgaccggcagctcgacagcggagacaacccgtacctcaagtacaaccacgccgacgcggagtttcaggagcgtcttaaagaagatacgtcttttgggggcaacctcggacgagcagtcttccaggcgaaaaagagggttcttgaacctctgggcctggttgaggaacctgttaagacggctccgggaaaaaagaggccggtagagcactctcctgcggagccagactcctcctcgggaaccggaaaagcgggccagcagcctgcaagaaaaagattgaattttggtcagactggagacgcagactccgtacctgacccccagcctctcggacagccaccagcagccccctctggtttgggatctactacaatggctacaggcagtggcgcaccaatggcagacaataacgagggtgccgatggagtgggtaattcctcaggaaattggcattgcgattcccaatggctgggcgacagagtcatcaccaccagcacccgaacctgggccctgcccacctacaacaaccacctctacaagcaaatctcaagccaatcaggagcctcaaacgacaaccactactttggctacagcaccccttgggggtattttgacttcaacagattccactgccacttttcaccacgtgactggcaaagactcatcaacaacaactggggattccgacccaagagactcaacttcaagctctttaacattcaagtcaaagaggtcacgcagaatgacggtacgacgacgattgccaataaccttaccagcacggttcaggtgtttactgactcggagtaccagctcccgtacgtcctcgggtcggcgcatcaaggatgcctcccgccgtttccagcggacgtcttcatggtcccacagtatggatacctcaccctgaacaacgggagtcaggcggtaggacgctcttccttttactgcctggagtactttccttctcagatgcttcgtactggaaacaactttcagttcagctacacctttgaagacgttcctttccacagcagctacgctcacagccagagtctggatcggctgatgaatcctctgatcgaccagtacctgtattatctgaacaaaacacaatcaaatagtggaactcttcagcagtctcggctactgtttagtcaagctggacccaccagcatgtctcttcaagctaaaaactggctacctggaccttgctacagacagcagcgtctgtcaaagcaggcaaacgacaacaacaacagcaactttccctggactgcggctacaaagtaccacctaaatggccgggactcgttggttaatccaggaccagctatggccagtcacaaagacgatgaagaaaagtttttccccatgcatggaaccctgatatttggtaaacaaggaacaaatgctaacgacgcggatttggacaatgtcatgattacagatgaagaagaaatccgcaccaccaatcccgtggctacggagcagtacggatatgtgtcaaataatttgcaaaactcaaatactggtccaactactggaactgtcaatcaccaaggagcgttacctggcatggtgtggcaggatcgagacgtgtacctgcagggacccatttgggccaagattcctcacaccgatggacactttcatccttctccactgatgggaggttttgggctcaaacacccgcctcctcagatcatgatcaaaaacactcccgttccagccaatcctcccacaaacttcagttctgccaagtttgcttctttcatcacacagtattccacggggcaggtcagcgtggagatcgagtgggagctgcagaaagagaacagcaaacgctggaatcccgaaattcagtacacttccaactacaacaaatctgttaatgtggactttactgtggacactaatggcgtgtattcagagcctcgccccattggcaccagatacctgactcgtaatctgtaa

SEQ ID NO: 331 - DNA, 2217 bp, Artificial Sequence
  Description of Artificial Sequence: Synthetic polynucleotide
atggctgctgacggttatcttccagattggctcgaggacaacctctctgagggcattcgcgagtggtgggacctgaaacctggagcccccaagcccaaggccaaccagcagaagcaggacgacggccggggtctggtgcttcctggctacaagtacctcggacccttcaacggactcgacaagggggagcccgtcaacgcggcggacgcagcggccctcgagcacgacaaggcctacgaccagcagctcaaagcgggtgacaatccgtacctgcggtataaccacgccgacgccgagtttcaggagcgtctgcaagaagatacgtcttttgggggcaacctcgggcgagcagtcttccaggccaagaagcgggttctcgaacctctcggtctggttgaggaagctgctaagacggctcctggaaagaagagaccggtagaaccgtcacctcagcgttcccccgactcctccacgggcatcggcaagaaaggccagcagcccgctaaaaagagactgaactttggtcagactggcgactcagagtcagtccccgaccctcaaccaatcggagaaccacctgcaggcccctctggtctgggatctggtacaatggctgcaggcggtggcgctccaatggcagacaataacgaaggcgccgacggagtgggtagttcctcaggaaattggcattgcgattccacatggctgggcgacagagtcatcaccaccagcacccgaacctgggccctgcccacctacaacaaccacctctacaagcaaatatccaatgggacatcgggagggagcaccaacgacaacacctacttcggctacagcaccccctgggggtattttgacttcaacagattccactgccacttctcaccacgtgactggcagcgactcatcaacaacaactggggattccggccaaaaagactcagcttcaagctcttcaacatccaggtcaaggaggtcacgcagaatgaaggcaccaagaccatcgccaataaccttaccagcacgattcaggtatttacggactcggaataccagctgccgtacgtcctcggctccgcgcaccagggctgcctgcctccgttcccggcggacgtcttcatgattccccagtacggctaccttacactgaacaatggaagtcaagccgtaggccgttcctccttctactgcctggaatattttccatctcaaatgctgcgaactggaaacaattttgaattcagctacaccttcgaggacgtgcctttccacagcagctacgcacacagccagagcttggaccgactgatgaatcctctcatcgaccagtacctgtactacttatccagaactcagtccacaggaggaactcaaggtacccagcaattgttattttctcaagctgggcctgcaaacatgtcggctcaggctaagaactggctacctggaccttgctaccggcagcagcgagtctctacgacactgtcgcaaaacaacaacagcaactttgcttggactggtgccaccaaatatcacctgaacggaagagactctttggtaaatcccggtgtcgccatggcaacccacaaggacgacgaggaacgcttcttcccgtcgagtggagtcctgatgtttggaaaacagggtgctggaagagacaatgtggactacagcagcgttatgctaaccagcgaagaagaaattaaaaccactaaccctgtagccacagaacaatacggtgtggtggctgacaacttgcagcaaaccaatacagggcctattgtgggaaatgtcaacagccaaggagccttacctggcatggtctggcagaaccgagacgtgtacctgcagggtcccatctgggccaagattcctcacacggacggcaactgccacccttcaccgctaatgggaggatttggactgaagcacccacctcctcagatcctgatcaagaacacgccggtacctgcggatcctccaacaacgttcagccaggcgaaattggcttccttcattacgcagtacagcaccggacaggtcagcgtggaaatcgagtgggagctgcagaaggagaacagcaaacgctggaacccagagattcagtacacttcaaactactacaaatctacaaatgtggactttgctgtcaatacagagggaacttattctgagcctcgccccattggtactcgttacctcacccgtaatctgtaa

SEQ ID NO: 332 - protein, 735 aa, Artificial Sequence
  Description of Artificial Sequence: Synthetic polypeptide
MAADGYLPDWLEDTLSEGTRQWWKLKPGPPPPKPAERHKDDSRGLVLPGYKYLGPFNGLDKGEPVNEADAAALEHDKAYDRQLDSGDNPYLKYNHADAEFQERLKEDTSFGGNLGRAVFQAKKRVLEPLGLVEEPVKTAPGKKRPVEHSPAEPDSSSGTGKAGQQPARKRLNFGQTGDADSVPDPQPLGQPPAAPSGLGSTTMATGSGAPMADNNEGADGVGNSSGNWHCDSQWLGDRVITTSTRTWALPTYNNHLYKQISSQSGASNDNHYFGYSTPWGYFDFNRFHCHFSPRDWQRLINNNWGFRPKRLNFKLFNIQVKEVTQNDGTTTIANNLTSTVQVFTDSEYQLPYVLGSAHQGCLPPFPADVFMVPQYGYLTLNNGSQAVGRSSFYCLEYFPSQMLRTGNNFQFSYTFEDVPFHSSYAHSQSLDRLMNPLIDQYLYYLNKTQSNSGTLQQSRLLFSQAGPTSMSLQAKNWLPGPCYRQQRLSKQANDNNNSNFPWTAATKYHLNGRDSLVNPGPAMASHKDDEEKFFPMHGTLIFGKQGTNANDADLDNVMITDEEEIRTTNPVATEQYGYVSNNLQNSNTGPTTGTVNHQGALPGMVWQDRDVYLQGPIWAKIPHTDGHFHPSPLMGGFGLKHPPPQIMIKNTPVPANPPTNFSSAKFASFITQYSTGQVSVEIEWELQKENSKRWNPEIQYTSNYNKSVNVDFTVDTNGVYSEPRPIGTRYLTRNL

SEQ ID NO: 333 - DNA, 2208 bp, Artificial Sequence
  Description of Artificial Sequence: Synthetic polynucleotide
atggctgccgatggttatcttccagattggctcgaggacactctctctgaaggaataagacagtggtggaagctcaaacctggcccaccaccaccaaagcccgcagagcggcatcaggacaacagcaggggtcttgtgcttcctgggtacaagtacctcggaccctccaacggactcgacaaaggagagccggtcaacgaggcagacgccgcggccctcgagcacgacaaggcctacgaccggcagctcgacagcggagacaacccgtacctcaagtacaaccacgccgacgcggagtttcaggagcgtcttaaagaagatacgtcttttgggggcaacctcggacgagcagtcttccaggcgaaaaagagggttcttgaacctctgggcctggttgaggaacctgttaagacggctccgggaaaaaagaggccggtagagcactctcctgtggagccagactcctcctcgggaaccggaaaagcgggccatcagcctgcgagaaagagattgaattttggtcagactggagacgcagactccgtacctgacccccagcctctcggacagccaccagcagcccccacaagtttgggatctactacaatggctacaggcagtggcgcaccaatggcagacaataacgagggtgccgatggagtgggtaattcctcaggaaattggcattgcgattcccaatggctgggcgacagagtcatcaccaccagcacccgaacctgggccctgcccacctacaacaaccacctctacaagcaaatctccagccaatcaggagcctcgaacgacaaccactactttggctgcagcaccccctgggggtattttgacttcaacagattccactgtcacttctccccacgtgattggcaaagactcatcaacaacaactggggattccgacccaagagactcaacttcaagctctttaacattcaagtcaaagaggtcacgcagaatgacggtacgacgacgattgccaataaccttaccagcacggttcaggtgtttactgactcggagtacccgctcccgtacgtcctcggctcggcgcatcaaggatgcctcccgccgtttccagcggacgtcttcatggtcccacagtatggatacctcaccctgaacaacgggagtcaggcggtaggacgctcttccttttactgcctggagtactttccttctcagatgctgcgtaccggaaacaactttaccttcagctacacctttgaggacgttcctttccacagcagctacgctcacagccagagtttggaccggctgatgaatcctctgatcgaccagtatctatattatctgaacaggacacaatcaaatagtggaactcttcagcagtctaggctactgtttagccaagctggacccaccagcatgtctcttcaagctaaaaactggctgcctggaccttgctacagacagcagcgtctttcaaagcaggcaaacgacaacaacaacagcaactttccctggactgcggctacaaagtatcatctaaatggccgggactcgttggttaatccaggaccagctatggccagccacaaagacgatgaagaaaagtttttccccatgcatggaaccctgatatttggtaaacaaggaacaaatgctaacgacgcggatttggagcatgttatgattacagatgaagaagaaatcaggaccaccaatcctgtggctacagagcagtacggaaacgtgtcaaataatttgcaaaactcaaatactggtccaactacagaaaatgtcaatcaccagggagcgttacctggtatggtgtggcaggatcgagacgtgtacctgcagggacccatttgggccaagattcctcacaccgacggacactttcacccttctccactgatgggaggttttggactcaaacacccgcctcctcaaatcatgatcaaaaacactcccgttccagccaatcctcccacaaacttcagttctgccaagtttgcttctttcatcacacagtattccacgggccaggtcagcgtggagattgagtgggagctgcagaaggagaacagcaaacgctggaaccccgagatccagtatacttccaactacaacaaatctgttaatgtggactttactgtggacactaatggtgtgtattcagagccttgccccattggcaccagatacctgactcgtaatctgtaa

SEQ ID NO: 334 - protein, 735 aa, Artificial Sequence
  Description of Artificial Sequence: Synthetic polypeptide
MAADGYLPDWLEDTLSEGIRQWWKLKPGPPPPKPAERHQDNSRGLVLPGYKYLGPSNGLDKGEPVNEADAAALEHDKAYDRQLDSGDNPYLKYNHADAEFQERLKEDTSFGGNLGRAVFQAKKRVLEPLGLVEEPVKTAPGKKRPVEHSPVEPDSSSGTGKAGHQPARKRLNFGQTGDADSVPDPQPLGQPPAAPTSLGSTTMATGSGAPMADNNEGADGVGNSSGNWHCDSQWLGDRVITTSTRTWALPTYNNHLYKQISSQSGASNDNHYFGCSTPWGYFDFNRFHCHFSPRDWQRLINNNWGFRPKRLNFKLFNIQVKEVTQNDGTTTIANNLTSTVQVFTDSEYPLPYVLGSAHQGCLPPFPADVFMVPQYGYLTLNNGSQAVGRSSFYCLEYFPSQMLRTGNNFTFSYTFEDVPFHSSYAHSQSLDRLMNPLIDQYLYYLNRTQSNSGTLQQSRLLFSQAGPTSMSLQAKNWLPGPCYRQQRLSKQANDNNNSNFPWTAATKYHLNGRDSLVNPGPAMASHKDDEEKFFPMHGTLIFGKQGTNANDADLEHVMITDEEEIRTTNPVATEQYGNVSNNLQNSNTGPTTENVNHQGALPGMVWQDRDVYLQGPIWAKIPHTDGHFHPSPLMGGFGLKHPPPQIMIKNTPVPANPPTNFSSAKFASFITQYSTGQVSVEIEWELQKENSKRWNPEIQYTSNYNKSVNVDFTVDTNGVYSEPCPIGTRYLTRNL

SEQ ID NO: 335 - DNA, 2214 bp, Artificial Sequence
  Description of Artificial Sequence: Synthetic polynucleotide
atggctgccgatggttatcttccagattggctcgaggacaaccttagtgaaggaattcgcgagtggtgggctttgaaacctggagcccctcaacccaaggcaaatcaacaacatcaagacaacgctcgaggtcttgtgcttccgggttacaaataccttggacccggcaacggactcgacaagggggagccggtcaacgcagcagacgcggcggccctcgagcacgacaaggcctacgaccagcagctgcaggcgggtgacaatccgtacctgcggtataaccacgccgacgccgagtttcaggagcgtctgcaagaagatacgtcttttgggggcaaccttggcagagcagtcttccaggccaaaaagaggatccttgagcctcttggtctggttgaggaagcagctaaaacggctcctggaaagaagaggcctgtagatcagtctcctcaggaaccggactcatcatctggtgttggcaaatcgggcaaacagcctgccagaaaaagactaaatttcggtcagactggcgactcagagtcagtcccagaccctcaacctctcggagaaccaccagcagcccccacaagtttgggatctaatacaatggcttcaggcggtggcgcaccaatggcagacaataacgagggtgccgatggggtgggtagttcctcgggaaattggcattgcgattcccaatggctgggggacagagtcatcaccaccagcacccgaacctgggccctgcccacctacaacaatcacctctacaagcaaatctccaacgggacatcgggaggagccaccaacgacaacacctacttcggctacagcaccccctgggggtattttgactttaacagattccactgccacttttcaccacgtgactggcagcgactcatcaacaacaactggggattccggcccaagagactcagcttcaagctcttcaacatccaggtcaaggaggtcacgcagaatgaaggcaccaagaccatcgccaataacctcaccagcaccatccaggtgtttacggactcggagtaccagctgccgtacgttctcggctctgcgcaccagggctgcctccctccgttcccggcggacgtgttcatgattccgcaatacggctacctgacgctcaacaatggcagccaagccgtgggacgttcatccttttactgcctggaatatttcccttctcagatgctgagaacgggcaacaactttaccttcagctacacctttgaggaagtgcctttccacagcagctacgcgcacagccagagcttggaccggctgatgaatcctctgattgaccagtacctgtactacttgtctcggactcaaacaacaggaggcacggcaaatacgcagactctgggcttcagccaaggtgggcctaatacaatggccaatcaggcaaagaactggctgccaggaccctgttaccgccaacaacgcgtctcaacgacaaccgggcaaaacaacaatagcaactttgcctggactgctgggaccaaataccatctgaatggaagaaattcattggctaatcctggcatcgctatggcaacacacaaagacgacgaggagcgtttttttcccagtaacgggatcctgatttttggcaaacaaaatgctgccagagacaatgcggattacagcgatgtcatgctcaccagcgaggaagaaatcaaaaccactaaccctgtggctacagaggaatacggtatcgtggcagataacttgcagcagcaaaacacggctcctcaaattggaactgtcaacagccagggggccttacccggtatggtctggcagaaccgggacgtgtacctgcagggtcccatctgggccaagattcctcacacggacggcaacttccacccgtctccgctgatgggcggctttggcctgaaacatcctccgcctcagatcctgatcaagaacacgcctgtacctgcggatcctccgaccaccttcaaccagtcaaagctgaactctttcatcacgcaatacagcaccggacaggtcagcgtggagatcgagtgggagctgcagaaggaaaacagcaagcgctggaacccggagatccagtacacttccaactattacaagtctaataatgttgaatttgctgttaatactgaaggtgtatatagtgaaccccgccccattggcaccagatacctgactcgtaatctgtaa

SEQ ID NO: 336 - protein, 737 aa, Artificial Sequence
  Description of Artificial Sequence: Synthetic polypeptide
MAADGYLPDWLEDNLSEGIREWWALKPGAPQPKANQQHQDNARGLVLPGYKYLGPGNGLDKGEPVNAADAAALEHDKAYDQQLQAGDNPYLRYNHADAEFQERLQEDTSFGGNLGRAVFQAKKRILEPLGLVEEAAKTAPGKKRPVDQSPQEPDSSSGVGKSGKQPARKRLNFGQTGDSESVPDPQPLGEPPAAPTSLGSNTMASGGGAPMADNNEGADGVGSSSGNWHCDSQWLGDRVITTSTRTWALPTYNNHLYKQISNGTSGGATNDNTYFGYSTPWGYFDFNRFHCHFSPRDWQRLINNNWGFRPKRLSFKLFNIQVKEVTQNEGTKTIANNLTSTIQVFTDSEYQLPYVLGSAHQGCLPPFPADVFMIPQYGYLTLNNGSQAVGRSSFYCLEYFPSQMLRTGNNFTFSYTFEEVPFHSSYAHSQSLDRLMNPLIDQYLYYLSRTQTTGGTANTQTLGFSQGGPNTMANQAKNWLPGPCYRQQRVSTTTGQNNNSNFAWTAGTKYHLNGRNSLANPGIAMATHKDDEERFFPSNGILIFGKQNAARDNADYSDVMLTSEEEIKTTNPVATEEYGIVADNLQQQNTAPQIGTVNSQGALPGMVWQNRDVYLQGPIWAKIPHTDGNFHPSPLMGGFGLKHPPPQILIKNTPVPADPPTTFNQSKLNSFITQYSTGQVSVEIEWELQKENSKRWNPEIQYTSNYYKSNNVEFAVNTEGVYSEPRPIGTRYLTRNL

SEQ ID NO: 337 - DNA, 2211 bp, Artificial Sequence
  Description of Artificial Sequence: Synthetic polynucleotide
atggctgccgatggttatcttccagattggctcgaggacaacctctctgagggcattcgcgagtggtgggacttgaaacctggagccccgaagcccaaagccaaccagcaaaagcaggacgacggccggggtctggtgcttcctggctacaagtacctcggacccttcaacggactcgacaagggggagcccgtcaacgcggcggacgcagcggccctcgagcacgacaaggcctacgaccagcagctcaaagcgggtgacaatccgtacctgcggtataaccacgccgacgccgagtttcaggagcgtctgcaagaagatacgtcttttgggggcaacctcgggcgagcagtcttccaggccaagaagcgggttctcgaacctctcggtctggttgaggaaggcgctaagacggctcctggaaagaaacgtccggtagagcagtcgccacaagagccagactcctcctcgggcatcggcaagacaggccagcagcccgctaaaaagagactcaattttggtcagactggcgactcagagtcagtccccgacccacaacctctcggagaacctccagcaacccccgctgctgtgggacctactacaatggcttcaggcggtggcgcaccaatggcagacaataacgaaggcgccgacggagtgggtaatgcctcaggaaattggcattgcgattccacatggctgggcgacagagtcatcaccaccagcacccgaacatgggccttgcccacctataacaaccacctctacaagcaaatctccagtgcttcaacgggggccagcaacgacaaccactacttcggctacagcaccccctgggggtattttgatttcaacagattccactgccatttctcaccacgtgactggcagcgactcatcaacaacaattggggattccggcccaagagactcaacttcaagctcttcaacatccaagtcaaggaggtcacgacgaatgatggcgtcacgaccatcgctaataaccttaccagcacggttcaagtcttctcggactcggagtaccagctgccgtacgttctcggctctgcccaccagggctgcctgcctccgttcccggcggacgtgttcatgattccccagtacggctacctaacactcaacaacggtagtcaggccgtgggacgctcctccttctactgcctggaatactttccttcgcagatgctgagaaccggcaacaacttccagtttacttacaccttcgaggacgtgcctttccacagcagctacgcccacagccagagcttggaccggctgatgaatcctctgattgaccagtacctgtactacttgtctcggactcaaacaacaggaggcacggcaaatacgcagactctgggcttcagccaaggtgggcctaatacaatggccaatcaggcaaagaactggctgccaggaccctgttaccgccaacaacgcgtctcaacgacaaccgggcaaaacaacaatagcaattttacctggactggtgcttcaaaatataacctcaatgggcgtgaatccatcatcaaccctggcactgctatggcctcacacaaagacgacgaagacaagttctttcccatgagcggtgtcatgatttttggaaaagagagcgccggagcttcaaacactgcattggacaatgtcatgattacagacgaagaggaaattaaagccactaaccctgtggccaccgaaagatttgggaccgtggcagtcaatttccagagcagcagcacagaccctgcgaccggagatgtgcatgctatgggagcattacctggcatggtgtggcaagatagagacgtgtacctgcagggtcccatttgggccaaaattcctcacacagatggacactttcacccgtctcctcttatgggcggctttggactcaagaacccgcctcctcagatcctcatcaaaaacacgcctgttcctgcgaatcctccggcggagttttcagctacaaagtttgcttcattcatcacccaatactccacaggacaagtgagtgtggaaattgaatgggagctgcagaaagaaaacagcaagcgctggaatcccgaagtgcagtacacatccaattatgcaaaatctgccaacgttgattttactgtggacaacaatggactttatactgagcctcgccccattggcacccgttacctcacccgtcccctgtaa

SEQ ID NO: 338 - protein, 736 aa, Artificial Sequence
  Description of Artificial Sequence: Synthetic polypeptide
MAADGYLPDWLEDNLSEGIREWWDLKPGAPKPKANQQKQDDGRGLVLPGYKYLGPFNGLDKGEPVNAADAAALEHDKAYDQQLKAGDNPYLRYNHADAEFQERLQEDTSFGGNLGRAVFQAKKRVLEPLGLVEEGAKTAPGKKRPVEQSPQEPDSSSGIGKTGQQPAKKRLNFGQTGDSESVPDPQPLGEPPATPAAVGPTTMASGGGAPMADNNEGADGVGNASGNWHCDSTWLGDRVITTSTRTWALPTYNNHLYKQISSASTGASNDNHYFGYSTPWGYFDFNRFHCHFSPRDWQRLINNNWGFRPKRLNFKLFNIQVKEVTTNDGVTTIANNLTSTVQVFSDSEYQLPYVLGSAHQGCLPPFPADVFMIPQYGYLTLNNGSQAVGRSSFYCLEYFPSQMLRTGNNFQFTYTFEDVPFHSSYAHSQSLDRLMNPLIDQYLYYLSRTQTTGGTANTQTLGFSQGGPNTMANQAKNWLPGPCYRQQRVSTTTGQNNNSNFTWTGASKYNLNGRESIINPGTAMASHKDDEDKFFPMSGVMIFGKESAGASNTALDNVMITDEEEIKATNPVATERFGTVAVNFQSSSTDPATGDVHAMGALPGMVWQDRDVYLQGPIWAKIPHTDGHFHPSPLMGGFGLKNPPPQILIKNTPVPANPPAEFSATKFASFITQYSTGQVSVEIEWELQKENSKRWNPEVQYTSNYAKSANVDFTVDNNGLYTEPRPIGTRYLTRPL

SEQ ID NO: 339 - DNA, 2211 bp, Artificial Sequence
  Description of Artificial Sequence: Synthetic polynucleotide
atggctgctgacggttatcttccagattggctcgaggacaacctttctgaaggcattcgagagtggtgggcgctgcaacctggagcccctaaacccaaggcaaatcaacaacatcaggacaacgctcggggtcttgtgcttccgggttacaaatacctcggacccggcaacggactcgacaagggggaacccgtcaacgcagcggacgcggcagccctcgagcacgacaaggcctacgaccagcagctcaaggccggtgacaacccctacctcaagtacaaccacgccgacgccgagttccaggagcggctcaaagaagatacgtcttttgggggcaacctcgggcgagcagtcttccaggccaaaaagaggcttcttgaacctcttggtctggttgaggaagcggctaagacggctcctggaaagaagaggcctgtagatcagtctcctcaggaaccggactcatcatctggtgttggcaaatcgggcaaacagcctgccagaaaaagactaaatttcggtcagactggcgactcagagtcagtcccagaccctcaacctctcggagaaccaccagcagcccccacaagtttgggatctaatacaatggcttcaggcggtggcgcaccaatggcagacaataacgagggtgccgatggagtgggtaattcctcaggaaattggcattgcgattcccaatggctgggcgacagagtcatcaccaccagcaccagaacctgggccctgcccacttacaacaaccatctctacaagcaaatctccagccaatcaggagcttcaaacgacaaccactactttggctacagcaccccttgggggtattttgactttaacagattccactgccacttctcaccacgtgactggcagcgactcattaacaacaactggggattccggcccaagaaactcagcttcaagctcttcaacatccaagttaaagaggtcacgcagaacgatggcacgacgactattgccaataaccttaccagcacggttcaagtgtttacggactcggagtatcagctcccgtacgtgctcgggtcggcgcaccaaggctgtctcccgccgtttccagcggacgtcttcatggtccctcagtatggatacctcaccctgaacaacggaagtcaagcggtgggacgctcatccttttactgcctggagtacttcccttcgcagatgctaaggactggaaataacttccaattcagctataccttcgaggatgtaccttttcacagcagctacgctcacagccagagtttggatcgcttgatgaatcctcttattgatcagtatctgtactacctgaacagaacgcaaggaacaacctctggaacaaccaaccaatcacggctgctttttagccaggctgggcctcagtctatgtctttgcaggccagaaattggctacctgggccctgctaccggcaacagagactttcaaagactgctaacgacaacaacaacagtaactttccttggacagcggccagcaaatatcatctcaatggccgcgactcgctggtgaatccaggaccagctatggccagtcacaaggacgatgaagaaaaatttttccctatgcacggcaatctaatatttggcaaagaagggacaacggcaagtaacgcagaattagataatgtaatgattacggatgaagaagagattcgtaccaccaatcctgtggcaacagagcagtatggaactgtggcaaataacttgcagagctcaaatacagctcccacgactagaactgtcaatgatcagggggccttacctggcatggtgtggcaagatcgtgacgtgtaccttcaaggacctatctgggcaaagattcctcacacggatggacactttcatccttctcctctgatgggaggctttggactgaaacatccgcctcctcaaatcatgatcaaaaatactccggtaccggcaaatcctccgacgactttcagcccggccaagtttgcttcatttatcactcagtactccactggacaggtcagcgtggaaattgagtgggagctacagaaagaaaacagcaaacgttggaatccagagattcagtacacttccaactacaacaagtctgttaatgtggactttactgtagacactaatggtgtttatagtgaacctcgccccattggcacccgttaccttacccgtcccctgtaa

SEQ ID NO: 340 - protein, 736 aa, Artificial Sequence
  Description of Artificial Sequence: Synthetic polypeptide
MAADGYLPDWLEDNLSEGIREWWALQPGAPKPKANQQHQDNARGLVLPGYKYLGPGNGLDKGEPVNAADAAALEHDKAYDQQLKAGDNPYLKYNHADAEFQERLKEDTSFGGNLGRAVFQAKKRLLEPLGLVEEAAKTAPGKKRPVDQSPQEPDSSSGVGKSGKQPARKRLNFGQTGDSESVPDPQPLGEPPAAPTSLGSNTMASGGGAPMADNNEGADGVGNSSGNWHCDSQWLGDRVITTSTRTWALPTYNNHLYKQISSQSGASNDNHYFGYSTPWGYFDFNRFHCHFSPRDWQRLINNNWGFRPKKLSFKLFNIQVKEVTQNDGTTTIANNLTSTVQVFTDSEYQLPYVLGSAHQGCLPPFPADVFMVPQYGYLTLNNGSQAVGRSSFYCLEYFPSQMLRTGNNFQFSYTFEDVPFHSSYAHSQSLDRLMNPLIDQYLYYLNRTQGTTSGTTNQSRLLFSQAGPQSMSLQARNWLPGPCYRQQRLSKTANDNNNSNFPWTAASKYHLNGRDSLVNPGPAMASHKDDEEKFFPMHGNLIFGKEGTTASNAELDNVMITDEEEIRTTNPVATEQYGTVANNLQSSNTAPTTRTVNDQGALPGMVWQDRDVYLQGPIWAKIPHTDGHFHPSPLMGGFGLKHPPPQIMIKNTPVPANPPTTFSPAKFASFITQYSTGQVSVEIEWELQKENSKRWNPEIQYTSNYNKSVNVDFTVDTNGVYSEPRPIGTRYLTRPL

SEQ ID NO: 341 - DNA, 2211 bp, Artificial Sequence
  Description of Artificial Sequence: Synthetic polynucleotide
atggctgccgatggttatcttccagattggctcgaggacaaccttagtgaaggaattcgcgagtggtgggctttgaaacctggagcccctcaacccaaggcaaatcaacaacatcaagacaacgctcgaggtcttgtgcttccgggttacaaataccttggacccggcaacggactcgacaagggggagccggtcaacgcagcagacgcggcggccctcgagcacgacaaggcctacgaccagcagctcaaggccggagacaacccgtacctcaagtacaaccacgccgacgccgagttccaggagcggctcaaagaagatacgtcttttgggggcaacctcgggcgagcagtcttccaggccaaaaagaggcttcttgaacctcttggtctggttgaggaagcggctaagacggctcctggaaagaagagaccggtagagccatcaccccagcgttctccagactcctctacgggcatcggcaagaaaggccaacagcccgctaaaaagagactcaattttggtcagactggcgactcagagtcagtccccgacccacaacctctcggagaacctccagcaacccccgctgctgtgggacctactacaatggcttcaggcggtggcgcaccaatggcagacaataacgagggtgccgatggagtgggtaattcctcaggaaattggcattgcgattcccaatggctgggcgacagagtcatcaccaccagcaccagaacctgggccctgcccacttacaacaaccatctctacaagcaaatctccagccaatcaggagcttcaaacgacaaccactactttggctacagcaccccttgggggtattttgactttaacagattccactgccacttttcaccacgtgactggcaaagactcatcaacaacaactggggattccgacccaagagactcaacttcaagctcttcaacatccaagtcaaggaggtcacgacgaatgatggcgtcacgaccatcgctaataaccttaccagcacggttcaagtcttctcggactcggagtaccagttgccgtacgtcctcggctctgcgcaccagggctgcctccctccgttcccggcggacgtgttcatgattccgcagtacggctacctaacgctcaacaatggcagccaagccgtgggacgttcatccttttactgcctggaatatttcccttctcagatgctgagaacgggcaacaactttaccttcagctacacttttgaggacgttcctttccacagcagctacgctcacagccagagtctggaccgtctcatgaatcctctcatcgaccagtacctgtattacttgagcagaacaaacactccaagtggaaccaccacgcagtcaaggcttcagttttctcaggccggagcgagtgacattcgggaccagtctaggaactggcttcctggaccctgttaccgccagcagcgcgtttctaaaacaaaaacagacaacaacaacagcaattttacctggactggtgcttcaaaatataaccttaatgggcgtgaatctataatcaaccctggcactgctatggcctcacacaaagacgacgaagacaagttctttcccatgagcggtgtcatgatttttggaaaagagagcgccggagcttcaaacactgcattggacaatgtcatgattacagacgaagaggaaattaaagccactaaccctgtggccaccgaaagatttgggaccgtggcagtcaatttccagagcagcagcacagaccctgcgaccggagatgtgcatgttatgggagccttacctggaatggtgtggcaagacagagacgtatacctgcagggtcctatttgggccaaaattcctcacacggatggacactttcacccgtctcctcttatgggcggctttggactcaagaacccgcctcctcagatcctcatcaaaaacacgcctgttcctgcgaatcctccggcggagttttcagctacaaagtttgcttcattcatcacccaatactccacaggacaagtgagtgtggaaattgaatgggagctgcagaaagaaaacagcaagcgctggaatcccgaagtgcagtacacatccaattatgcaaaatctgccaacgttgattttactgtggacaacaatggactttatactgagcctcgccccattggcacccgttaccttacccgtcccctgtaa

SEQ ID NO: 342 - protein, 736 aa, Artificial Sequence
  Description of Artificial Sequence: Synthetic polypeptide
MAADGYLPDWLEDNLSEGIREWWALKPGAPQPKANQQHQDNARGLVLPGYKYLGPGNGLDKGEPVNAADAAALEHDKAYDQQLKAGDNPYLKYNHADAEFQERLKEDTSFGGNLGRAVFQAKKRLLEPLGLVEEAAKTAPGKKRPVEPSPQRSPDSSTGIGKKGQQPAKKRLNFGQTGDSESVPDPQPLGEPPATPAAVGPTTMASGGGAPMADNNEGADGVGNSSGNWHCDSQWLGDRVITTSTRTWALPTYNNHLYKQISSQSGASNDNHYFGYSTPWGYFDFNRFHCHFSPRDWQRLINNNWGFRPKRLNFKLFNIQVKEVTTNDGVTTIANNLTSTVQVFSDSEYQLPYVLGSAHQGCLPPFPADVFMIPQYGYLTLNNGSQAVGRSSFYCLEYFPSQMLRTGNNFTFSYTFEDVPFHSSYAHSQSLDRLMNPLIDQYLYYLSRTNTPSGTTTQSRLQFSQAGASDIRDQSRNWLPGPCYRQQRVSKTKTDNNNSNFTWTGASKYNLNGRESIINPGTAMASHKDDEDKFFPMSGVMIFGKESAGASNTALDNVMITDEEEIKATNPVATERFGTVAVNFQSSSTDPATGDVHVMGALPGMVWQDRDVYLQGPIWAKIPHTDGHFHPSPLMGGFGLKNPPPQILIKNTPVPANPPAEFSATKFASFITQYSTGQVSVEIEWELQKENSKRWNPEVQYTSNYAKSANVDFTVDNNGLYTEPRPIGTRYLTRPL

SEQ ID NO: 343 - DNA, 2211 bp, Artificial Sequence
  Description of Artificial Sequence: Synthetic polynucleotide
atggctgccgatggttatcttccagattggctcgaggacaacctctctgagggcattcgcgagtggtgggacttgaaacctggagcccctaaacccaaggcaaatcaacaacatcaggacaacgctcgaggtcttgtgcttccgggttacaaataccttggacccggcaacggactcgacaagggggagccggtcaacgcagcagacgcggcggccctcgagcacgacaaggcctacgaccagcagctcaaggccggagacaacccgtacctcaagtacaaccacgccgacgccgagttccaggagcggctcaaagaagatacgtcttttgggggcaacctcgggcgagcagtcttccaggccaaaaagaggcttcttgaacctcttggtctggttgaggaagcggctaagacggctcctggaaagaagagaccggtagagccatcaccccagcgttctccagactcctctacgggcatcggcaagaaaggccaacagcccgctaaaaagagactcaattttggtcagactggcgactcagagtcagtccccgacccacaacctctcggagaacctccagcaacccccgctgctgtgggacctactacaatggcttcaggcggtggcgcaccaatggcagacaataacgagggtgccgatggagtgggtaattcctcaggaaattggcattgcgattcccaatggctgggcgacagagtcatcaccaccagcaccagaacctgggccctgcccacttacaacaaccatctctacaagcaaatctccagccaatcaggagcttcaaacgacaaccactactttggctacagcaccccttgggggtattttgactttaacagattccactgccacttttcaccacgtgactggcaaagactcatcaacaacaactggggattccgacccaagagactcaacttcaagctcttcaacatccaagtcaaggaggtcacgacgaatgatggcgtcacgaccatcgctaataaccttaccagcacggttcaagtcttctcggactcggagtaccagttgccgtacgtcctcggctctgcgcaccagggctgcctccctccgttcccggcggacgtgttcatgattccgcagtacggctacctaacgctcaacaatggcagccaagccgtgggacgttcatccttttactgcctggaatatttcccttctcagatgctgagaacgggcaacaactttaccttcagctacacttttgaggacgttcctttccacagcagctacgctcacagccagagtctggaccgtctcatgaatcccctcatcgaccagtacctgtattacttgagcagaacaaacactccaagtggaaccaccacgcagtcaaggcttcagttttctcaggccggagcgagtgacattcgggaccagtctaggaactggcttcctggaccctgttaccggcagcagcgcgtttctaaaacaaaaacagacaacaacaacagcaactttacctggactggtgcttcaaaatataaccttaatgggcgtgaatctataatcaaccctggcactgctatggcctcacacaaagacgacgaagacaagttctttcccatgagcggtgtcatgatttttggaaaggagagcgccggagcttcaaacactgcattggacaatgtcatgatcacagacgaagaggaaatcaaagccactaaccccgtggccaccgaaagatttgggactgtggcagtcaatctccagagcagcagcacagaccctgcgaccggagatgtgcatgttatgggagccttacctggaatggtgtggcaagacagagacgtgtacctgcagggtcctatttgggccaaaattcctcacacggatggacactttcacccgtctcctctcatgggcggctttggacttaagcacccgcctcctcagatcctcatcaaaaacacgcctgttcctgcgaatcctccggcagagttttcggctacaaagtttgcttcattcatcacccagtattccacaggacaagtgagtgtggaaattgaatgggagctgcagaaagaaaacagcaagcgctggaatcccgaagtgcagtacacatccaattatgcaaaatctgccaacgttgattttactgtggacaacaatggactttatactgagcctcgccccattggcacccgttacctcacccgtcccctgtaa

SEQ ID NO: 344 - protein, 736 aa, Artificial Sequence
  Description of Artificial Sequence: Synthetic polypeptide
MAADGYLPDWLEDNLSEGIREWWDLKPGAPKPKANQQHQDNARGLVLPGYKYLGPGNGLDKGEPVNAADAAALEHDKAYDQQLKAGDNPYLKYNHADAEFQERLKEDTSFGGNLGRAVFQAKKRLLEPLGLVEEAAKTAPGKKRPVEPSPQRSPDSSTGIGKKGQQPAKKRLNFGQTGDSESVPDPQPLGEPPATPAAVGPTTMASGGGAPMADNNEGADGVGNSSGNWHCDSQWLGDRVITTSTRTWALPTYNNHLYKQISSQSGASNDNHYFGYSTPWGYFDFNRFHCHFSPRDWQRLINNNWGFRPKRLNFKLFNIQVKEVTTNDGVTTIANNLTSTVQVFSDSEYQLPYVLGSAHQGCLPPFPADVFMIPQYGYLTLNNGSQAVGRSSFYCLEYFPSQMLRTGNNFTFSYTFEDVPFHSSYAHSQSLDRLMNPLIDQYLYYLSRTNTPSGTTTQSRLQFSQAGASDIRDQSRNWLPGPCYRQQRVSKTKTDNNNSNFTWTGASKYNLNGRESIINPGTAMASHKDDEDKFFPMSGVMIFGKESAGASNTALDNVMITDEEEIKATNPVATERFGTVAVNLQSSSTDPATGDVHVMGALPGMVWQDRDVYLQGPIWAKIPHTDGHFHPSPLMGGFGLKHPPPQILIKNTPVPANPPAEFSATKFASFITQYSTGQVSVEIEWELQKENSKRWNPEVQYTSNYAKSANVDFTVDNNGLYTEPRPIGTRYLTRPL

SEQ ID NO: 345 - DNA, 2214 bp, Artificial Sequence
  Description of Artificial Sequence: Synthetic polynucleotide
atggctgccgatggttatcttccagattggctcgaggacaaccttagtgaaggaattcgcgagtggtgggctttgaaacctggagcccctcaacccaaggcaaatcaacaacatcaagacaacgctcgaggtcttgtgcttccgggttacaaataccttggacccggcaacggactcgacaagggggagccggtcaacgcagcagacgcggcggccctcgagcacgacaaggcctacgaccagcagctgcaggcgggtgacaatccgtacctgcggtataaccacgccgacgccgagtttcaggagcgtctgcaagaagatacgtcttttgggggcaaccttggcagagcagtcttccaggccaaaaagaggatccttgagcctcttggtctggttgaggaagcagctaaaacggctcctggaaagaagaggcctgtagatcagtctcctcaggaaccggactcatcatctggtgttggcaaatcgggcaaacagcctgccagaaaaagactaaatttcggtcagactggcgactcagagtcagtcccagaccctcaacctctcggagaaccaccagcagcccccacaagtttgggatctaatacaatggcttcaggcggtggcgcaccaatggcagacaataacgagggtgccgatggggtgggtagttcctcgggaaattggcattgcgattcccaatgactgggggacagagtcatcaccaccagcacccgaacctgggccctgcccacctacaacaatcacctctacaagcaaatctccaacgggacatcgggaggagccaccaacgacaacacctacttcggctacagcaccccctgggggtattttgactttaacagattccactgccacttttcaccacgtgactggcagcgactcatcaacaacaactggggattccggcccaagagactcagcttcaagctcttcaacatccaggtcaaggaggtcacgcagaatgaaggcaccaagaccatcgccaataacctcaccagcaccatccaggtgtttacggactcggagtaccagctgccgtacgttctcggctctgcgcaccagggctgcctccctccgttcccggcggacgtgttcatgattccgcaatacggctacctgacgctcaacaatggcagccaagccgtgggacgttcatccttttactgcctggaatatttcccttctcagatgctgagaacgggcaacaactttaccttcagctacacctttgaggaagtgcctttccacagcagctacgcgcacagccagagcttggaccggctgatgaatcctctgattgaccagtacctgtactacttgtctcggactcaaacaacaggaggcacggcaaatacgcagactctgggcttcagccaaggtgggcctaatacaatggccaatcaggcaaagaactggctgccaggaccctgttaccgccaacaacgcgtctcaacgacaaccgggcaaaacaacaatagcaactttgcctggactgctgggaccaaataccatctgaatggaagaaattcattggctaatcctggcatcgctatggcaacacacaaagacgacgaggagcgtttttttcccagtaacgggatcctgatttttggcaaacaaaatgctgccagagacaatgcggattacagcgatgtcatgctcaccagcgaggaagaaatcaaaaccactaaccctgtggctacagaggaatacggtatcgtggcagataacttgcagcagcaaaacacggctcctcaaattggaactgtcaacagccagggggccttacccggtatggtctggcagaaccgggacgtgtacctgcagggtcccatctgggccaagattcctcacacggacggcaacttccacccgtctccgctgatgggcggctttggcctgaaacatcctccgcctcagatcctgatcaagaacacgcctgtacctgcggatcctccgaccaccttcaaccagtcaaagctgaactctttcatcacgcaatacagcaccggacaggtcagcgtggagatcgagtgggagctgcagaaggaaaacagcaagcgctggaacccggagatccagtacacttccaactattacaagtctaataatgttgaatttgctgttaatactgaaggtgtatatagtgaaccccgccccattggcaccagatacctgactcgtaatctgtaa

SEQ ID NO: 346 - protein, 736 aa, Artificial Sequence
  Description of Artificial Sequence: Synthetic polypeptide
MAADGYLPDWLEDNLSEGIREWWALKPGAPQPKANQQHQDNARGLVLPGYKYLGPGNGLDKGEPVNAADAAALEHDKAYDQQLQAGDNPYLRYNHADAEFQERLQEDTSFGGNLGRAVFQAKKRILEPLGLVEEAAKTAPGKKRPVDQSPQEPDSSSGVGKSGKQPARKRLNFGQTGDSESVPDPQPLGEPPAAPTSLGSNTMASGGGAPMADNNEGADGVGSSSGNWHCDSQLGDRVITTSTRTWALPTYNNHLYKQISNGTSGGATNDNTYFGYSTPWGYFDFNRFHCHFSPRDWQRLINNNWGFRPKRLSFKLFNIQVKEVTQNEGTKTIANNLTSTIQVFTDSEYQLPYVLGSAHQGCLPPFPADVFMIPQYGYLTLNNGSQAVGRSSFYCLEYFPSQMLRTGNNFTFSYTFEEVPFHSSYAHSQSLDRLMNPLIDQYLYYLSRTQTTGGTANTQTLGFSQGGPNTMANQAKNWLPGPCYRQQRVSTTTGQNNNSNFAWTAGTKYHLNGRNSLANPGIAMATHKDDEERFFPSNGILIFGKQNAARDNADYSDVMLTSEEEIKTTNPVATEEYGIVADNLQQQNTAPQIGTVNSQGALPGMVWQNRDVYLQGPIWAKIPHTDGNFHPSPLMGGFGLKHPPPQILIKNTPVPADPPTTFNQSKLNSFITQYSTGQVSVEIEWELQKENSKRWNPEIQYTSNYYKSNNVEFAVNTEGVYSEPRPIGTRYLTRNL

SEQ ID NO: 347 - DNA, 2214 bp, Artificial Sequence
  Description of Artificial Sequence: Synthetic polynucleotide
atggctgccgatggttatcttccagattggctcgaggacaaccttagtgaaggaattcgcgagtggtgggctttgaaacctggagcccctcaacccaaggcaaatcaacaacatcaagacaacgctcgaggtcttgtgcttccgggttacaaataccttggacccggcaacggactcgacaagggggagccggtcaacgcagcagacgcggcggccctcgagcacgacaaggcctacgaccagcagctgcaggcgggtgacaatccgtacctgcggtataaccacgccgacgccgagtttcaggagcgtctgcaagaagatacgtcttttgggggcaaccttggcagagcagtcttccaggccaaaaagaggatccttgagcctcttggtctggttgaggaagcagctaaaacggctcctggaaagaagaggcctgtagatcagtctcctcaggaaccggactcatcatctggtgttggcaaatcgggcaaacagcctgccagaaaaagactaaatttcggtcagactggcgactcagagtcagtcccagaccctcaacctctcggagaaccaccagcagcccccacaagtttgggatctaatacaatggcttcaggcggtggcgcaccaatggcagacaataacgagggtgccgatggggtgggtagttcctcgggaaattggcattgcgattcccaatggctgggggacagagtcatcaccaccagcacccgaacctgggccctgcccacctacaacaatcacctctacaagcaaatctccaacgggacatcgggaggagccaccaacgacaacacctacttcggctacagcaccccctgggggtattttgactttaacagattccactgccacttttcaccacgtgactggcagcgactcatcaacaacaactggggattccggcccaagagactcagcttcaagctcttcaacatccaggtcaaggaggtcacgcagaatgaaggcaccaagaccatcgccaataacctcaccagcaccatccaggtgtttacggactcggagtaccagctgccgtacgttctcggctctgcgcaccagggctgcctccctccgttcccggcggacgtgttcatgattccgcaatacggctacctgacgctcaacaatggcagccaagccgtgggacgttcatccttttactgcctggaatatttcccttctcagatgctgagaacgggcaacaactttaccttcagctacacctttgaggaagtgccttttcacagcagctacgcgcacagccagagcttggaccggctgatgaatcctctgattgaccagtacctgtactacttgtctcggactcaaacaacaggaggcacggcaaatacgcagactctgggcttcagccaaggtgggcctaatacaatggccaatcaggcaaagaactggctgccaggaccctgttaccgccaacaacgcgtctcaacgacaaccgggcaaaacaacaatagcaactttgcctggactgctgggaccaaataccatctgaatggaagaaattcattggctaatcctggcatcgctatggcaacacacaaagacgacgaggagcgtttttttcccagtaacgggatcctgatttttggcaaacaaaatgctgccagagacaatgcggattacagcgatgtcatgctcaccagcgaggaagaaatcaaaaccactaaccctgtggctacagaggaatacggtatcgtggcagataacttgcagcagcaaaacacggctcctcaaattggaactgtcaacagccagggggccttacccggtatggtctggcagaaccgggacgtgtacctgcagggtcccatctgggccaagattcctcacacggacggcaacttccacccgtctccgctgatgggcggctttggcctgaaacatcctccgcctcagatcctgatcaagaacacgcctgtacctgcggatcctccgaccaccttcaaccagtcaaagctgaactctttcatcacgcaatacagcaccggacaggtcagcgtggagatcgagtgggagctgcagaaggaaaacagcaagcgctggaacccggagatccagtacacttccaactattacaagtctaataatgttgaatttgctgttaatactgaaggtgtatatagtgaaccccgccccattggcaccagatacctgactcgtaatctgtaa

SEQ ID NO: 348 - protein, 737 aa, Artificial Sequence; identical to SEQ ID NO: 336
  Description of Artificial Sequence: Synthetic polypeptide

SEQ ID NO: 349 - DNA, 2211 bp, Artificial Sequence
  Description of Artificial Sequence: Synthetic polynucleotide
atggctgccgatggttatcttccagattggctcgaggacaacctctctgagggcattcgcgagtggtgggacttgaaacctggagcccctaaacccaaggcaaatcaacaacatcaggacaacgctcgaggtcttgtgcttccgggttacaaataccttggacccggcaacggactcgacaagggggagccggtcaacgcagcagacgcggcggccctcgagcacgacaaggcctacgaccagcagctcaaggccggagacaacccgtacctcaagtacaaccacgccgacgccgagttccaggagcggctcaaagaagatacgtcttttgggggcaacctcgggcgagcagtcttccaggccaaaaagaggcttcttgaacctcttggtctggttgaggaagcggctaagacggctcctggaaagaagagaccggtagagccatcaccccagcgttctccagactcctctacgggcatcggcaagaaaggccaacagcccgctaaaaagagactcaattttggtcagactggcgactcagagtcagtccccgacccacaacctctcggagaacctccagcaacccccgctgctgtgggacctactacaatggcttcaggcggtggcgcaccaatggcagacaataacgagggtgccgatggagtgggtaattcctcaggaaattggcattgcgattcccaatggctgggcgacagagtcatcaccaccagcaccagaacctgggccctgcccacttacaacaaccatctctacaagcaaatctccagccaatcaggagcttcaaacgacaaccactactttggctacagcaccccttgggggtattttgactttaacagattccactgccacttttcaccacgtgactggcaaagactcatcaacaacaactggggattccgacccaagagactcaacttcaagctcttcaacatccaagtcaaggaggtcacgacgaatgatggcgtcacgaccatcgctaataaccttaccagcacggttcaagtcttctcggactcggagtaccagttgccgtacgtcctcggctctgcgcaccagggctgcctccctccgttcccggcggacgtgttcatgattccgcagtacggctacctaacgctcaacaatggcagccaagccgtgggacgttcatccttttactgcctggaatatttcccttctcagatgctgagaacgggcaacaactttaccttcagctacacttttgaggacgttcctttccacagcagctacgctcacagccagagtctggaccgtctcatgaatcctctcatcgaccagtacctgtattacttgagcagaacaaacactccaagtggaaccaccacgcagtcaaggcttcagttttctcaggccggagcgagtgacattcgggaccagtctaggaactggcttcctggaccctgttaccgccagcagcgcgtttctaaaacaaaaacagacaacaacaacagcaattttacctggactggtgcttcaaaatataaccttaatgggcgtgaatctataatcaaccctggcactgctatggcctcacacaaagacgacgaagacaagttctttcccatgagcggtgtcatgatttttggaaaagagagcgccggagcttcaaacactgcattggacaatgtcatgattacagacgaagaggaaattaaagccactaaccctgtggccaccgaaagatttgggaccgtggcagtcaatttccagagcagcagcacagaccctgcgaccggagatgtgcatgctatgggagcattacctggcatggtgtggcaagatagagacgtgtacctgcagggtcccatttgggccaaaattcctcacacagatggacactttcacccgtctcctcttatgggcggctttggactcaagaacccgcctcctcagatcctcatcaaaaacacgcctgttcctgcgaatcctccggcggagttttcagctacaaagtttgcttcattcatcacccaatactccacaggacaagtgagtgtggaaattgaatgggagctgcagaaagaaaacagcaagcgctggaatcccgaagtgcagtacacatccaattatgcaaaatctgccaacgttgattttactgtggacaacaatggactttatactgagcctcgccccattggcacccgttaccttacccgtcccctgtaa

SEQ ID NO: 350 - protein, 736 aa, Artificial Sequence
  Description of Artificial Sequence: Synthetic polypeptide
MAADGYLPDWLEDNLSEGIREWWDLKPGAPKPKANQQHQDNARGLVLPGYKYLGPGNGLDKGEPVNAADAAALEHDKAYDQQLKAGDNPYLKYNHADAEFQERLKEDTSFGGNLGRAVFQAKKRLLEPLGLVEEAAKTAPGKKRPVEPSPQRSPDSSTGIGKKGQQPAKKRLNFGQTGDSESVPDPQPLGEPPATPAAVGPTTMASGGGAPMADNNEGADGVGNSSGNWHCDSQWLGDRVITTSTRTWALPTYNNHLYKQISSQSGASNDNHYFGYSTPWGYFDFNRFHCHFSPRDWQRLINNNWGFRPKRLNFKLFNIQVKEVTTNDGVTTIANNLTSTVQVFSDSEYQLPYVLGSAHQGCLPPFPADVFMIPQYGYLTLNNGSQAVGRSSFYCLEYFPSQMLRTGNNFTFSYTFEDVPFHSSYAHSQSLDRLMNPLIDQYLYYLSRTNTPSGTTTQSRLQFSQAGASDIRDQSRNWLPGPCYRQQRVSKTKTDNNNSNFTWTGASKYNLNGRESIINPGTAMASHKDDEDKFFPMSGVMIFGKESAGASNTALDNVMITDEEEIKATNPVATERFGTVAVNFQSSSTDPATGDVHAMGALPGMVWQDRDVYLQGPIWAKIPHTDGHFHPSPLMGGFGLKNPPPQILIKNTPVPANPPAEFSATKFASFITQYSTGQVSVEIEWELQKENSKRWNPEVQYTSNYAKSANVDFTVDNNGLYTEPRPIGTRYLTRPL

SEQ ID NO: 351 - DNA, 2211 bp, Artificial Sequence
  Description of Artificial Sequence: Synthetic polynucleotide
atggctgccgatggttatcttccagattggctcgaggacaaccttagtgaaggaattcgcgagtggtgggcgctgaaacctggagccccgaagcccaaagccaaccagcaaaagcaggacgacggccggggtctggtgcttccgggttacaaatacctcggacccggtaacggactcgacaaaggagagccggtcaacgaggcggacgcggcagccctcgagcacgacaaggcctacgaccagcagctcaaagcgggtgacaatccgtacctgcggtataaccacgccgacgccgagtttcaggagcgtctgcaagaagatacgtcttttgggggcaacctcgggcgagcagtcttccaggccaagaagcgggttctcgaacctctcggtctggttgaggaaggcgctaagacggctcccggaaagaaacgtccggtagagcagtcgccacaagagccagactcctctacgggcatcggcaagaaaggccaacagcccgccagaaaaagactcaatttcggtcagactggcgactcagagtcagttccagaccctcaacctctcggagaacctccagcagcgccctctggtgtgggacctactacaatggcttcaggcggtggcgcaccaatggcagacaataacgaaggcgccgacggagtgggtaatgcctcaggaaattggcattgcgattccacatggctgggcgacagagtcatcaccaccagcacccgaacatgggccttgcccacctataacaaccacctctacaagcaaatctccagtgcttcaacgggggccagcaacgacaacacctacttcggctacagcaccccctgggggtattttgatttcaacagattccactgccatttctcaccacgtgactggcagcgactcatcaacaacaattggggattccggcccaagagactcaacttcaaactcttcaacatccaagtcaaggaggtcacgacgaatgatggcgtcacgaccatcgctaataaccttaccagcacggttcaagtcttctcggactcggagtaccagttgccgtacgtcctcggctctgcgcaccagggctgcctccctccgttcccggcggacgtgttcatgattccgcagtacggctacctaacgctcaacaatggcagccaggcagtgggacggtcatccttttactgcctggaatatttcccatcgcagatgctgagaacgggcaataactttaccttcagctacaccttcgaggacgtgcctttccacagcagctacgcgcacagccagagcctggaccggctgatgaatcctctcatcgaccagtacctgtattacctgaacagaactcagaatcagtccggaagtgcccaaaacaaggacttgctgtttagccgggggtctccagctggcatgtctgttcagcccaaaaactggctacctggaccctgttatcggcagcagcgcgtttctaaaacaaaaacagacaacaacaacagcaattttacctggactggtgcttcaaaatataacctcaatgggcgtgaatccatcatcaaccctggcactgctatggcctcacacaaagacgacgaagacaagttctttcccatgagcggtgtcatgatttttggaaaagagagcgccggagcttcaaacactgcattggacaatgtcatgattacagacgaagaggaaattaaagccactaaccctgtggccaccgaaagatttgggaccgtggcagtcaatttccagagcagcagcacagaccctgcgaccggagatgtgcatgttatgggagccttacctggaatggtgtggcaagacagagacgtatacctgcagggtcctatttgggccaaaattcctcacacagatggacactttcacccgtctcctcttatgggcggctttggactcaagaacccgcctcctcagatcctcatcaaaaacacgcctgttcctgcgaatcctccggcagagttttcggctacaaagtttgcttcattcatcacccagtattccacaggacaagtgagcgtggagattgaatgggagctgcagaaagaaaacagcaaacgctggaatcccgaagtgcagtatacatctaactatgcaaaatctgccaacgttgatttcactgtggacaacaatggactttatactgagcctcgccccattggcacccgttacctcacccgtcccctgtaa

SEQ ID NO: 352 - protein, 736 aa, Artificial Sequence
  Description of Artificial Sequence: Synthetic polypeptide
MAADGYLPDWLEDNLSEGIREWWALKPGAPKPKANQQKQDDGRGLVLPGYKYLGPGNGLDKGEPVNEADAAALEHDKAYDQQLKAGDNPYLRYNHADAEFQERLQEDTSFGGNLGRAVFQAKKRVLEPLGLVEEGAKTAPGKKRPVEQSPQEPDSSTGIGKKGQQPARKRLNFGQTGDSESVPDPQPLGEPPAAPSGVGPTTMASGGGAPMADNNEGADGVGNASGNWHCDSTWLGDRVITTSTRTWALPTYNNHLYKQISSASTGASNDNTYFGYSTPWGYFDFNRFHCHFSPRDWQRLINNNWGFRPKRLNFKLFNIQVKEVTTNDGVTTIANNLTSTVQVFSDSEYQLPYVLGSAHQGCLPPFPADVFMIPQYGYLTLNNGSQAVGRSSFYCLEYFPSQMLRTGNNFTFSYTFEDVPFHSSYAHSQSLDRLMNPLIDQYLYYLNRTQNQSGSAQNKDLLFSRGSPAGMSVQPKNWLPGPCYRQQRVSKTKTDNNNSNFTWTGASKYNLNGRESIINPGTAMASHKDDEDKFFPMSGVMIFGKESAGASNTALDNVMITDEEEIKATNPVATERFGTVAVNFQSSSTDPATGDVHVMGALPGMVWQDRDVYLQGPIWAKIPHTDGHFHPSPLMGGFGLKNPPPQILIKNTPVPANPPAEFSATKFASFITQYSTGQVSVEIEWELQKENSKRWNPEVQYTSNYAKSANVDFTVDNNGLYTEPRPIGTRYLTRPL

SEQ ID NO: 353 - DNA, 2205 bp, Artificial Sequence
  Description of Artificial Sequence: Synthetic polynucleotide
atggctgctgacggttatcttccagattggctcgaggacaacctttctgaaggcattcgtgagtggtgggctctgaaacctggagtccctcaacccaaagcgaaccaacaacaccaggacaaccgtcggggtcttgtgcttccgggttacaaatacctcggacccggtaacggactcgacaaaggagagccggtcaacgaggcggacgcggcagccctcgaacacgacaaggcctacgaccagcagctcaaggccggagacaacccgtacctcaagtacaaccacgccgacgccgagttccaggagcggctcaaagaagatacgtcttttgggggcaacctcgggcgagcagtcttccaggccaaaaagaggcttcttgaacctcttggtctggttgaggaagcggctaagacggctcctggaaagaagaggcctgtagagcagtctcctcaggaaccggactcctccgcgggtattggcaaatcgggtgcacagcccgctaaaaagagactcaatttcggtcagactggcgacacagagtcagtcccagaccctcaaccaatcggagaacctcccgcagccccctcaggtgtgggatctcttacaatggcttcaggtggtggcgcaccagtggcagacaataacgaaggtgccgatggagtgggtagttcctcgggaaattggcattgcgattcccaatggctgggggacagagtcatcaccaccagcacccgaacctgggccctgcccacctacaacaaccacctctacaaacaaatttccagccaatcaggagcctcgaacgacaatcactactttggctacagcaccccttgggggtattttgacttcaacagattccactgccacttttcaccacgtgactggcagcgactcatcaacaacaactggggattccggcccaagagactcagcttcaagctcttcaacatccaggtcaaagaggttacggacaacaatggagtcaagaccatcgccaataaccttaccagcacggtccaggtcttcacggactcagactatcagctcccgtacgtgctcgggtcggctcacgagggctgcctcccgccgttcccagcggacgttttcatgattcctcagtacgggtatctgacgcttaatgatggaagccaggccgtgggtcgttcgtccttttactgcctggaatatttcccgtcgcaaatgctaagaacgggtaacaacttccagttcagctacgagtttgagaacgtacctttccatagcagctacgctcacagccaaagcctggaccgactaatgaatccactcatcgaccaatacttgtactatctctcaaagactattaacggttctggacagaatcaacaaacgctaaaattcagtgtggccggacccagcaacatggctgtccagggaagaaactacatacctggacccagctaccgacaacaacgtgtctcaaccactgtgactcaaaacaacaacagcgaatttgcttggcctggagcttcttcttgggctctcaatggacgtaatagcttgatgaatcctggacctgctatggccagccacaaagaaggagaggaccgtttctttcctttgtctggatctttaatttttggcaaacaaggaactggaagagacaacgtggatgcggacaaagtcatgataaccaacgaagaagaaattaaaactactaacccggtagcaacggagtcctatggacaagtggccacaaaccaccagagtgcccaagcacaggcgcagaccggctgggttcaaaaccaaggaatacttccgggtatggtttggcaggacagagatgtgtacctgcaaggacccatctgggccaagattcctcacacggacggcaacttccacccgtctccgctgatgggcggctttggcctgaaacatcctccgcctcagatcctgatcaagaacacgcctgtacctgcggatcctccgaccaccttcaaccagtcaaagctgaactctttcatcacgcaatacagcaccggacaggtcagcgtggaaattgaatgggagctgcagaaggaaaacagcaagcgctggaatcccgaagtgcagtatacatctaactatgcaaaatctgccaacgttgatttcactgtggacaacaatggactttatactgagcctcgccccattggcacccgttacctcacccgtcccctgtaa

SEQ ID NO: 354 - protein, 734 aa, Artificial Sequence
  Description of Artificial Sequence: Synthetic polypeptide
MAADGYLPDWLEDNLSEGIREWWALKPGVPQPKANQQHQDNRRGLVLPGYKYLGPGNGLDKGEPVNEADAAALEHDKAYDQQLKAGDNPYLKYNHADAEFQERLKEDTSFGGNLGRAVFQAKKRLLEPLGLVEEAAKTAPGKKRPVEQSPQEPDSSAGIGKSGAQPAKKRLNFGQTGDTESVPDPQPIGEPPAAPSGVGSLTMASGGGAPVADNNEGADGVGSSSGNWHCDSQWLGDRVITTSTRTWALPTYNNHLYKQISSQSGASNDNHYFGYSTPWGYFDFNRFHCHFSPRDWQRLINNNWGFRPKRLSFKLFNIQVKEVTDNNGVKTIANNLTSTVQVFTDSDYQLPYVLGSAHEGCLPPFPADVFMIPQYGYLTLNDGSQAVGRSSFYCLEYFPSQMLRTGNNFQFSYEFENVPFHSSYAHSQSLDRLMNPLIDQYLYYLSKTINGSGQNQQTLKFSVAGPSNMAVQGRNYIPGPSYRQQRVSTTVTQNNNSEFAWPGASSWALNGRNSLMNPGPAMASHKEGEDRFFPLSGSLIFGKQGTGRDNVDADKVMITNEEEIKTTNPVATESYGQVATNHQSAQAQAQTGWVQNQGILPGMVWQDRDVYLQGPIWAKIPHTDGNFHPSPLMGGFGLKHPPPQILIKNTPVPADPPTTFNQSKLNSFITQYSTGQVSVEIEWELQKENSKRWNPEVQYTSNYAKSANVDFTVDNNGLYTEPRPIGTRYLTRPL

SEQ ID NO: 355 - DNA, 2211 bp, Artificial Sequence
  Description of Artificial Sequence: Synthetic polynucleotide
atggctgccgatggttatcttccagattggctcgaggacaacctctctgagggcattcgcgagtggtgggcgctgaaacctggagccccgaagcccaaagccaaccagcaaaagcaggacgacggccggggtctggtgcttcctggctacaagtacctcggacccttcaacggactcgacaagggggagcccgtcaacgcggcggacgcagcggccctcgagcacgacaaggcctacgaccagcagctgcaggcgggtgacaatccgtacctgcggtataaccacgccgacgccgagtttcaggagcgtctgcaagaagatacgtcttttgggggcaacctcgggcgagcagtcttccaggccaagaagtgggttctcgaacctctcggtctggttgaggaaggcgctaagacggctcctggaaagaaacgtccggtagagcagtcgccacaagagccagactcctcctcgggcatcggcaagacaggccagcagcccgctaaaaagagactcaattttggtcagactggcgactcagagtcagtccccgacccacaacctctcggagaacctccagcaacccccgctgctgtgggacctactacaatggcttcaggcggtggcgcaccaatggcagacaataacgaaggcgccgacggagtgggtaatgcctcaggaaattggcattgcgattccacatggctgggcgacagagtcatcaccaccagcacccgcacctgggccttgcccacctacaataaccacctctacaagcaaatctccagtgcttcaacgggggccagcaacgacaaccactacttcggctacagcaccccctgggggtattttgatttcaacagattccactgccatttctcaccacgtgactggcagcgactcatcaacaacaattggggattccggcccaagagactcaacttcaagctcttcaacatccaagtcaaggaggtcacgacgaatgatggcgtcacaaccatcgctaataaccttaccagcacggttcaagtcttctcggactcggagtaccagcttccgtacgtcctcggctctgcgcaccagggctgcctccctccgttcccggcggacgtgttcatgattccgcaatacggctacctgacgctcaacaatggcagccaagccgtgggacgttcatccttttactgcctggaatatttcccttctcagatgctgagaacgggcaacaactttaccttcagctacacctttgaggaagtgcctttccacagcagctacgcgcacagccagagcctggaccggctgatgaatcctctcatcgaccaatacctgtattacctgaacagaactcaaaatcagtccggaagtgcccaaaacaaggacttgctgtttagccgtgggtctccagctggcatgtctgttcagcccaaaaactggctacctggaccctgttatcggcagcagcgcgtttctaaaacaaaaacagacaacaacaacagcaattttacctggactggtgcttcaaaatataacctcaatgggcgtgaatccatcatcaaccctggcactgctatggcctcacacaaagacgacgaagacaagttctttcccatgagcggtgtcatgatttttggaaaggagagcgccggagcttcaaacactgcattggacaatgtcatgatcaccgacgaagaggaaatcaaagccactaaccccgtggccaccgaaagatttgggactgtggcagtcaatctccagagcagcagcacagaccctgcgaccggagatgtgcatgttatgggagccttacctggcatggtgtggcaagatagagacgtgtacctgcagggtcccatttgggccaaaattcctcacacagatggacactttcacccgtctcctcttatgggcggctttggactcaagaacccgcctcctcagatcctcatcaaaaacacgcctgttcctgcgaatcctccggcggagttttcagctacaaagtttgcttcattcatcacccaatactccacaggacaagtgagtgtggaaattgaatgggagctgcagaaagaaaacagcaagcgctggaatcccgaagtgcagtacacatccaattatgcaaaatctgccaacgttgattttactgtggacaacaatggactttatactgagcctcgccccattggcacccgttacctcacccgtcccctgtaa

SEQ ID NO: 356 - protein, 736 aa, Artificial Sequence
  Description of Artificial Sequence: Synthetic polypeptide
MAADGYLPDWLEDNLSEGIREWWALKPGAPKPKANQQKQDDGRGLVLPGYKYLGPFNGLDKGEPVNAADAAALEHDKAYDQQLQAGDNPYLRYNHADAEFQERLQEDTSFGGNLGRAVFQAKKWVLEPLGLVEEGAKTAPGKKRPVEQSPQEPDSSSGIGKTGQQPAKKRLNFGQTGDSESVPDPQPLGEPPATPAAVGPTTMASGGGAPMADNNEGADGVGNASGNWHCDSTWLGDRVITTSTRTWALPTYNNHLYKQISSASTGASNDNHYFGYSTPWGYFDFNRFHCHFSPRDWQRLINNNWGFRPKRLNFKLFNIQVKEVTTNDGVTTIANNLTSTVQVFSDSEYQLPYVLGSAHQGCLPPFPADVFMIPQYGYLTLNNGSQAVGRSSFYCLEYFPSQMLRTGNNFTFSYTFEEVPFHSSYAHSQSLDRLMNPLIDQYLYYLNRTQNQSGSAQNKDLLFSRGSPAGMSVQPKNWLPGPCYRQQRVSKTKTDNNNSNFTWTGASKYNLNGRESIINPGTAMASHKDDEDKFFPMSGVMIFGKESAGASNTALDNVMITDEEEIKATNPVATERFGTVAVNLQSSSTDPATGDVHVMGALPGMVWQDRDVYLQGPIWAKIPHTDGHFHPSPLMGGFGLKNPPPQILIKNTPVPANPPAEFSATKFASFITQYSTGQVSVEIEWELQKENSKRWNPEVQYTSNYAKSANVDFTVDNNGLYTEPRPIGTRYLTRPL

SEQ ID NO: 357 - DNA, 2214 bp, Artificial Sequence
  Description of Artificial Sequence: Synthetic polynucleotide
atggctgccgatggttatcttccagattggctcgaggacaaccttagtgaaggaattcgcgagtggtgggctttgaaacctggagcccctcaacccaaggcaaatcaacaacatcaagacaacgctcgaggtcttgtgcttccgggttacaaataccttggacccggcaacggactcgacaagggggagccggtcaacgcagcagacgcggcggccctcgagcacgacaaggcctacgaccagcagctgcaggcgggtgacaatccgtacctgcggtataaccacgccgacgccgagtttcaggagcgtctgcaagaagatacgtcttttgggggcaaccttggcagagcagtcttccaggccaaaaagaggatccttgagcctcttggtctggttgaggaagcagctaaaacggctcctggaaagaagaggcctgtagatcagtctcctcaggaaccggactcatcatctggtgttggcaaatcgggcaaacagcctgccagaaaaagactaaatttcggtcagactggcgactcagagtcagtcccagaccctcaacctctcggagaaccaccagcagcccccacaagtttgggatctaatacaatggcttcaggcggtggcgcaccaatggcagacaataacgagggtgccgatggggtgggtagttcctcgggaaattggcattgcgattcccaatggctgggggacagagtcatcaccaccagcacccgaacctgggccctgcccacctacaacaatcacctctacaagcaaatctccaacgggacatcgggaggagccaccaacgacaacacctacttcggctacagcaccccctgggggtattttgactttaacagattccactgccacttttcaccacgtgactggcagcgactcatcaacaacaactggggattccggcccaagagactcagcttcaagctcttcaacatccaggtcaaggaggtcacgcagaatgaaggcaccaagaccatcgccaataacctcaccagcaccatccaggtgtttacggactcggagtaccagctgccgtacgttctcggctcggcgcaccagggctgcctccctccgttcccggcggacgtcttcatggtgccacagtatggatacctgacgctcaacaatggcagccaagccgtgggacgttcatccttttactgcctggaatatttcccttctcagatgctgagaacgggcaacaactttaccttcagctacacctttgaggaagtgcctttccacagcagctacgcgcacagccagagcttggaccggctgatgaatcctctgattgaccagtacctgtactacttgtctcggactcaaacaacaggaggcacggcaaatacgcagactctgggcttcagccaaggtgggcctaatacaatggccaatcaggcaaagaactggctgccaggaccctgttaccgccaacaacgcgtctcaacgacaaccgggcaaaacaacaatagcaactttgcctggactgctgggaccaaataccatctgaatggaagaaattcattggctaatcctggcatcgctatggcaacacacaaagacgacgaggagcgtttttttcccagtaacgggatcctgatttttggcaaacaaaatgctgccagagacaatgcggattacagcgatgtcatgctcaccagcgaggaagaaatcaaaaccactaaccctgtggctacagaggaatacggtatcgtggcagataacttgcagcagcaaaacacggctcctcaaattggaactgtcaacagccagggggacttacccggtatggtctggcagaaccgggacgtgtacctgcagggtcccatctgggccaagattcctcacacggacggcaacttccacccgtctccgctgatgggcggctttggcctgaaacatcctccgcctcagatcctgatcaagaacacgcctgtacctgcggatcctccgaccaccttcaaccagtcaaagctgaactctttcatcacgcaatacagcaccggacaggtcagcgtggagatcgagtgggagctgcagaaggaaaacagcaagcgctggaacccggagatccagtacacttccaactattacaagtctaataatgttgaatttgctgttaatactgaaggtgtatatagtgaaccccgccccattggcaccagatacctgactcgtaatctgtaa

SEQ ID NO: 358 - protein, 737 aa, Artificial Sequence
  Description of Artificial Sequence: Synthetic polypeptide
MAADGYLPDWLEDNLSEGIREWWALKPGAPQPKANQQHQDNARGLVLPGYKYLGPGNGLDKGEPVNAADAAALEHDKAYDQQLQAGDNPYLRYNHADAEFQERLQEDTSFGGNLGRAVFQAKKRILEPLGLVEEAAKTAPGKKRPVDQSPQEPDSSSGVGKSGKQPARKRLNFGQTGDSESVPDPQPLGEPPAAPTSLGSNTMASGGGAPMADNNEGADGVGSSSGNWHCDSQWLGDRVITTSTRTWALPTYNNHLYKQISNGTSGGATNDNTYFGYSTPWGYFDFNRFHCHFSPRDWQRLINNNWGFRPKRLSFKLFNIQVKEVTQNEGTKTIANNLTSTIQVFTDSEYQLPYVLGSAHQGCLPPFPADVFMVPQYGYLTLNNGSQAVGRSSFYCLEYFPSQMLRTGNNFTFSYTFEEVPFHSSYAHSQSLDRLMNPLIDQYLYYLSRTQTTGGTANTQTLGFSQGGPNTMANQAKNWLPGPCYRQQRVSTTTGQNNNSNFAWTAGTKYHLNGRNSLANPGIAMATHKDDEERFFPSNGILIFGKQNAARDNADYSDVMLTSEEEIKTTNPVATEEYGIVADNLQQQNTAPQIGTVNSQGDLPGMVWQNRDVYLQGPIWAKIPHTDGNFHPSPLMGGFGLKHPPPQILIKNTPVPADPPTTFNQSKLNSFITQYSTGQVSVEIEWELQKENSKRWNPEIQYTSNYYKSNNVEFAVNTEGVYSEPRPIGTRYLTRNL

SEQ ID NO: 359 - DNA, 2205 bp, Artificial Sequence
  Description of Artificial Sequence: Synthetic polynucleotide
atggctgctgacggttatcttccagattggctcgaggacaacctttctgaaggcattcgtgagtggtgggctctgaaacctggagtccctcaacccaaagcgaaccaacaacaccaggacaactgtcggggtcttgtgcttccgggttacaaatacctcggacccggtaacggactcgacaaaggagagccggtcaacgaggcggacgcggcagccctcgaacacgacaaggcctacgaccagcagctcaaggccggagacaacccgtacctcaagtacaaccacgccgacgccgagttccaggagcggctcaaagaagatacgtcttttgggggcaacctcgggcgagcagtcttccagaccaaaaagaggcttcttgaacctcttggtctggttgaggaagcggctaagacggctcctggaaagaagaggcctgtagagcagtctcctcaggaaccggactcctccgcgggtattggcaaatcgggtgcacagcccgctaaaaagagactcaatttcggtcagactggcgacacagagtcagtcccagaccctcaaccaatcggagaacctcccgcagccccctcaggtgtgggatctcttacaatggcttcaggtggtggcgcaccagtggcagacaataacgaaggtgccgatggagtgggtagttcctcgggaaattggcattgcgattcccaatggctgggggacagagtcatcaccaccagcacccgaacctgggccctgcccacctacaacaaccacctctacaaacaaatttccagccaatcaggagcctcgaacgacaatcactactttggctacagcaccccttgggggtattttgacttcaacagattccactgccacttttcaccacgtgactggcagcgactcatcaacaacaactggggattccggcccaagagactcagcttcaagctcttcaacatccaggtcaaagaggttacggacaacaatggagtcaagaccatcgccaataaccttaccagcacggtccaggtcttcacggactcagactatcagctcccgtacgtgctcgggtcggctcacgagggctgcctcccgccgttcccagcggacgttttcatgattcctcagtacgggtatctgacgcttaatgatggaagccaggccgtgggtcgttcgtccttttactgcctggaatatttcccgtcgcaaatgctaagaacgggtaacaacttccagttcagctacgagtttgagaacgtacctttccatagcagctacgctcacagccaaagcctggaccgactaatgaatccactcatcgaccaatacttgtactatctctcaaagactattaacggttctggacagaatcaacaaacgctaaaattcagtgtggccggacccagcaacatggctgtccagggaagaaactacatacctggacccagctaccgacaacaacgtgtctcaaccactgtgactcaaaacaacaacagcgaatttgcttggcctggagcttcttcttgggctctcaatggacgtaatagcttgatgaatcctggacctgctatggccagccacaaagaaggagaggaccgtttctttcctttgtctggatctttaatttttggcaaacaaggaactggaagagacaacgtggatgcggacaaagtcatgataaccaacgaagaagaaattaaaactactaacccggtagcaacggagtcctatggacaagtggccacaaaccaccagagtgcccaagcacaggcgcagaccggctgggttcaaaaccaaggaatacttccgggtatggtttggcaggacagagatgtgtacctgcaaggacccatctgggccaagattcctcacacggacggcaacttccacccgtctccgctgatgggcggctttggcctgaaacatcctccgcctcagatcctgatcaagaacacgcctgttcctgcgaatcctccggcggagttttcagctacaaagtttgcttcattcatcacccagtactccacaggacaagtgagtgtggaaattgaatgggagctgcagaaagaaaacagcaagcgctggaatcccgaagtgcagtacacatccaattatgcaaaatctgccaacgttgattttactgtggacaacaatggactttatactgagcctcgccccattggcacccgttaccttaccaaacctctgtaa

SEQ ID NO: 360 - protein, 734 aa, Artificial Sequence
  Description of Artificial Sequence: Synthetic polypeptide
MAADGYLPDWLEDNLSEGIREWWALKPGVPQPKANQQHQDNCRGLVLPGYKYLGPGNGLDKGEPVNEADAAALEHDKAYDQQLKAGDNPYLKYNHADAEFQERLKEDTSFGGNLGRAVFQTKKRLLEPLGLVEEAAKTAPGKKRPVEQSPQEPDSSAGIGKSGAQPAKKRLNFGQTGDTESVPDPQPIGEPPAAPSGVGSLTMASGGGAPVADNNEGADGVGSSSGNWHCDSQWLGDRVITTSTRTWALPTYNNHLYKQISSQSGASNDNHYFGYSTPWGYFDFNRFHCHFSPRDWQRLINNNWGFRPKRLSFKLFNIQVKEVTDNNGVKTIANNLTSTVQVFTDSDYQLPYVLGSAHEGCLPPFPADVFMIPQYGYLTLNDGSQAVGRSSFYCLEYFPSQMLRTGNNFQFSYEFENVPFHSSYAHSQSLDRLMNPLIDQYLYYLSKTINGSGQNQQTLKFSVAGPSNMAVQGRNYIPGPSYRQQRVSTTVTQNNNSEFAWPGASSWALNGRNSLMNPGPAMASHKEGEDRFFPLSGSLIFGKQGTGRDNVDADKVMITNEEEIKTTNPVATESYGQVATNHQSAQAQAQTGWVQNQGILPGMVWQDRDVYLQGPIWAKIPHTDGNFHPSPLMGGFGLKHPPPQILIKNTPVPANPPAEFSATKFASFITQYSTGQVSVEIEWELQKENSKRWNPEVQYTSNYAKSANVDFTVDNNGLYTEPRPIGTRYLTKPL

SEQ ID NO: 361 - DNA, 2211 bp, Artificial Sequence
  Description of Artificial Sequence: Synthetic polynucleotide
atggctgccgatggttatcttccagattggctcgaggacaacctctctgagggcattcgcgagtggtgggacttgaaacctggagcccctaaacccaaggcaaatcaacaacatcaggacaacgctcgaggtcttgtgcttccgggttacaaataccttggacccggcaacggactcgacaagggggagccggtcaacgcagcagacgcggcggccctcgagcacgacaaggcctacgaccagcagctcaaggccggagacaacccgtacctcaagtacaaccacgccgacgccgagttccaggagcggctcaaagaagatacgtcttttgggggcaacctcgggcgagcagtcttccaggccaaaaagaggcttcttgaacctcttggtctggttgaggaagcggctaagacggctcctggaaagaagagaccggtagagccatcaccccagcgttctccagactcctctacgggcatcggcaagaaaggccaacagcccgctaaaaagagactcaattttggtcagactggcgactcagagtcagtccccgacccacaacctctcggagaacctccagcaacccccgctgctgtgggacctactacaatggcttcaggcggtggcgcaccaatggcagacaataacgagggtgccgatggagtgggtaattcctcaggaaattggcattgcgattcccaatggctgggcgacagagtcatcaccaccagcaccagaacctgggccctgcccacttacaacaaccatctctacaagcaaatctccagccaatcaggagcttcaaacgacaaccactactttggctacagcaccccttgggggtattttgactttaacagattccactgccacttttcaccacgtgactggcaaagactcatcaacaacaactggggattccgacccaagagactcaacttcaagctcttcaacatccaagtcaaggaggtcacgacgaatgatggcgtcacgaccatcgctaataaccttaccagcacggttcaagtcttctcggactcggagtaccagttgccgtacgtcctcggctctgcgcaccagggctgcctccctccgttcccggcggacgtgttcatgattccgcagtacggctacctaacgctcaacaatggcagccaagccgtgggacgttcatccttttactgcctggaatatttcccttctcagatgctgagaacgggcaacaactttaccttcagctacacttttgaggacgttcctttccacagcagctacgctcacagccagagtctggaccgtctcatgaatcctctcatcgaccagtacctgtattacttgagcagaacaaacactccaagtggaaccaccacgcagtcaaggcttcagttttctcaggccggagcgagtgacattcgggaccagtctaggaactggcttcctggaccctgttaccgccagcagcgcgtttctaaaacaaaaacagacaacaacaacagcaattttacctggactggtgcttcaaaatataaccttaatgggcgtgaatctataatcaaccctggcactgctatggcctcacacaaagacgacgaagacaagttctttcccatgagcggtgtcatgatttttggaaaagagagcgccggagcttcaaacactgcattggacaatgtcatgatcacagacgaagaggaaatcaaagccactaaccccgtggccaccgaaagatttgggactgtggcagtcaatctccagagcagcagcacagaccctgcgaccggagatgtgcatgttatgggagcattacctggcatggtgtggcaagatagagacgtgtacctgcagggtcccatttgggccaaaattcctcacacagatggacactttcacccgtctcctcttatgggcggctttggactcaagaacccgcctcctcagatcctcatcaaaaacacgcctgttcctgcgaatcctccggcggagttttcagctacaaagtttgcttcattcatcacccaatactccacaggacaagtgagtgtggaaattgaatgggagctgcagaaagaaaacagcaagcgctggaatcccgaagtgcagtacacatccaattatgcaaaatctgccaacgttgattttactgtggacaacaatggactttatactgagcctcgccccattggcacccgttaccttacccgtcccctgtaa

SEQ ID NO: 362 - protein, 736 aa, Artificial Sequence
  Description of Artificial Sequence: Synthetic polypeptide
MAADGYLPDWLEDNLSEGIREWWDLKPGAPKPKANQQHQDNARGLVLPGYKYLGPGNGLDKGEPVNAADAAALEHDKAYDQQLKAGDNPYLKYNHADAEFQERLKEDTSFGGNLGRAVFQAKKRLLEPLGLVEEAAKTAPGKKRPVEPSPQRSPDSSTGIGKKGQQPAKKRLNFGQTGDSESVPDPQPLGEPPATPAAVGPTTMASGGGAPMADNNEGADGVGNSSGNWHCDSQWLGDRVITTSTRTWALPTYNNHLYKQISSQSGASNDNHYFGYSTPWGYFDFNRFHCHFSPRDWQRLINNNWGFRPKRLNFKLFNIQVKEVTTNDGVTTIANNLTSTVQVFSDSEYQLPYVLGSAHQGCLPPFPADVFMIPQYGYLTLNNGSQAVGRSSFYCLEYFPSQMLRTGNNFTFSYTFEDVPFHSSYAHSQSLDRLMNPLIDQYLYYLSRTNTPSGTTTQSRLQFSQAGASDIRDQSRNWLPGPCYRQQRVSKTKTDNNNSNFTWTGASKYNLNGRESIINPGTAMASHKDDEDKFFPMSGVMIFGKESAGASNTALDNVMITDEEEIKATNPVATERFGTVAVNLQSSSTDPATGDVHVMGALPGMVWQDRDVYLQGPIWAKIPHTDGHFHPSPLMGGFGLKNPPPQILIKNTPVPANPPAEFSATKFASFITQYSTGQVSVEIEWELQKENSKRWNPEVQYTSNYAKSANVDFTVDNNGLYTEPRPIGTRYLTRPL

SEQ ID NO: 363 - DNA, 2214 bp, Artificial Sequence; identical to SEQ ID NO: 335
  Description of Artificial Sequence: Synthetic polynucleotide

SEQ ID NO: 364 - protein, 737 aa, Artificial Sequence; identical to SEQ ID NO: 336
  Description of Artificial Sequence: Synthetic polypeptide

SEQ ID NO: 365 - DNA, 2205 bp, Artificial Sequence
  Description of Artificial Sequence: Synthetic polynucleotide
atggctgctgacggttatcttccagattggctcgaggacaacctttctgaaggcattcgtgagtggtgggctctgaaacctggagtccctcaacccaaagcgaaccaacaacaccaggacaaccgtcggggtcttgtgcttccgggttacaaatacctcggacccggtaacggactcgacaaaggagagccggtcaacgaggcggacgcggcagccctcgaacacgacaaggcctacgaccagcagctcaaggccggagacaacccgtacctcaagtacaaccacgccgacgccgagttccaggagcggctcaaagaagatacgtcttttgggggcaacctcgggcgagcagtcttccaggccaaaaagaggcttcttgaacctcttggtctggttgaggaagcggctaagacggctcctggaaagaagaggcctgtagagcagtctcctcaggaaccggactcctccgcgggtattggcaaatcgggtgcacagcccgctaaaaagagactcaatttcggtcagactggcgacacagagtcagtcccagaccctcaaccaatcggagaacctcccgcagccccctcaggtgtgggatctcttacaatggcttcaggtggtggcgcaccagtggcagacaataacgaaggtgccgatggagtgggtagttcctcgggaaattggcattgcgattcccaatggctgggggacagagtcatcaccaccagcacccgaacctgggccctgcccacctacaacaaccacctctacaaacaaatttccagccaatcaggagcctcgaacgacaatcactactttggctacagcaccccttgggggtattttgacttcaacagattccactgccacttttcaccacgtgactggcagcgactcatcaacaacaactggggattccggcccaagagactcagcttcaagctcttcaacatccaggtcaaagaggttacggacaacaatggagtcaagaccatcgccaataaccttaccagcacggtccaggtcttcacggactcagactatcagctcccgtacgtgctcgggtcggctcacgagggctgcctcccgccgttcccagcggacgttttcatgattcctcagtacgggtatctgacgcttaatgatggaagccaggccgtgggtcgttcgtccttttactgcctggaatatttcccgtcgcaaatgctaagaacgggtaacaacttccagttcagctacgagtttgagaacgtacctttccatagcagctacgctcacagccaaagcctggaccgactaatgaatccactcatcgaccaatacttgtactatctctcaaagactattaacggttctggacagaatcaacaaacgctaaaattcagtgtggccggacccagcaacatggctgtccagggaagaaactacatacctggacccagctaccgacaacaacgtgtctcaaccactgtgactcaaaacaacaacagcgaatttgcttggcctggagcttcttcttgggctctcaatggacgtaatagcttgatgaatcctggacctgctatggccagccacaaagaaggagaggaccgtttctttcctttgtctggatctttaatttttggcaaacaaggaactggaagagacaacgtggatgcggacaaagtcatgataaccaacgaagaagaaattaaaactactaacccggtagcaacggagtcctatggacaagtggccacaaaccaccagagtgcccaagcacaggcgcagaccggctgggttcaaaaccaaggaatacttccgggtatggtttggcaggacagagatgtgtacctgcaaggacccatttgggccaaaattcctcacacggacggcaactttcacccttctccgctgatgggagggtttggaatgaaacacccgcctcctcagatcctcatcaaaaacacacctgtacctgcggatcctccaacggccttcaacaaggacaagctgaactctttcatcacccagtattctactggccaagtcagcgtggagatcgagtgggagctgcagaaggaaaacagcaagcgctggaaccccgagatccagtacacctccaactactacaaatctacaagtgtggactttgctgttaatacagaaggcgtgtactctgaaccccgccccattggcacccgttacctcacccgtaatctgtaa

SEQ ID NO: 366 - protein, 734 aa, Artificial Sequence
  Description of Artificial Sequence: Synthetic polypeptide
MAADGYLPDWLEDNLSEGIREWWALKPGVPQPKANQQHQDNRRGLVLPGYKYLGPGNGLDKGEPVNEADAAALEHDKAYDQQLKAGDNPYLKYNHADAEFQERLKEDTSFGGNLGRAVFQAKKRLLEPLGLVEEAAKTAPGKKRPVEQSPQEPDSSAGIGKSGAQPAKKRLNFGQTGDTESVPDPQPIGEPPAAPSGVGSLTMASGGGAPVADNNEGADGVGSSSGNWHCDSQWLGDRVITTSTRTWALPTYNNHLYKQISSQSGASNDNHYFGYSTPWGYFDFNRFHCHFSPRDWQRLINNNWGFRPKRLSFKLFNIQVKEVTDNNGVKTIANNLTSTVQVFTDSDYQLPYVLGSAHEGCLPPFPADVFMIPQYGYLTLNDGSQAVGRSSFYCLEYFPSQMLRTGNNFQFSYEFENVPFHSSYAHSQSLDRLMNPLIDQYLYYLSKTINGSGQNQQTLKFSVAGPSNMAVQGRNYIPGPSYRQQRVSTTVTQNNNSEFAWPGASSWALNGRNSLMNPGPAMASHKEGEDRFFPLSGSLIFGKQGTGRDNVDADKVMITNEEEIKTTNPVATESYGQVATNHQSAQAQAQTGWVQNQGILPGMVWQDRDVYLQGPIWAKIPHTDGNFHPSPLMGGFGMKHPPPQILIKNTPVPADPPTAFNKDKLNSFITQYSTGQVSVEIEWELQKENSKRWNPEIQYTSNYYKSTSVDFAVNTEGVYSEPRPIGTRYLTRNL

SEQ ID NO: 367 - DNA, 2217 bp, Artificial Sequence
  Description of Artificial Sequence: Synthetic polynucleotide
atggctgccgatggttatcttccagattggctcgaggacaacctctctgagggcattcgcgagtggtgggcgctgaaacctggagccccgaagcccaaagccaaccagcaaaagcaggacgacggccggggtctggtgcttcctggctacaagtacctcggacccttcaacggactcgacaagggggagcccgtcaacgcggcggacgcagcggccctcgagcacgacaaggcctacgaccagcagctgcaggcgggtgacaatccgtacctgcggtataaccacgccgacgccgagtttcaggagcgtctgcaagaagatacgtcttttgggggcaacctcgggcgagcagtcttccaggccaagaagcgggttctcgaacctctcggtctggttgaggaaggcgctaagacggctcctggaaagaagagaccggtagagccatcaccccagcgttctccagactcctctacgggcatcggcaagaaaggccaacagcccgccagaaaaagactcaattttggtcagactggcgactcagagtcagttccagaccctcaacctctcggagaacctccagcagcgccctctggtgtgggacctaatacaatggctgcaggcggtggcgcaccaatggcagacaataacgaaggcgccgacggagtgggtagttcctcgggaaattggcattgcgattccacatggctgggcgacagagtcatcaccaccagcacccgaacctgggccctgcccacctacaacaaccacctctacaagcaaatctccaacgggacatcgggaggagccaccaacgacaacacctacttcggctacagcaccccctgggggtattttgactttaacagattccactgccacttttcaccacgtgactggcagcgactcatcaacaacaactggggattccggcccaagagactcagcttcaagctcttcaacatccaggtcaaggaggtcacgcagaatgaaggcaccaagaccatcgccaataacctcaccagcaccatccaggtgtttacggactcggagtaccagctgccgtacgttctcggctctgcccaccagggctgcctgcctccgttcccggcggacgtgttcatgattccccagtacggctacctaacactcaacaacggtagtcaggccgtgggacgctcctccttctactgcctggaatactttccttcgcagatgctgagaaccggcaacaacttccagtttacttacaccttcgaggacgtgcctttccacagcagctacgcccacagccagagcttggaccggctgatgaatcctctgattgaccagtacctgtactacttgtctcggactcaaacaacaggaggcacggcaaatacgcagactctgggcttcagccaaggtgggcctaatacaatggccaatcaggcaaagaactggctgccaggaccctgttaccgccaacaacgcgtctcaacgacaaccgggcaaaacaacaatagcaactttgcctggactgctgggaccaaataccatctgaatggaagaaattcattggctaatcctggcatcgctatggcaacacacaaagacgacgaggagcgtttttttcccagtaacgggatcctgatttttggcaaacaaaatgctgccagagacaatgcggattacagcgatgtcatgctcaccagcgaggaagaaatcaaaaccactaaccctgtggctacagaggaatacggtatcgtggcagataacttgcagcagcaaaacacggctcctcaaattggaactgtcaacagccagggggccttacccggtatggtctggcagaaccgggacgtgtacctgcagggtcccatctgggccaagattcctcacacggacggcaacttccacccctctcccctcatgggtggattcggacttaaacatcctccgcctcagatcctgatcaagaacacgcctgtacctgcggatcctccgaccaccttcaaccagtcaaagctgaactctttcatcacgcaatacagcaccggacaggtcagcgtggaaattgaatgggagctgcagaaggaaaacagcaagcgctggaaccccgagatccagtacacctccaactactacaaatctacaagtgtggactttgctgttaatacagaaggcgtgtactctgaaccccgccccattggcacccgttacctcacccgtaatctgtaa

SEQ ID NO: 368 - protein, 738 aa, Artificial Sequence; identical to SEQ ID NO: 114
  Description of Artificial Sequence: Synthetic polypeptide

SEQ ID NO: 369 - DNA, 2211 bp, Artificial Sequence
  Description of Artificial Sequence: Synthetic polynucleotide
atggctgctgacggttatcttccagattggctcgaggacaacctttctgaaggcattcgagagtggtgggcgctgcaacctggagcccctaaacccaaggcaaatcaacaacatcaggacaacgctcggggtcttgtgcttccgggttacaaatacctcggacccggcaacggactcgacaagggggaacccgtcaacgcagcggacgcggcagccctcgagcacgacaaggcctacgaccagcagctcaaggccggtgacaacccctacctcaagtacaaccacgccgacgccgagttccaggagcggctcaaagaagatacgtcttttgggggcaacctcgggcgagcagtcttccaggccaaaaagaggcttcttgaacctcttggtctggttgaggaagcggctaagacggctcctggaaagaagaggcctgtagatcagtctcctcaggaaccggactcatcatctggtgttggcaaatcgggcaaacagcctgccagaaaaagactaaatttcggtcagactggcgactcagagtcagtcccagaccctcaacctctcggagaaccaccagcagcccccacaagtttgggatctaatacaatggcttcaggcggtggcgcaccaatggcagacaataacgagggtgccgatggagtgggtaattcctcaggaaattggcattgcgattcccaatggctgggcgacagagtcatcaccaccagcaccagaacctgggccctgcccacttacaacaaccatctctacaagcaaatctccagccaatcaggagcttcaaacgacaaccactactttggctacagcaccccttgggggtattttgactttaacagattccactgccacttctcaccacgtgactggcagcgactcattaacaacaactggggattccggcccaagaaactcagcttcaagctcttcaacatccaagttaaagaggtcacgcagaacgatggcacgacgactattgccaataaccttaccagcacggttcaggtgtttacggactcggagtatcagctcccgtacgtgctcgggtcggcgcaccaaggctgtctcccgccgtttccagcggacgtcttcatggtccctcagtatggatacctcaccctgaacaacggaagtcaagcggtgggacgctcatccttttactgcctggagtacttcccttcgcagatgctaaggactggaaataacttccaattcagctataccttcgaggatgtaccttttcacagcagctacgctcacagccagagtttggatcgcttgatgaatcctcttattgatcagtatctgtactacctgaacagaacgcaaggaacaacctctggaacaaccaaccaatcacggctgctttttagccaggctgggcctcagtctatgtctttgcaggccagaaattggctacctgggccctgctaccggcaacagagactttcaaagactgctaacgacaacaacaacagtaactttccttggacagcggccagcaaatatcatctcaatggccgcgactcgctggtgaatccaggaccagctatggccagtcacaaggacgatgaagaaaaatttttccctatgcacggcaatctaatatttggcaaagaagggacaacggcaagtaacgcagaattagataatgtaatgattacggatgaagaagagattcgtaccaccaatcctgtggcaacagagcagtatggaactgtggcaaataacttgcagagctcaaatacagctcccacgactagaactgtcaatgatcagggggccttacctggcatggtgtggcaagatcgtgacgtgtaccttcaaggacctatctgggcaaagattcctcacacggatggacactttcatccttctcctctgatgggaggctttggactgaaacatccgcctcctcaaatcatgatcaaaaatactccggtaccggcaaatcctccgacgactttcagcccggccaagtttgcttcatttatcactcagtactccactggacaggtcagcgtggaaattgagtgggagctacagaaagaaaacagcaaacgttggaatccagagattcagtacacttccaactacaacaagtctgttaatgtggactttactgtagacactaatggtgtttatagtgaacctcgccccattggcacccgttaccttacccgtcccctgtaa

SEQ ID NO: 370 - protein, 736 aa, Artificial Sequence; identical to SEQ ID NO: 340
  Description of Artificial Sequence: Synthetic polypeptide

SEQ ID NO: 371 - DNA, 2211 bp, Artificial Sequence; identical to SEQ ID NO: 339
  Description of Artificial Sequence: Synthetic polynucleotide

SEQ ID NO: 372 - protein, 736 aa, Artificial Sequence; identical to SEQ ID NO: 340
  Description of Artificial Sequence: Synthetic polypeptide

SEQ ID NO: 373 - DNA, 2211 bp, Artificial Sequence
  Description of Artificial Sequence: Synthetic polynucleotide
atggctgctgacggttatcttccagattggctcgaggacaacctttctgaaggcattcgtgagtggtgggctctgaaacctggagtccctcaacccaaagcgaaccaacaacaccaggacaaccgtcggggtcttgtgcttccgggttacaaatacctcggacccggtaacggactcgacaaaggagagcccgtcaacgcggcggatgcagcggccctcgagcacgacaaggcctacgaccagcagctcaaagcgggtgacaatccgtacctgcggtataaccacgccgacgccgagtttcaggagcgtctgcaagaagatacgtcttttgggggcaacctcgggcgagcagtcttccaggccaagaagagggttctcgaaccttttggtctggttgaggaaggtgctaagacggctcctggaaagaaacgtccggtagagcagtcgccacaagagccagactcctcctcgggcatcggcaagacaggccagcagcccgctaaaaagagactcaattttggtcagactggcgactcagagtcagtccccgacccacaacctctcggagaacctccagcaacccccgctgctgtgggacctactacaatggcttcaggcggtggcgcaccaatggcagacaataacgaaggcgccgacggagtgggtaatgcctcaggaaattggcattgcgattccacatggctgggcgacagagtcatcaccaccagcacccgcacctgggccttgcccacctacaataaccacctctacaagcaaatctccagtgcttcaacgggggccagcaacgacaaccactacttcggctacagcaccccctgggggtattttgatttcaacagattccactgccatttctcaccacgtgactggcagcgactcatcaacaacaattggggattccggcccaagagactcaacttcaagctcttcaacatccaagtcaaggaggtcacgacgaatgatggcgtcacgaccatcgctaataaccttaccagcacggttcaagtcttctcggactcggagtaccagcttccgtacgtcctcggctctgcgcaccagggctgcctccctccgttcccggcggacgtgttcatgattccgcaatacggctacctgacgctcaacaatggcagccaagccgtgggacgttcatccttttactgcctggaatatttcccttctcagatgctgagaacgggcaacaactttaccttcagctacacctttgaggaagtgcctttccacagcagctacgcgcacagccagagcctggaccggctgatgaatcctctcatcgaccaatacctgtattacctgaacagaactcaaaatcagtccggaagtgcccaaaacaaggacttgctgtttagccgtgggtctccagctggcatgtctgttcagcccaaaaactggctacctggaccctgttatcggcagcagcgcgtttctaaaacaaaaacagacaacaacaacagcaattttacctggactggtgcttcaaaatataacctcaatgggcgtgaatccatcatcaaccctggcactgctatggcctcacacaaagacgacgaagacaagttctttcccatgagcggtgtcatgatttttggaaaagagagcgccggagcttcaaacactgcattggacaatgtcatgattacagacgaagaggaaattaaagccactaaccctgtggccaccgaaagatttgggaccgtggcagtcaatttccagagcagcagcacagaccctgcgaccggagatgtgcatgttatgggagccttacctggaatggtgtggcaagacagagacgtatacctgcagggtcctatttgggccaaaattcctcacacggatggacactttcacccgtctcctctcatgggcggctttggacttaagcacccgcctcctcagatcctcatcaaaaacacgcctgttcctgcgaatcctccggcagagttttcggctacaaagtttgcttcattcatcacccagtattccacaggacaagtgagcgtggagattgaatgggagctgcagaaagaaaacagcaaacgctggaatcccgaagtgcagtatacatctaactatgcaaaatctgccaacgttgatttcactgtggacaacaatggactttatactgagcctcgccccattggcacccgttacctcacccgtcccctgtaa

SEQ ID NO: 374 - protein, 736 aa, Artificial Sequence
  Description of Artificial Sequence: Synthetic polypeptide
MAADGYLPDWLEDNLSEGIREWWALKPGVPQPKANQQHQDNRRGLVLPGYKYLGPGNGLDKGEPVNAADAAALEHDKAYDQQLKAGDNPYLRYNHADAEFQERLQEDTSFGGNLGRAVFQAKKRVLEPFGLVEEGAKTAPGKKRPVEQSPQEPDSSSGIGKTGQQPAKKRLNFGQTGDSESVPDPQPLGEPPATPAAVGPTTMASGGGAPMADNNEGADGVGNASGNWHCDSTWLGDRVITTSTRTWALPTYNNHLYKQISSASTGASNDNHYFGYSTPWGYFDFNRFHCHFSPRDWQRLINNNWGFRPKRLNFKLFNIQVKEVTTNDGVTTIANNLTSTVQVFSDSEYQLPYVLGSAHQGCLPPFPADVFMIPQYGYLTLNNGSQAVGRSSFYCLEYFPSQMLRTGNNFTFSYTFEEVPFHSSYAHSQSLDRLMNPLIDQYLYYLNRTQNQSGSAQNKDLLFSRGSPAGMSVQPKNWLPGPCYRQQRVSKTKTDNNNSNFTWTGASKYNLNGRESIINPGTAMASHKDDEDKFFPMSGVMIFGKESAGASNTALDNVMITDEEEIKATNPVATERFGTVAVNFQSSSTDPATGDVHVMGALPGMVWQDRDVYLQGPIWAKIPHTDGHFHPSPLMGGFGLKHPPPQILIKNTPVPANPPAEFSATKFASFITQYSTGQVSVEIEWELQKENSKRWNPEVQYTSNYAKSANVDFTVDNNGLYTEPRPIGTRYLTRPL

SEQ ID NO: 375 - DNA, 2217 bp, Artificial Sequence
  Description of Artificial Sequence: Synthetic polynucleotide
atggctgccgatggttatcttccagattggctcgaggacaacctctctgagggcattcgcgagtggtgggacttgaaacctggagccccgaaacccaaagccaaccagcaaaagcaggacgacggccggggtctggtgcttcctggctacaagtacctcggacccttcaacggactcgacaagggggagcccgtcaacgcggcggatgcaacggccctcgagcacgacaaggcctacgaccagcagctgcaggcgggtgacaatccgtacctgcggtataaccacgccgacgccgagtttcaggagcgtctgcaagaagatacgtcttttgggggcaacctcgggcgagcagtcttccaggccaagaagcgggttctcgaacctctcggtctggttgaggaaggcgctaagacggctcctggaaagaagagaccggtagagccatcaccccagcgttctccagactcctctacgggcatcggcaagaaaggccaacagcccgccagaaaaagactcaattttggtcagactggcgactcagagtcagttccagaccctcaacctctcggagaaccaccagcagcccccacaagtttgggatctaatacaatggcttcaggcggtggcgcaccaatggcagacaataacgagggtgccgatggagtgggtaattcctcaggaaattggcattgcgattcccaatggctgggcgacagagtcatcaccaccagcacccgcacctgggccttgcccacctacaataaccacctctacaagcaaatctccagtgcttcaacgggggccagcaacgacaaccactacttcggctacagcaccccctgggggtattttgactttaaccgcttccactgccacttctcgccaagagactggcaaagactcatcaacaacaattggggattccggcccaagagactcaacttcaaactcttcaacatccaagtcaaggaggtcacgacgaatgatggcgtcacgaccatcgccaataacctcaccagcaccatccaggtgtttacggactcggagtaccagctgccgtacgttctcggctctgcccaccagggctgcctgcctccgttcccggcggacgtgttcatgattccccagtatggatacctcaccctgaacaacggaagtcaagcggtgggacgctcatccttttactgcctggagtacttcccttcgcagatgctaaggactggaaataacttccaattcagctataccttcgaggatgtaccttttcacagcagctacgctcacagccagagtttggatcgcttgatgaatcctcttattgatcagtatctgtactacctgaacagaacgcaaggaacaacctctggaacaaccaaccaatcacggctgctttttagccaggctgggcctcagtctatgtctttgcaggccagaaattggctacctgggccctgctaccggcaacagagactttcaaagactgctaacgacaacaacaacagtaactttccttggacagcagccagcaaatatcatctcaatggccgcgactcgctggtgaatccaggaccagctatggccagtcacaaggacgatgaagaaaaatttttccctatgcacggcaatctaatatttggcaaagaagggacaacggcaagtaacgcagaattagataatgtaatgattacggatgaagaagagattcgtaccaccaatcctgtggcaacagagcagtatggaactgtggcaaataacttgcagagctcaaatacagctcccacgactagaactgtcaatgatcagggggccttacctggcatggtgtggcaagatcgtgacgtgtaccttcaggggcccatctgggcaaagattccacacacggacggacattttcacccctctcccctcatgggtggattcggacttaaacaccctcctccgcagattctcatcaagaacaccccggtacctgcgaatccttcgaccaccttcagtgcggcaaagtttgcttccttcatcacacagtactccacgggacaggtcagcgtggagatcgagtgggagctgcagaaggaaaacagcaagcgctggaacccggagatccagtacacttccaactattacaagtctaataatgttgaatttgctgttaatactgaaggtgtatatagtgaaccccgccccattggcaccagatacctgactcgtaatctgtaa

SEQ ID NO: 376 - protein, 738 aa, Artificial Sequence
  Description of Artificial Sequence: Synthetic polypeptide
MAADGYLPDWLEDNLSEGIREWWDLKPGAPKPKANQQKQDDGRGLVLPGYKYLGPFNGLDKGEPVNAADATALEHDKAYDQQLQAGDNPYLRYNHADAEFQERLQEDTSFGGNLGRAVFQAKKRVLEPLGLVEEGAKTAPGKKRPVEPSPQRSPDSSTGIGKKGQQPARKRLNFGQTGDSESVPDPQPLGEPPAAPTSLGSNTMASGGGAPMADNNEGADGVGNSSGNWHCDSQWLGDRVITTSTRTWALPTYNNHLYKQISSASTGASNDNHYFGYSTPWGYFDFNRFHCHFSPRDWQRLINNNWGFRPKRLNFKLFNIQVKEVTTNDGVTTIANNLTSTIQVFTDSEYQLPYVLGSAHQGCLPPFPADVFMIPQYGYLTLNNGSQAVGRSSFYCLEYFPSQMLRTGNNFQFSYTFEDVPFHSSYAHSQSLDRLMNPLIDQYLYYLNRTQGTTSGTTNQSRLLFSQAGPQSMSLQARNWLPGPCYRQQRLSKTANDNNNSNFPWTAASKYHLNGRDSLVNPGPAMASHKDDEEKFFPMHGNLIFGKEGTTASNAELDNVMITDEEEIRTTNPVATEQYGTVANNLQSSNTAPTTRTVNDQGALPGMVWQDRDVYLQGPIWAKIPHTDGHFHPSPLMGGFGLKHPPPQILIKNTPVPANPSTTFSAAKFASFITQYSTGQVSVEIEWELQKENSKRWNPEIQYTSNYYKSNNVEFAVNTEGVYSEPRPIGTRYLTRNL

SEQ ID NO: 377 - DNA, 2208 bp, Artificial Sequence
  Description of Artificial Sequence: Synthetic polynucleotide
atggctgccgatggttatcttccagattggctcgaggacaaccttagtgaaggaattcgcgagtggtgggacttgaaacctggagccccgaagcccaaagccaaccagcaaaagcaggacgacggccggggtctggtgcttcctggctacaagtacctcggacccttcaacggactcgacaagggggagcccgtcaacgcggcggacgcagcggccctcgagcacgacaaggcctacgaccagcagctcaaagcgggtgacaatccgtacctgcggtataaccacgccgacgccgagtttcaggagcgtctgcaagaagatacgtcttttgggggcaacctcgggcgagcagtcttccaggccaagaagcgggttctcgaacctctcggtctggttgaggaaggtgctaagacggctcctggaaagaaacgtccggtagagcagtcgccacaagagccagactcctcctcgggcattggcaagacaggccagcagcccgctaaaaagagactcaattttggtcagactggcgactcagagtcagtccccgacccacaacctctcggagaacctccagcaacccccgctgctgtgggacctactacaatggcttcaggcggtggcgcaccaatggcagacaataacgaaggcgccgacggagtgggtaatgcctcaggaaattggcattgcgattccacatggctgggcgacagagtcatcaccaccagcacccgaacctgggccctgcccacctacaacaaccacctctacaaacaaatttccagccaatcaggagcctcgaacgacaatcactactttggctacagcaccccttgggggtattttgatttcaacagattccactgccacttttcaccacgtgactggcagcgactcatcaacaacaattggggattccggcccaagagactcagcttcaagctcttcaacatccaggtcaaggaggtcacgcagaatgaaggcaccaagaccatcgccaataaccttaccagcacggttcaagtgtttacggactcggagtatcagctcccgtacgtgctcggctcggcgcatcaaggatgcctcccgccgttcccagcagacgtcttcatggtgccacagtatggatacctcaccctgaacaacgggagtcaggcagtaggacgctcttcattttactgcctggagtactttccttctcagatgctgcgtaccggaaacaactttaccttcagctacacttttgaggacgttcctttccacagcagctacgctcacagccagagtctggaccgtctcatgaatcctctgattgaccagtacctgtattacttgagcagaacaaacactccaagtggaaccaccacgcagtcaaggcttcagttttctcaggccggagcgagtgacattcgggaccagtctaggaactggcttcctggaccctgttaccgccagcagcgagtatcaaagacatctgcggataacaacaacagtgaatactcgtggactggagctaccaagtaccacctcaatggcagagactctctggtgaatccgggcccggccatggcaagccacaaggactatgaagaaaagttttttcctcagagcggggttctcatctttgggaagcaaggctcagagaaaacaaatgtggacattgaaaaggtcatgattacagacgaagaggaaatcaggacaaccaatcccgtggctacggagcagtatggttctgtatctaccaacctccagagaggcaacagacaagcagctaccgcagatgtcaacacacaaggcgttcttccaggcatggtctggcaggacagagatgtgtaccttcaggggcccatctgggcaaagattccacacacggacggacattttcacccgtctccgctgatgggcggctttggcctgaaacatcctccgcctcagatcctgatcaagaacacgcctgtacctgcggatcctccgaccaccttcaaccagtcaaagctgaactctttcatcactcagtattctactggccaagtcagcgtggagatcgagtgggagctgcagaaggaaaacagcaagcgctggaaccccgagatccagtacacctccaactactacaaatctacaagtgtggactttgctgttaatacagaaggcgtgtactctgaaccccgccccattggcacccgttacctcacccgtaatctgtaa

SEQ ID NO: 378 - protein, 735 aa, Artificial Sequence
  Description of Artificial Sequence: Synthetic polypeptide
MAADGYLPDWLEDNLSEGIREWWDLKPGAPKPKANQQKQDDGRGLVLPGYKYLGPFNGLDKGEPVNAADAAALEHDKAYDQQLKAGDNPYLRYNHADAEFQERLQEDTSFGGNLGRAVFQAKKRVLEPLGLVEEGAKTAPGKKRPVEQSPQEPDSSSGIGKTGQQPAKKRLNFGQTGDSESVPDPQPLGEPPATPAAVGPTTMASGGGAPMADNNEGADGVGNASGNWHCDSTWLGDRVITTSTRTWALPTYNNHLYKQISSQSGASNDNHYFGYSTPWGYFDFNRFHCHFSPRDWQRLINNNWGFRPKRLSFKLFNIQVKEVTQNEGTKTIANNLTSTVQVFTDSEYQLPYVLGSAHQGCLPPFPADVFMVPQYGYLTLNNGSQAVGRSSFYCLEYFPSQMLRTGNNFTFSYTFEDVPFHSSYAHSQSLDRLMNPLIDQYLYYLSRTNTPSGTTTQSRLQFSQAGASDIRDQSRNWLPGPCYRQQRVSKTSADNNNSEYSWTGATKYHLNGRDSLVNPGPAMASHKDYEEKFFPQSGVLIFGKQGSEKTNVDIEKVMITDEEEIRTTNPVATEQYGSVSTNLQRGNRQAATADVNTQGVLPGMVWQDRDVYLQGPIWAKIPHTDGHFHPSPLMGGFGLKHPPPQILIKNTPVPADPPTTFNQSKLNSFITQYSTGQVSVEIEWELQKENSKRWNPEIQYTSNYYKSTSVDFAVNTEGVYSEPRPIGTRYLTRNL

SEQ ID NO: 379 - DNA, 2214 bp, Artificial Sequence
  Description of Artificial Sequence: Synthetic polynucleotide
atggctgccgatggttatcttccagattggctcgaggacaacctctctgagggcattcgcgagtggtgggacttgaaacctggagccccgaaacccaaagccaaccagcaaaagcaggacgacggccggggtctggtgcttcctggctacaagtacctcggacccttcaacggactcgacaagggggagcccgtcaacgcggcggatgcagcggccctcgagcacgacaaggcctacgaccagcagctcaaagcgggtgacaatccgtacctgcggtataaccacgccgacgccgagtttcaggagcgtctgcaagaagatacgtcttttgggggcaacctcgggcgagcagtcttccaggccaagaagagggttctcgaaccttttggtctggttgaggaaggtgctaagacggctcctggaaagaaacgtccggtagagcagtcgccacaagagccagactcctcctcgggcattggcaagacaggccagcagcctgcaagaaaaagattgaattttggtcagactggagacgcagactcagtacctgacccccagcctctcggacagccaccagcagccccctctggtctgggaactaatacgatggctacaggcagtggcgcaccaatggcagacaataacgagggcgccgacggagtgggtaattcctcgggaaattggcattgcgattcccaatggctgggggacagagtcatcaccaccagcacccgaacctgggccctgcccacctacaacaatcacctctacaagcaaatctccaacagcacatctggaggatcttcaaatgacaacgcctacttcggctacagcaccccctgggggtattttgatttcaacagattccactgccatttctcaccacgtgactggcagcgactcatcaacaacaattggggattccggcccaagagactcaacttcaagctcttcaacatccaggtcaaggaggtcacgcagaatgaaggcaccaagaccatcgccaataacctcaccagcaccatccaggtgtttacggactcggagtaccagctgccgtacgttctcggctctgcccaccagggctgcctgcctccgttcccggcggacgtgttcatgattccccagtacggctacctaacactcaacaacggtagtcaggccgtgggacgctcctccttctactgcctggaatactttccttcgcagatgctgagaaccggcaacaacttccagtttacttacaccttcgaggacgtgcctttccacagcagctacgcccacagccagagcttggaccggctgatgaatcctctgattgaccagtacctgtactacttgtctcggactcaaacaacaggaggcacgacaaatacgcagactctgggcttcagccaaggtgggcctaatacaatggccaatcaggcaaagaactggctgccaggaccctgttaccgccagcagcgagtatcaaagacatttgcggataacaacaacagtgaatactcgtggactggagctaccaagtaccacctcaatggcagagactctctggtgaatccgggcccggccatggcaagccacaaggacgatgaagaaaagttttttcctcagagcggggttctcatctttgggaagcaaggctcagagaaaacaaatgtggacattgaaaaggtcatgattacagacgaagaggaaatcaggacaaccaatcccgtggctacggagcagtatggttctgtatctaccaacctccagagaggcaacagacaagcagctaccgcagatgtcaacacacaaggcgttcttccaggcatggtctggcaggacagagatgtgtaccttcaggggcccatctgggcaaagattccacacacggacggacattttcacccctctcccctcatgggtggattcggacttaaacaccctccgcctcagatcctgatcaagaacacgcctgtacccgcggatcctccgaccaccttcaaccagtcaaagctgaactctttcatcacccagtattctactggccaagtcagcgtggagatcgagtgggagctgcagaaggaaaacagcaagcgctggaaccccgagatccagtacacctccaactactacaaatctacaagtgtggactttgctgttaatacagaaggcgtgtactctgaaccccgccccattggcacccgttacctcacccgtaatctgtaa

SEQ ID NO: 380 - protein, 737 aa, Artificial Sequence
  Description of Artificial Sequence: Synthetic polypeptide
MAADGYLPDWLEDNLSEGIREWWDLKPGAPKPKANQQKQDDGRGLVLPGYKYLGPFNGLDKGEPVNAADAAALEHDKAYDQQLKAGDNPYLRYNHADAEFQERLQEDTSFGGNLGRAVFQAKKRVLEPFGLVEEGAKTAPGKKRPVEQSPQEPDSSSGIGKTGQQPARKRLNFGQTGDADSVPDPQPLGQPPAAPSGLGTNTMATGSGAPMADNNEGADGVGNSSGNWHCDSQWLGDRVITTSTRTWALPTYNNHLYKQISNSTSGGSSNDNAYFGYSTPWGYFDFNRFHCHFSPRDWQRLINNNWGFRPKRLNFKLFNIQVKEVTQNEGTKTIANNLTSTIQVFTDSEYQLPYVLGSAHQGCLPPFPADVFMIPQYGYLTLNNGSQAVGRSSFYCLEYFPSQMLRTGNNFQFTYTFEDVPFHSSYAHSQSLDRLMNPLIDQYLYYLSRTQTTGGTTNTQTLGFSQGGPNTMANQAKNWLPGPCYRQQRVSKTFADNNNSEYSWTGATKYHLNGRDSLVNPGPAMASHKDDEEKFFPQSGVLIFGKQGSEKTNVDIEKVMITDEEEIRTTNPVATEQYGSVSTNLQRGNRQAATADVNTQGVLPGMVWQDRDVYLQGPIWAKIPHTDGHFHPSPLMGGFGLKHPPPQILIKNTPVPADPPTTFNQSKLNSFITQYSTGQVSVEIEWELQKENSKRWNPEIQYTSNYYKSTSVDFAVNTEGVYSEPRPIGTRYLTRNL

SEQ ID NO: 381 - DNA, 2217 bp, Artificial Sequence
  Description of Artificial Sequence: Synthetic polynucleotide
atggctgccgatggttatcttccagattggctcgaggacactctctctgaaggaataagacagtggtgggcgctgaaacctggagccccgaagcccaaagccaaccagcaaaagcaggacgacggccggggtctggtgcttcctggctacaagtacctcggacccttcaacggactcgacaagggggagcccgtcaacgcggcggatgcagcggccctcgagcacgacaaggcctacgaccagcagctcaaagcgggtgacaatccgtacctgcggtataaccacgccgacgccgagtttcaggagcgtctgcaagaagatacgtcttttgggggcaacctcgggcgagcagtcttccaggccaagaagcgggttctcgaacctctcggtctggttgaggaaggcgctaagacggctcctggaaagaagagaccggtagagccatcaccccagcgttctccagactcctctacgggcatcggcaagaaaggccaacagcccgccagaaaaagactcaattttggtcagactggcgactcagagtcagttccagaccctcaacctctcggagaaccaccagcagcccccacaagtttgggatctaatacaatggcttcaggcggtggcgcaccaatggcagacaataacgagggtgccgatggagtgggtaattcctcaggaaattggcattgcgattcccaatggctgggcgacagagtcatcaccaccagcacccgcacctgggccttgcccacctacaataaccacctctacaagcaaatctccagtgcttcaacgggggccagcaacgacaaccactacttcggctacagcaccccctgggggtattttgactttaaccgcttccactgccacttctcgccaagagactggcaaagactcatcaacaacaattggggattccggcccaagagactcaacttcaaactcttcaacatccaagtcaaggaggtcacgacgaatgatggcgtcacgaccatcgccaataacctcaccagcaccatccaggtgtttacggactcggagtaccagctgccgtacgttctcggctctgcccaccagggctgcctgcctccgttcccggcggacgtgttcatgattccccagtatggatacctcaccctgaacaacggaagtcaagcggtgggacgctcatccttttactgcctggagtacttcccttcgcagatgctaaggactggaaataacttccaattcagctataccttcgaggatgtaccttttcacagcagctacgctcacagccagagtttggatcgcttgatgaatcctcttattgatcagtatctgtactacctgaacagaacgcaaggaacaacctctggaacaaccaaccaatcacggctgctttttagccaggctgggcctcagtctatgtctttgcaggccagaaattggctacctgggccctgctaccggcaacagagactttcaaagactgctaacgacaacaacaacagtaactttccttggacagcagccagcaaatatcatctcaatggccgcgactcgctggtgaatccaggaccagctatggccagtcacaaggacgatgaagaaaaatttttccctatgcacggcaatctaatatttggcaaagaagggacaacggcaagtaacgcagaattagataatgtaatgattacggatgaagaagagattcgtaccaccaatcctgtggcaacagagcagtatggaactgtggcaaataacttgcagagctcaaatacagctcccacgactagaactgtcaatgatcagggggccttacctggcatggtgtggcaagatcgtgacgtgtaccttcaggggcccatctgggcaaagattccacacacggacggacattttcacccctctcccctcatgggtggattcggacttaaacaccctcctccgcagattctcatcaagaacaccccggtacctgcgaatccttcgaccaccttcagtgcggcaaagtttgcttccttcatcacacagtactccacgggacaggtcagcgtggagatcgagtgggagctgcagaaggaaaacagcaagcgctggaacccggagatccagtacacttccaactattacaagtctaataatgttgaatttgctgttaatactgaaggtgtatatagtgaaccccgccccattggcaccagatacctgactcgtaatctgtaa

SEQ ID NO: 382 - protein, 738 aa, Artificial Sequence
  Description of Artificial Sequence: Synthetic polypeptide
MAADGYLPDWLEDTLSEGIRQWWALKPGAPKPKANQQKQDDGRGLVLPGYKYLGPFNGLDKGEPVNAADAAALEHDKAYDQQLKAGDNPYLRYNHADAEFQERLQEDTSFGGNLGRAVFQAKKRVLEPLGLVEEGAKTAPGKKRPVEPSPQRSPDSSTGIGKKGQQPARKRLNFGQTGDSESVPDPQPLGEPPAAPTSLGSNTMASGGGAPMADNNEGADGVGNSSGNWHCDSQWLGDRVITTSTRTWALPTYNNHLYKQISSASTGASNDNHYFGYSTPWGYFDFNRFHCHFSPRDWQRLINNNWGFRPKRLNFKLFNIQVKEVTTNDGVTTIANNLTSTIQVFTDSEYQLPYVLGSAHQGCLPPFPADVFMIPQYGYLTLNNGSQAVGRSSFYCLEYFPSQMLRTGNNFQFSYTFEDVPFHSSYAHSQSLDRLMNPLIDQYLYYLNRTQGTTSGTTNQSRLLFSQAGPQSMSLQARNWLPGPCYRQQRLSKTANDNNNSNFPWTAASKYHLNGRDSLVNPGPAMASHKDDEEKFFPMHGNLIFGKEGTTASNAELDNVMITDEEEIRTTNPVATEQYGTVANNLQSSNTAPTTRTVNDQGALPGMVWQDRDVYLQGPIWAKIPHTDGHFHPSPLMGGFGLKHPPPQILIKNTPVPANPSTTFSAAKFASFITQYSTGQVSVEIEWELQKENSKRWNPEIQYTSNYYKSNNVEFAVNTEGVYSEPRPIGTRYLTRNL

SEQ ID NO: 383 - DNA, 2208 bp, Artificial Sequence; identical to SEQ ID NO: 19
  Description of Artificial Sequence: Synthetic polynucleotide

SEQ ID NO: 384 - protein, 735 aa, Artificial Sequence [sequence omitted]

SEQ ID NO: 385 - DNA, 2208 bp, Artificial Sequence
  Description of Artificial Sequence: Synthetic polynucleotide
atggctgccgatggttatcttccagattggctcgaggacaacctctctgagggcattcgcgagtggtgggcgctgaaacctggagccccgaagcccaaagccaaccagcaaaagcaggacgacggccggggtctggtgcttcctggctacaagtacctcggacccttcaacggactcgacaagggggagcccgtcaacgcggcggacgccgcggccctcgagcacgacaaggcctacgaccagcagctgcaggcgggtgacaatccgtacctgcggtataaccacgccgacgccgagtttcaggagcgtctgcaagaagatacgtcttttgggggcaacctcgggcgagcagtcttccaggccaaaaagaggcttcttgaacctcttggtctggttgaggaagcagctaaaacggctcctggaaagaagaggcctgtagagcagtctcctcaggaaccggactcctccgcgggtattggcaaatcgggtgcacagcccgccaaaaagagactcaatttcggtcagactggcgactcagagtcagtcccagaccctcaacctctcggagaaccaccagcagcccccacaagtttgggatctaatacaatggcttcaggcggtggcgcaccaatggcagacaataacgaaggcgccgacggagtgggtaatgcctcaggaaattggcattgcgattccacatggctgggcgacagagtcatcaccaccagcacccgcacctgggccttgcccacctacagcaaccatctctacaagcaaatctccagccaatcaggagcttcaaacgacaacgactactttggctacagcaccccttgggggtattttgatttcaacagattccactgccacttttcaccacgtgactggcaaagactcatcaacaacaactggggattccgacccaagagactcaacttcaagctctttaacattcaagtcaaagaggtcacgcagaatgacggtacgacgacgattgccaataaccttaccagcacggttcaggtgtttactgactcggagtaccagctcccgtacgtcctcggctcggcgcatcaaggatgcctcccgccgttcccagcagacgtcttcatggtgccacagtatggatacctcaccctgaacaacgggagtcaggcagtaggacgctcttcattttactgcctggagtactttccttctcagatgctgcgtaccggaaacaactttaccttcagctacacttttgaggacgttcctttccacagcagctacgctcacagccagagtctggaccgtctcatgaatcctctcatcgaccagtacctgtattacttgagcagaacaaacactccaagtggaaccaccacgcagtcaaggcttcagttttctcaggccggagcgagtgacattcgggaccagtctaggaactggcttcctggaccctgttaccgccagcagcgagtatcaaagacatctgaggataacaacaacagtgaatactcgtggactggagctaccaagtaccacctcaatggcagagactctctggtgaatccgggcccggccatggcaagccacaaggacgatgaagaaaagttttttcctcagagcggggttctcatctttgggaagcaaggctcagagaaaacaaatgtggacattgaaaaggtcatgattacagacgaagaggaaatcaggacaaccaatcccgtggctacggagcagtatggttctgtatctaccaacctccagagaggcaacagacaagcagctaccgcagatgtcaacacacaaggcgttcttccaggcatggtctggcaggacagagatgtgtaccttcaggggcccatctgggcaaagattccacacacggacggacattttcacccctctcccctcatgggtggattcggacttaaacaccctcctccacagattctcatcaagaacaccccggtacctgcgaatccttcgaccaccttcagtgcggcaaagtttgcttccttcatcacacagtactccacgggacaggtcagcgtggagatcgagtgggagctgcagaaggaaaacagcaaacgctggaatcccgaaattcagtacacttccaactacaacaagtctgttaatgtggactttactgtggacactaatggcgtgtattcagagcctcgccccattggcaccagatacctgactcgtaatctgtaa

SEQ ID NO: 386 - protein, 735 aa, Artificial Sequence
  Description of Artificial Sequence: Synthetic polypeptide
MAADGYLPDWLEDNLSEGIREWWALKPGAPKPKANQQKQDDGRGLVLPGYKYLGPFNGLDKGEPVNAADAAALEHDKAYDQQLQAGDNPYLRYNHADAEFQERLQEDTSFGGNLGRAVFQAKKRLLEPLGLVEEAAKTAPGKKRPVEQSPQEPDSSAGIGKSGAQPAKKRLNFGQTGDSESVPDPQPLGEPPAAPTSLGSNTMASGGGAPMADNNEGADGVGNASGNWHCDSTWLGDRVITTSTRTWALPTYSNHLYKQISSQSGASNDNDYFGYSTPWGYFDFNRFHCHFSPRDWQRLINNNWGFRPKRLNFKLFNIQVKEVTQNDGTTTIANNLTSTVQVFTDSEYQLPYVLGSAHQGCLPPFPADVFMVPQYGYLTLNNGSQAVGRSSFYCLEYFPSQMLRTGNNFTFSYTFEDVPFHSSYAHSQSLDRLMNPLIDQYLYYLSRTNTPSGTTTQSRLQFSQAGASDIRDQSRNWLPGPCYRQQRVSKTSEDNNNSEYSWTGATKYHLNGRDSLVNPGPAMASHKDDEEKFFPQSGVLIFGKQGSEKTNVDIEKVMITDEEEIRTTNPVATEQYGSVSTNLQRGNRQAATADVNTQGVLPGMVWQDRDVYLQGPIWAKIPHTDGHFHPSPLMGGFGLKHPPPQILIKNTPVPANPSTTFSAAKFASFITQYSTGQVSVEIEWELQKENSKRWNPEIQYTSNYNKSVNVDFTVDTNGVYSEPRPIGTRYLTRNL

SEQ ID NO: 387 - DNA, 2208 bp, Artificial Sequence
  Description of Artificial Sequence: Synthetic polynucleotide
atggctgccgatggttatcttccagattggctcgaggacaacctctctgagggcattcgcgagtggtgggcgctgaaacctggagccccgaagcccaaagccaaccagcaaaagcaggacgacggccggggtctggtgcttcctggctacaagtacctcggacccttcaacggactcgacaagggggagcccgtcaacgcggcggacgcagcggccctcgagcacgacaaggcctacgaccagcagctgcaggcgggtgacaatccgtacctgcggtataaccacgccgacgccgagttccaggagcgtctgcaagaagatacgtcttttgggggcaacctcgggcgagcagtcttccaggccaagaagagggttctcgaaccttttggtctggttgaggaaggtgctaagacggctcctggaaagaaacgtccggtagagcagtcgccacaagagccagactcctcctcgggcattggcaagacaggccagcagcccgctaaaaagagactcaattttggtcagactggcgactcagagtcagtcccagaccctcaacctctcggagaaccaccagcagcccccacaagtttgggatctaatacaatggcttcaggcggtggcgcaccaatggcagacaataacgagggcgccgacggagtgggtaattcctcgggaaattggcattgcgattccacatggatgggcgacagagtcatcaccaccagcacccgaacctgggccctgcccacctacaacaaccacctctacaaacaaatttccagccaatcaggagcttcaaacgacaaccactactttggctacagcaccccttgggggtattttgactttaacagattccactgccacttttcaccacgtgactggcagcgactcattaacaacaactggggattccggcccaagaaactcaacttcaagctctttaacatccaggtcaaggaggtcacgcagaatgaaggcaccaagaccatcgccaataacctcaccagcaccatccaggtgtttacggactcggagtaccagctgccgtacgttctcggctctgcccaccagggctgcctgcctccgttcccggcggacgtgttcatgattccccagtacggctacctaacactcaacaacggtagtcaggccgtgggacgctcctccttctactgcctggaatactttccttcgcagatgctgagaaccggcaacaacttccagtttacttacaccttcgaggacgtgcctttccacagcagctacgcccacagccagagcttggaccggctgatgaatcctctgattgaccagtacctgtattacttgtctcggactcaaacaacaggaggcacgacaaatacgcagactctgggcttcagccaaggtgggcctaatacaatggccaatcaggcaaagaactggctgcctggaccctgttaccgccagcagcgagtatcaaagacatctgcggataacaacaacagtgaatactcgtggactggagctaccaagtaccacctcaatggcagagactctctggtgaatccgggcccggccatggcaagccacaaggacgatgaagaaaagttttttcctcagagcggggttctcatctttgggaagcaaggctcagagaaaacaaatgtggacattgaaaaggttatgattacagacgaagaggaaatcaggacaaccaatcccgtggctacggagcagtatggttctgtatctaccaacctccagagaggcaacagacaagcagctaccgcagatgtcaacacacagggcgttcttccaggcatggtctggcaggacagagatgtgtaccttcagggtcccatttgggccaaaattcctcacacagatggacactttcacccgtcccctcttatgggcggctttggactcaagaacccgcctcctcagatcctcatcaaaaacacgcctgttcctgcgaatcctccggcagagttttcagctacaaagtttgcttcattcatcacccaatactccacaggacaagtgagtgtggaaattgaatgggagctgcagaaagaaaacagcaagcgctggaatcccgaagtgcagtacacatccaattatgcaaaatctgccaacgttgattttactgtggacactaatggcgtgtattcagagcctcgccccattggcaccagatacctcacccgtaatctgtaa

SEQ ID NO: 388 - protein, 735 aa, Artificial Sequence
  Description of Artificial Sequence: Synthetic polypeptide
MAADGYLPDWLEDNLSEGIREWWALKPGAPKPKANQQKQDDGRGLVLPGYKYLGPFNGLDKGEPVNAADAAALEHDKAYDQQLQAGDNPYLRYNHADAEFQERLQEDTSFGGNLGRAVFQAKKRVLEPFGLVEEGAKTAPGKKRPVEQSPQEPDSSSGIGKTGQQPAKKRLNFGQTGDSESVPDPQPLGEPPAAPTSLGSNTMASGGGAPMADNNEGADGVGNSSGNWHCDSTWMGDRVITTSTRTWALPTYNNHLYKQISSQSGASNDNHYFGYSTPWGYFDFNRFHCHFSPRDWQRLINNNWGFRPKKLNFKLFNIQVKEVTQNEGTKTIANNLTSTIQVFTDSEYQLPYVLGSAHQGCLPPFPADVFMIPQYGYLTLNNGSQAVGRSSFYCLEYFPSQMLRTGNNFQFTYTFEDVPFHSSYAHSQSLDRLMNPLIDQYLYYLSRTQTTGGTTNTQTLGFSQGGPNTMANQAKNWLPGPCYRQQRVSKTSADNNNSEYSWTGATKYHLNGRDSLVNPGPAMASHKDDEEKFFPQSGVLIFGKQGSEKTNVDIEKVMITDEEEIRTTNPVATEQYGSVSTNLQRGNRQAATADVNTQGVLPGMVWQDRDVYLQGPIWAKIPHTDGHFHPSPLMGGFGLKNPPPQILIKNTPVPANPPAEFSATKFASFITQYSTGQVSVEIEWELQKENSKRWNPEVQYTSNYAKSANVDFTVDTNGVYSEPRPIGTRYLTRNL

SEQ ID NO: 389 - DNA, 2214 bp, Artificial Sequence; identical to SEQ ID NO: 379
  Description of Artificial Sequence: Synthetic polynucleotide

SEQ ID NO: 390 - protein, 737 aa, Artificial Sequence; identical to SEQ ID NO: 380
  Description of Artificial Sequence: Synthetic polypeptide

SEQ ID NO: 391 - DNA, 2196 bp, Artificial Sequence
  Description of Artificial Sequence: Synthetic polynucleotide
atggctgctgacggttatcttccagattggctcgaggacaacctctctgagggcattcgcgagtggtgggcgctgaaacctggagccccgcaacccaaagccaaccagcaaaagcaggacgacggccggggtctggtgcttcctggctacaagtacctcggacccttcaacggactcgacaagggggagcccgtcaacgaggcggacgccgcggccctcgagcacgacaaggcctacgaccagcagctcaaagcgggtgacaatccgtacctgcggtataatcacgccgacgccgagtttcaagagcgtctgcaagaagatacgtcctttgggggcaacctcgggcgagcagtcttccaggccaaaaagagggtactcgagcctctgggtctggttgaggaaggcgctaagacggctcctggaaagaagcggccagtagaaccggactccagctcgggcatcggcaagtcaggccagcagcccgcgaaaaagagactgaattttgggcagactggcgactcagagtcagtgcctgacccccaacctctctcagaaccacccgcaggtccctctggtctgggatctggtacaatggctgctggcggtggcgctccaatggcagacaataacgaaggcgccgacggagtgggtaatgtctcaggaaattggcattgcgattccacatggctgggcgaccgagtcatcaccaccagcactcggacctgggccctccccacctacaacaaccacctctacaagcaaatctccaacgggacctcgggaggcagcagcaacgacaacacctactttggctacagcaccccctgggggtattttgactttaacagattccactgccacttttcaccacgtgactggcagcgactcatcaacaacaactgggggttccggcccaagaagctcaacttcaagctcttcaacatccaggtcaaggaggtcacccagaatgaaggcaccaagaccatcgccaataacctcaccagcacggtgcaggtctttacggactcggagtaccagctcccgtacgtgctcggctctgcccaccagggctgcctgcctccgttcccggcggacgtgttcatgattccgcagtacgggtacctgacgctgaacaacgggagccaggccgtggggcgatcctccttctactgcctggagtactttccctcgcagatgctgagaacgggcaacaactttaccttcagctacaccttcgaggacgtgcccttccacagcagctacgcgcacagccagagcctggaccggctgatgaacccgctgattgaccagtacctgtactacctgtctcggactcagaccaacgggaccaatgccacgcagactctgttgtttgctcaggccgggcctcagaacatgtcggctcaggccaagaactggctgcctggtccttgctatcggcagcagcgcgtctctacgacagtgtcgcaaaacaacaacagcaactttacctggaccggggcgaccaagtaccacctgaacggccgagactccctggtgagccccggtgtcgccatggcaacgcacaaggacgacgaggagcgcttcttcccgagcagcggggtcctgatgtttggcaagcagggcgctggaaaggacaatgtcgagtacaccaacgtgatgctcaccagcgaggaggagatcaagaccaccaaccctgtggccacggagcagtacggcgtggtggctgacaatctgcagcagaccaactcagctcccattgtgggggcagtcaacagccagggggccttacccggtatggtctggcagaaccgggacgtgtacctgcagggtcccatctgggccaagatcccgcatacggacggcaactttcacccgtctcctctcatgggcggctttggactgaaacacccgcctccccagatcctgatcaaaaacacgccggtacctgcggatcccccggtgaactttacggacgctaagctggcgagtttcatcacgcagtacagcaccgggcaggtcagcgtggagattgagtgggagctgcagaaggagaacagcaagcgctggaatcccgagattcagtacacttccaattattataaatcagctaatgtggactttgccgtcaatgcagatggtgtatatagtgaaccccgccccattggcactcgttacctcacccgtaatctgtaa

SEQ ID NO: 392 - protein, 731 aa, Artificial Sequence
  Description of Artificial Sequence: Synthetic polypeptide
MAADGYLPDWLEDNLSEGIREWWALKPGAPQPKANQQKQDDGRGLVLPGYKYLGPFNGLDKGEPVNEADAAALEHDKAYDQQLKAGDNPYLRYNHADAEFQERLQEDTSFGGNLGRAVFQAKKRVLEPLGLVEEGAKTAPGKKRPVEPDSSSGIGKSGQQPAKKRLNFGQTGDSESVPDPQPLSEPPAGPSGLGSGTMAAGGGAPMADNNEGADGVGNVSGNWHCDSTWLGDRVITTSTRTWALPTYNNHLYKQISNGTSGGSSNDNTYFGYSTPWGYFDFNRFHCHFSPRDWQRLINNNWGFRPKKLNFKLFNIQVKEVTQNEGTKTIANNLTSTVQVFTDSEYQLPYVLGSAHQGCLPPFPADVFMIPQYGYLTLNNGSQAVGRSSFYCLEYFPSQMLRTGNNFTFSYTFEDVPFHSSYAHSQSLDRLMNPLIDQYLYYLSRTQTNGTNATQTLLFAQAGPQNMSAQAKNWLPGPCYRQQRVSTTVSQNNNSNFTWTGATKYHLNGRDSLVSPGVAMATHKDDEERFFPSSGVLMFGKQGAGKDNVEYTNVMLTSEEEIKTTNPVATEQYGVVADNLQQTNSAPIVGAVNSQGALPGMVWQNRDVYLQGPIWAKIPHTDGNFHPSPLMGGFGLKHPPPQILIKNTPVPADPPVNFTDAKLASFITQYSTGQVSVEIEWELQKENSKRWNPEIQYTSNYYKSANVDFAVNADGVYSEPRPIGTRYLTRNL

SEQ ID NO: 393 - DNA, 2196 bp, Artificial Sequence
  Description of Artificial Sequence: Synthetic polynucleotide
atggctgctgacggttatcttccagattggctcgaggacaacctctctgagggcattcgcgagtggtgggcgctgaaacctggagccccgcaacccaaagccaaccagcaaaagcaggacgacggccggggtctggtgcttcctggctacaagtacctcggacccttcaacggactcgacaagggggagcccgtcaacgaggcggacgccgcggccctcgagcacgacaaggcctacgaccagcagctcaaagcgggtgacaatccgtacctgcggtataatcacgccgacgccgagtttcaagagcgtctgcaagaagatacgtcctttgggggcaacctcgggcgagcagtcttccaggccaaaaagagggtactcgagcctctgggtctggttgaggaaggcgctaagacggctcctggaaagaagcggccagtagaaccggactccagctcgggcatcggcaagtcaggccggcagcccgcgaaaaagagactgaattttgggcagactggcgactcagagtcagtgcctgacccccaacctctctcagaaccacccgcaggtccctctggtctgggatctggtacaatggctgcaggcggtggcgctccaatggcagacaataacgaaggcgccgacggagtgggtaatgcctcaggaaattggcattgcgattccacatggctgggcgaccgagtcatcaccaccagcactcggacctgggccctccccacctacaacaaccacctctacaagcaaatctccaacgggacctcgggaggcagcagcaacgacaacacctactttggctacagcaccccctgggggtattttgactttaacagattccactgccacttttcaccacgtgactggcagcgactcatcaacaacaactggggattccggcccaagaggctcaacttcaagctcttcaacatccaggtcaaggaggtcacccagaatgaaggcaccaagaccatcgccaataacctcaccagcacggtgcaggtctttacggactcgaagtaccagctcccgtacgtgctcggctctgcccaccagggctgcctgcctccgttcccggcggacgtgttcatgattccgcagtacgggtacctgacgctgaacaacgggagccaggccgtggggcgatcctccttctactgcctggagtactttccctcgcagatgctgagaacgggcaacaactttaccttcagctacaccttcgaggacgtgcccttccacagcagctacgcgcacagccagagcctggaccggctgatgaacccgctgattgaccagtacctgtactacctgtctcggactcagaccaacgggaccaatgccacgcagactctgttgtttgctcaggccgggcctcagaacatgtcggctcaggccaagaactggctgcctggtccttgctatcggcagcagcgcgtctctacgacagtgtcgcaaaacaacaacagcaactttacctggaccggggcgaccaagtaccacctgaacggccgagactccctggtgaaccccggtgtcgccatggcaacgcacaaggacgacgaggagcgcttcttcccgagcagcggggtcctgatgtttggcaagcagggcgctggaaaggacaatgtcgagtacaccaacgtgatgctcaccagcgaggaggagatcaagaccaccaaccctgtggccacggagcagtacggtgtggtggctgacaatctgcagcagaccaactcggctcccattgtgggggcagtcaacagccagggggccttacccggtatggtctggcagaaccgggacgtgtacctgcagggtcccatctgggccaagatcccgcatacggacggcaactttcacccgtctcctctcatgggcggctttggactgaaacacccgcctccccagatcctgatcaaaaacacgccggtacctgcggatcccccggtgaactttacggacgctaagctggcgagtttcatcacgcagtacagcaccgggcaggtcagcgtggagattgagtgggagctgcagaaggagaacagcaagcgctggaatcccgagattcagtacacttccaattattataaatcagctaatgtggactttgccgtcaatgcagatggtgtatatagtgaaccccgccccattggcactcgttacctcacccgtaatctgtaa

SEQ ID NO: 394 - protein, 731 aa, Artificial Sequence
  Description of Artificial Sequence: Synthetic polypeptide
MAADGYLPDWLEDNLSEGIREWWALKPGAPQPKANQQKQDDGRGLVLPGYKYLGPFNGLDKGEPVNEADAAALEHDKAYDQQLKAGDNPYLRYNHADAEFQERLQEDTSFGGNLGRAVFQAKKRVLEPLGLVEEGAKTAPGKKRPVEPDSSSGIGKSGRQPAKKRLNFGQTGDSESVPDPQPLSEPPAGPSGLGSGTMAAGGGAPMADNNEGADGVGNASGNWHCDSTWLGDRVITTSTRTWALPTYNNHLYKQISNGTSGGSSNDNTYFGYSTPWGYFDFNRFHCHFSPRDWQRLINNNWGFRPKRLNFKLFNIQVKEVTQNEGTKTIANNLTSTVQVFTDSKYQLPYVLGSAHQGCLPPFPADVFMIPQYGYLTLNNGSQAVGRSSFYCLEYFPSQMLRTGNNFTFSYTFEDVPFHSSYAHSQSLDRLMNPLIDQYLYYLSRTQTNGTNATQTLLFAQAGPQNMSAQAKNWLPGPCYRQQRVSTTVSQNNNSNFTWTGATKYHLNGRDSLVNPGVAMATHKDDEERFFPSSGVLMFGKQGAGKDNVEYTNVMLTSEEEIKTTNPVATEQYGVVADNLQQTNSAPIVGAVNSQGALPGMVWQNRDVYLQGPIWAKIPHTDGNFHPSPLMGGFGLKHPPPQILIKNTPVPADPPVNFTDAKLASFITQYSTGQVSVEIEWELQKENSKRWNPEIQYTSNYYKSANVDFAVNADGVYSEPRPIGTRYLTRNL

SEQ ID NO: 395 - DNA, 2196 bp, Artificial Sequence
  Description of Artificial Sequence: Synthetic polynucleotide
atggctgctgacggttatcttccagattggctcgaggacaacctctctgagggcattcgcgagtggtgggcgctgaaacctggagccccgcaacccaaagccaaccagcaaaagcaggacgacggccggggtctggtgcttcctggctacaagtacctcggacccttcaacggactcgacaagggggagcccgtcaacgaggcggacgccgcggccctcgagcacgacaaggcctacgaccagcagctcaaagcgggtgacaatccgtacctgcggtataatcacgccgacgccgagtttcaagagcgtctgcaagaagatacgtcctttgggggcaacctcgggcgagcagtcttccaggccaaaaagagggtactcgagcctctgggtctggttgaggaaggcgctaagacggctcctggaaagaagcggccagtagaaccggactccagctcgggcatcggcaagtcaggccagcagcccgcgaaaaagagactgaattttgggccgactggcgactcagagtcagtgcctgacccccaacctctctcagaaccacctgcaggtccctctggtctgggatctggtacaatggctgcaggcggtggcgctccaatggcagacaataacgaaggcgccgacggagtgggtaatgtctcaggaaattggcattgcgattccacatggctgggcgaccgagtcatcaccaccagcactcggacctgggccctccccacctacaacaaccacctctacaagcaaatctccaacgggacctcgggaggcagcagcaacgacaacacctactttggctacagcaccccctgggggtattttgactttaacagattccactgccacttttcaccacgcgactggcagcgactcatcaacaacaactggggattccggcccaagaagctcaacttcaagctcttcaacatccaggtcaaggaggtcacccagaatgaaggcaccaagaccaccgccaataacctcaccagcacggtgcaggtctttacggactcggagtaccagctcccgtacgtgctcggctctgcccaccagggctgcctgcctccgttcccggcggacgtgttcatgattccgcagtacgggtacctgacgctgaacaacgggagccaggccgtggggcgatcctccttctactgcctggagtactttccctcgcagatgctgagaacgggcaacaactttaccttcagctacaccttcgaggacgtgcccttccacagcagctacgcgcacagccagagcctggaccggctgatgaacccgctgattgaccagtacctgtactacctgtctcggactcagaccaacgggaccaatgccacgcagactctgttgtttgctcaggccgggcctcagaacatgtcggctcaggccaagaactggctgcctggtccttgctatcggcagcagcgcgtctctacggcagtgtcgcaaaacaacaacagcaactttacctggaccggggcgaccaagtaccacctgaacggccgagactccctggtgaaccccggtgtcgccatggcaacgcacaaggacgacgaggagcgcttcttcccgagcagcggggtcctgatgtttggcaagcagggcgctggaaaggacaatgtcgagtacaccaacgtgatgctcaccagcgaggaggagatcaagaccaccaaccctgtggccacggagcagtacggtgtggtggctgacaatctgcagcagaccaactcggctcccattgtgggggcagtcaacagccagggggccttacccggtatggtctggcagaaccgggacgtgtacctgcagggtcccatctgggccaagatcccgcatacggacggcaactttcacccgtctcctctcatgggcggctttggactgaaacacccgcctccccagatcctgatcaaaaacacgccggtacctgcggatcccccggtgaactttacggacgctaagctggcgagtttcatcacgcagtacagcaccgggcaggtcagcgtggagattgagtgggagctgcagaaggagaacagcaagcgctggaatcccgagattcagtacacttccaattattataaatcagctaatgtggactttgccgtcaatgcagatggtgtatatagcgaaccccgccccattggcactcgttacctcacccgtaatctgtaa

SEQ ID NO: 396 - protein, 731 aa, Artificial Sequence
  Description of Artificial Sequence: Synthetic polypeptide
MAADGYLPDWLEDNLSEGIREWWALKPGAPQPKANQQKQDDGRGLVLPGYKYLGPFNGLDKGEPVNEADAAALEHDKAYDQQLKAGDNPYLRYNHADAEFQERLQEDTSFGGNLGRAVFQAKKRVLEPLGLVEEGAKTAPGKKRPVEPDSSSGIGKSGQQPAKKRLNFGPTGDSESVPDPQPLSEPPAGPSGLGSGTMAAGGGAPMADNNEGADGVGNVSGNWHCDSTWLGDRVITTSTRTWALPTYNNHLYKQISNGTSGGSSNDNTYFGYSTPWGYFDFNRFHCHFSPRDWQRLINNNWGFRPKKLNFKLFNIQVKEVTQNEGTKTTANNLTSTVQVFTDSEYQLPYVLGSAHQGCLPPFPADVFMIPQYGYLTLNNGSQAVGRSSFYCLEYFPSQMLRTGNNFTFSYTFEDVPFHSSYAHSQSLDRLMNPLIDQYLYYLSRTQTNGTNATQTLLFAQAGPQNMSAQAKNWLPGPCYRQQRVSTAVSQNNNSNFTWTGATKYHLNGRDSLVNPGVAMATHKDDEERFFPSSGVLMFGKQGAGKDNVEYTNVMLTSEEEIKTTNPVATEQYGVVADNLQQTNSAPIVGAVNSQGALPGMVWQNRDVYLQGPIWAKIPHTDGNFHPSPLMGGFGLKHPPPQILIKNTPVPADPPVNFTDAKLASFITQYSTGQVSVEIEWELQKENSKRWNPEIQYTSNYYKSANVDFAVNADGVYSEPRPIGTRYLTRNL

SEQ ID NO: 397 - DNA, 4404 bp, Artificial Sequence
  Description of Artificial Sequence: Synthetic polynucleotide
atggctgccgatggttatcttccagattggctcgagggcaacctctctgagggcattcgcgagtggtgggacttgaaacctggagccccgaaacccaaagccaaccagcaaaagcaggacgacggccggggtctggtgcttcctggctacaggtacctcggacccttcaacggactcgacaagggagagccggtcaacgaggcagacgccgcggccctcgagcacgacaaggcctacgacaagcagctcgagcagggggacaacccgtacctcaagtacaaccacgccgacgccgagtttcaggagcgtcttcaagaagatacgtcttttgggggcaacctcgggcgagcagtcttccaggccaagaagcgggttctcgaacctctcggtctggttgaggaaggcgctaagacggctcctggaaagaagagacccatagaatcccccgactcctccacgggcatcggcaagaacggccagccgcccgctaaaaagaagctcaactttgggcagactggcgactcagagtcagtgcccgacccccaacctctcggagaacctcccgccgcgccctcaggtctgggatctggtacaatggctgcaggcggtggcgcaccaatggcagacaataacgaaggcgccgacggagtgggtaatgcctccggaaattggcattgcgattccacatggctgggcgacagagtcatcaccaccagcacccgcacctgggccctgcccacctacaacaaccacctctacaagcagatatcaagtcagagcggggctaccaacgacaaccacttcttcggctacagcaccccctggggctattttgacttcaacagattccactgccacttctcaccacgtgactggcagcgactcatcaacaacaactggggattccggcccagaaagctgcggttcaagttgttcaacatccaggtcaaggaggtcacgacgaacgacggcgttacgaccatcgctaataaccttaccagcacgattcaggtcttctcggactcggagtaccaactgccgtacgtcctcggctctgcgcaccagggctgcctccctccgttccctgcggacgtgttcatgattcctcagtacggatatctgactctaaacaacggcagtcagtctgtgggacgttcctccttctactgcctggagtactttccttctcagatgctgagaacgggcgataactttgaattcagctacacctttgaggaagtgcctttccacagcagctatgcgcacagccagagcctggaccggctgatgaatcccctcatcgaccagtacctgtactacctggcccggacccagagcactacggggtccacaagggagctgcagttccatcaggctgggcccaacaccatggccgagcaatcaaagaactggctgcccggaccctgttatcggcagcagagactgtcaaaaaacatagacagcaacaacaacagtaactttgcctggaccggggccactaaataccatctgaatggtagaaattcattaaccaacccgggcgtagccatggccaccaacaaggacgacgaggaccagttctttcccatcaacggagtgctggtttttggcaaaacgggggctgccaacaagacaacgctggaaaacgtgctaatgaccagcgaggaggagatcaaaaccaccaatcccgtggctacagaagaatacggtgtggtctccagcaacctgcaatcgtctacggccggaccccagacacagactgtcaacagccagggggctctgcccggcatggtctggcagaaccgggacgtgtacctgcagggtcccatctgggccaaaattcctcacacggacggcaactttcacccgtctcccctgatgggcggatttggactcaaacacccgcctcctcaaattctcatcaaaaacaccccggtacctgctaatcctccagaggtgtttactcctgccaagtttgcctcatttatcacgcagtacagcaccggccaggtcagcgtggagatcgagtgggaactgcagaaagaaaacagcaaacgctggaatccagagattcagtacacctcaaattatgccaagtctaataatgtggaatttgctgtcaacaacgaaggggtttatactgagcctcgccccattggcacccgttacctcacccgtaacctgtaaatggctgccgatggttatcttccagattggctcgaggacaacctctctgagggcattcgcgagtggtgggacttgaaacctggagccccgaaacccaaagccaaccagcaaaagcaggacgacggccggggtctggtgcttcctggctacaagtacctcggacccttcaacggactcgacaagggggagcccgtcaacgcggcggacgcagcggccctcgagcacgacaaggcctacgaccagcagctcaaagcgggtgacaatccgtacctgcggtataaccacgccgacgccgagtttcaggagcgtctgcaagaagatacgtcttttgggggcaacctcgggcgagcagtcttccaggccaagaagcgggttctcgaacctctcggtctggttgaggaaggcgctaagacggctcctggaaagaagagaccggtagagccatcaccccagcgttctccagactcctctacgggcatcggcaagaaaggccagcagcccgcgaaaaagagactcaactttgggcagactggcgactcagagtcagtgcccgaccctcaaccaatcggagaaccccccgcaggcccctctggtctgggatctggtacaatggctgcaggcggtggcgctccaatggcagacaataacgaaggcgccgacggagtgggtagttcctcaggaaattggcattgcgattccacatggctgggcgacagagtcatcaccaccagcacccgaacctgggccctccccacctacaacaaccacctctacaagcaaatctccaacgggacttcgggaggaagcaccaacgacaacacctacttcggctacagcaccccctgggggtattttgactttaacagattccactgccacttctcaccacgtgactggcagcgactcatcaacaacaactggggattccggcccaagagactcaacttcaagctcttcaacatccaggtcaaggaggtcacgcagaatgaaggcaccaagaccatcgccaataaccttaccagcacgattcaggtctttacggactcggaataccagctcccgtacgtcctcggctctgcgcaccagggctgcctgcctccgttcccggcggacgtcttcatgattcctcagtacgggtacctgactctgaacaatggcagtcaggccgtgggccgttcctccttctactgcctggagtactttccttctcaaatgctgagaacgggcaacaactttgagttcagctaccagtttgaggacgtgccttttcacagcagctacgcgcacagccaaagcctggaccggctgatgaaccccctcatcgaccagtacctgtactacctgtctcggactcagtccacgggaggtaccgcaggaactcagcagttgctattttctcaggccgggcctaataacatgtcggctcaggccaaaaactggctacccgggccctgctaccggcagcaacgcgtctccacgacactgtcgcaaaataacaacagcaactttgcctggaccggtgccaccaagtatcatctgaatggcagagactctctggtaaatcccggtgtcgctatggcaacccacaaggacgacgaagagcgattttttccgtccagcggagtcttaatgtttgggaaacagggagctggaaaagacaacgtggactatagcagcgttatgctaaccagtgaggaagaaattaaaaccaccaacccagtggccacagaacagtacggcgtggtggccgataacctgcaacagcaaaacgccgctcctattgtaggggccgtcaacagtcaaggagccttacctggcatggtctggcagaaccgggacgtgtacctgcagggtcctatctgggccaagattcctcacacggacggaaactttcatccctcgccgctgatgggaggctttggactgaaacacccgcctcctcagatcctgattaagaatacacctgttcccgcggatcctccaactaccttcagtcaagctaagctggcgtcgttcatcacgcagtacagcaccggacaggtcagcgtggaaattgaatgggagctgcagaaagaaaacagcaaacgctggaacccagagattcaatacacttccaactactacaaatctacaaatgtggactttgctgttaacacagatggcacttattctgagcctcgccccatcggcacccgttacctcacccgtaatctgtaa

SEQ ID NO: 398 - protein, 738 aa, Artificial Sequence; identical to SEQ ID NO: 16
  Description of Artificial Sequence: Synthetic polypeptide

SEQ ID NO: 399 - DNA, 3129 bp, Artificial Sequence
  Description of Artificial Sequence: Synthetic polynucleotide
gaattcgccctttctacggctgcgtcaactggaccaatgagaactttcccttcaacgattgcgtcgacaagatggtgatctggtgggaggagggcaagatgacggccaaggtcgtggagtccgccaaggccattctcggcggcagcaaagtgcgcgtggaccaaaagtgcaagtcgtccgcccagatcgaccccacccccgtgatcgtcacctccaacaccaacatgtgcgccgtgattgacgggaacagcaccaccttcgagcaccagcagccgttgcaggaccggatgttcaagtttgaactcacccgccgtctggagcacgactttggcaaggtgacaaagcaggaagtcagagagttcttccgctgggcgcaggatcacgtgaccgaggtggcgcacgagttctacgtcagaaagggtggagccaacaagagacccgcccccgatgacgcggataaaagcgagcccaagcgggcctgcccctcagtcgcggatccatcgacgtcagacgcggaaggagctccggtggactttgccgacaggtaccaaaacaaatgttctcgtcacgcgggcatgcttcagatgctgtttccctgcaaaacatgcgagagaatgaatcagaatttcaacatttgcttcacgcacgggaccagagactgttcagaatgtttccccggcgtgtcagaatctcaaccggtcgtcagaaaaaagacgtatcggaaactctgtgcgattcatcatctgctgggggcgggcacccgagattgcttgctcggcctgcgatctggtcaacgtggacctagatgactgtgtttctgagcaataaatgacttaaaccaggtatggctgccgatggttatcttccagattggctcgaggacaacctctctgagggcattcgcgagtggtgggacttgaaacctggagccccgaaacccaaagccaaccagcaaaagcaggacgacggccggggtctggtgcttcctggctacaagtacctcggacccttcaacggactcgacaagggggagcccgtcaacgcggcggacgcagcggccctcgagcacgacaaggcctacgaccagcagctcaaagcgggtgacaatccgtacctgcggtataaccacgccgacgccgagtttcaggagcgtctgcaagaagatacgtcttttgggggcaacctcgggcgagcagtcttccaggccaagaagcgggttctcgaacctctcggtctggttgaggaaggcgctaagacggctcctggaaagaagagaccggtagagccatcaccccagcgttctccagactcctctacgggcatcggcaagaaaggccagcagcccgcgaaaaagagactcaactttgggcagactggcgactcagagtcagtgcccgaccctcaaccaatcggagaaccccccgcaggcccctctggtctgggatctggtacaatggctgcaggcggtggcgctccaatggcagacaataacgaaggcgccgacggagtgggtagttcctcaggaaattggcattgcgattccacatggctgggcgacagagtcatcaccaccagcacccgaacctgggccctccccacctacaacaaccacctctacaagcaaatctccaacgggacttcgggaggaagcaccaacgacaacacctacttcggctacagcaccccctgggggtattttgactttaacagattccactgccacttctcaccacgtgactggcagcgactcatcaacaacaactggggattccggcccaagagactcaacttcaagctcttcaacatccaggtcaaggaggtcacgcagaatgaaggcaccaagaccatcgccaataaccttaccagcacgattcaggtctttacggactcggaataccagctcccgtacgtcctcggctctgcgcaccagggctgcctgcctccgttcccggcggacgtcttcatgattcctcagtacgggtacctgactctgaacaatggcagtcaggccgtgggccgttcctccttctactgcctggagtactttccttctcaaatgctgagaacgggcaacaactttgagttcagctaccagtttgaggacgtgccttttcacagcagctacgcgcacagccaaagcctggaccggctgatgaaccccctcatcgaccagtacctgtactacctgtctcggactcagtccacgggaggtaccgcaggaactcagcagttgctattttctcaggccgggcctaataacatgtcggctcaggccaaaaactggctacccgggccctgctaccggcagcaacgcgtctccacgacactgtcgcaaaataacaacagcaactttgcctggaccggtgccaccaagtatcatctgaatggcagagactctctggtaaatcccggtgtcgctatggcaacccacaaggacgacgaagagcgattttttccgtccagcggagtcttaatgtttgggaaacagggagctggaaaagacaacgtggactatagcagcgttatgctaaccagtgaggaagaaattaaaaccaccaacccagtggccacagaacagtacggcgtggtggccgataacctgcaacagcaaaacgccgctcctattgtaggggccgtcaacagtcaaggagccttacctggcatggtctggcagaaccgggacgtgtacctgcagggtcctatctgggccaagattcctcacacggacggaaactttcatccctcgccgctgatgggaggctttggactgaaacacccgcctcctcagatcctgattaagaatacacctgttcccgcggatcctccaactaccttcagtcaagctaagctggcgtcgttcatcacgcagtacagcaccggacaggtcagcgtggaaattgaatgggagctgcagaaagaaaacagcaaacgctggaacccagagattcaatacacttccaactactacaaatctacaaatgtggactttgctgttaacacagatggcacttattctgagcctcgccccatcggcacccgttacctcacccgtaatctgtaattgcttgttaatcaataaaccggttgattcgtttcagttgaactttggtctctgcgaagggcgaattc

SEQ ID NO: 400 - protein, 738 aa, Artificial Sequence; identical to SEQ ID NO: 16
  Description of Artificial Sequence: Synthetic polypeptide

SEQ ID NO: 401 - protein, 733 aa, Artificial Sequence
  Description of Artificial Sequence: Synthetic polypeptide
MAADGYLPDWLEDNLSEGIREWWDLRPGAPKPKANQQKQDDGRGLVLPGYKYLGPFNGLDKGEPVNEADAAALEHDKAYDKQLEQGDNPYLKYNHADAEFQERLQEDTSFGGNLGRAVFQAKKRVLEPLGLVEEGAKTAPGKKRPIESPDSSTGIGKKGQQPAKKRLNFGQTGDSESVPDPQPIGEPPAGPSGLGSGTMAAGGGAPMADNNEGADGVGSSSGNWHCDSTWLGDRVITTSTRTWALPTYNNHLYKQISNGTSGGSTNDNTYFGYSTPWGYFDFNRFHCHFSPRDWQRLINNNWGFRPKRLNFKLFNIQVKEVTQNEGTKTIANNLTSTIQVFTDSEYQLPYVLGSAHQGCLPPFPADVFMIPQYGYLTLNNGSQAVGRSSFYCLEYFPSQMLRTGNNFEFSYQFEDVPFHSSYAHSQSLDRLMNPLIDQYLYYLSRTQSTGGTAGTQQLLFSQAGPNNMSAQAKNWLPGPCYRQQRVSTTVSQNNNSNFAWTGATKYHLNGRDSLVNPGVAMATHKGDEERFFPSSGVLMFGKQGAGKDNVDYSSVMLTSEEEIKTTNPVATEQYGVVADNLQQQNAAPIVGAVNSQGALPGMVWQNRDVYLQGPIWAKIPHTDGNFHPSPLMGGFGLKHPPPQILIKNTPVPADPPTTFSQAKLASFITQYSTGQVSVEIEWELQKENSKRWNPEIQYTSNYYKSTNVDFAVNTEGTYSEPRPIGTRYLTRNL

SEQ ID NO: 402 - DNA, 2501 bp, Artificial Sequence
  Description of Artificial Sequence: Synthetic polynucleotide
gaattcgcccttggctgcgtcaactggaccaatgagaactttcccttcaacgattgcgtcgacaagatggtgatctggtgggaggagggcaagatgacggccaaggtcgtggagtccgccaaggccattcatcatctgctggggcgggctcccgagattgcttgctcggcctgcgatctggtcaacgtggacctggatgactgtgtttctgagcaataaatgacttaaaccaggtatggctgccgatggttatcttccagattggctcgaggacaacctctctgagggcattcgcgagtggtgggacttgagacctggagccccgaaacccaaagccaaccagcaaaagcaggacgacggccggggtctggtgcttcctggctacaagtacctcggacccttcaacggactcgacaagggagagccggtcaacgaggcagacgccgcggccctcgagcacgacaaggcctacgacaagcagctcgagcagggggacaacccgtacctcaagtacaaccacgccgacgccgagtttcaggagcgtcttcaagaagatacgtcttttgggggcaacctcgggcgagcagtcttccaggccaagaagcgggttctcgaacctctcggtctggttgaggaaggcgctaagacggctcctggaaagaagagacccatagaatcccccgactcctccacgggcatcggcaagaaaggccagcagcccgctaaaaagagactcaactttgggcagactggcgactcagagtcagtgcccgaccctcaaccaatcggagaaccccccgcaggcccctctggtctgggatctggcacaatggctgcaggcggtggcgctccaatggcagacaataacgaaggcgccgacggagtgggtagttcctcaggaaattggcattgcgattccacatggctgggcgacagagtcatcaccaccagcacccgaacctgggccctccccacctacaacaaccacctctacaagcaaatctccaacgggacatcgggaggaagcaccaacgacaacacctacttcggctacagcaccccctgggggtattttgactttaacagattccactgccacttctcaccacgtgactggcagcgactcatcaacaacaactggggattccggcccaagagactcaacttcaagctcttcaacatccaggtcaaggaggtcacgcagaatgaaggcaccaagaccatcgccaataaccttaccagcacgattcaggtctttacggactcggaataccagctcccgtacgtcctcggctctgcgcaccagggctgcctgcctccgttcccggcggacgtcttcatgattcctcagtacgggtacctgactctgaacaacggcagtcaggccgtgggccgttcctccttctactgcctggagtactttccttctcaaatgctgagaacgggcaacaactttgagttcagctaccagtttgaggacgtgccttttcacagcagctatgcgcacagccaaagcctggaccggctgatgaaccccctcatcgaccagtacctgtactacctgtctcggactcagtccacgggaggtaccgcaggaactcagcagttgctattttctcaggccgggcctaataacatgtcggctcaggccaaaaactggctacccgggccctgctaccggcagcaacgcgtctccacgacagtgtcgcaaaataacaacagcaactttgcttggaccggtgccaccaagtatcatctgaatggcagagactctctggtaaatcccggtgtcgctatggcaacgcacaagggcgacgaagagcgattttttccatccagcggagtcttgatgtttgggaaacagggagctggaaaagacaacgtagactatagcagcgttatgctaaccagtgaggaagaaatcaaaaccaccaacccagtggccacagaacagtacggcgtggtggccgataacctgcaacagcaaaacgccgctcctattgtaggggccgtcaacagtcaaggagccttacctggcatggtctggcagaaccgggacgtgtacctgcagggtcctatctgggccaagattcctcacacggacggcaactttcatccttcgccgctgatgggaggctttggactgaaacacccgcctcctcagatcctgattaagaatacacctgttcccgcggatcctccaactaccttcagtcaagccaagctggcgtcgttcatcacgcagtacagcaccggacaggtcagcgtggaaattgaatgggagctgcagaaagagaacagcaagcgctggaacccagagattcagtatacttccaactactacaaatctacaaatgtggactttgctgtcaatactgagggtacttattcagagcctcgccccattggcacccgttacctcacccgtaacctgtaattgcctgttaatcaataaaccggttgattcgtttcagttgaactttggtctcaagggcgaattc

SEQ ID NO: 403 - DNA, 2187 bp, Artificial Sequence
  Description of Artificial Sequence: Synthetic polynucleotide
atggctgccgatggttatcttccagattggctcgaggacaacctctctgagggcattcgcgagtggtgggacttgaaacctggagccccgaaacccaaagccaaccagcaaaagcaggacgacggccggggtctggtgcttcctggctacaagtacctcggacccttcaacggactcgacaagggagagccggtcaacgaggcagacgccgcggccctcgagcacgacaaggcctacgacaagcagctcgagcagggggacaacccgtacctcaagtacaaccacgccgacgccgagtttcaggagcgtcttcaagaagatacgtcttttgggggcaacctcgggcgagcagtcttccaggccaagaagcgggttctcgaacctctcggtctggttgaggaaggcgctaagacggctcctggaaagaagagacccatagaatcccccgactcctccacgggcatcggcaagaaaggccagcagcccgctaaaaagaagctcaactttgggcagactggcgactcagagtcagtgcccgacccccaacctctcggagaacctcccgccgcgccctcaggtctgggatctggtacaatggctgcaggcggtggcgcaccaatggcagacaataacgaaggcgccgacggagtgggtaatgcctccggaaattggcattgcgattccacatggctgggcgacagagtcatcaccaccagcacccgcacctgggccctgcccacctacaacaaccacctctacaagcagatatcaagtcagagcggggctaccaacgacaaccacttcttcggctacagcaccccctggggctattttgacttcaacagattccactgccacttctcaccacgtgactggcagcgactcatcaacaacaactggggattccggcccagaaagctgcggttcaagttgttcaacatccaggtcaaggaggtcacgacgaacgacggcgttacgaccatcgctaataaccttaccagcacgattcaggtcttctcggactcggagtaccaactgccgtacgtcctcggctctgcgcaccagggctgcctccctccgttccctgcggacgtgttcatgattcctcagtacggatatctgactctaaacaacggcagtcagtctgtgggacgttcctccttctactgcctggagtactttccttctcagatgctgagaacgggcaataactttgaattcagctacacctttgaggaagtgcctttccacagcagctatgcgcacagccagagcctggaccggctgatgaatcccctcatcgaccagtacctgtactacctggcccggacccagagcactacggggtccacaagggagctgcagttccatcaggctgggcccaacaccatggccgagcaatcaaagaactggctgcccggaccctgttatcggcagcagagactgtcaaaaaacatagacagcaacaacaacagtaactttgcctggaccggggccactaaataccatctgaatggtagaaattcattaaccaacccgggcgtagccatggccaccaacaaggacgacgaggaccagttctttcccatcaacggagtgctggtttttggcgaaacgggggctgccaacaagacaacgctggaaaacgtgctaatgaccagcgaggaggagatcaaaaccaccaatcccgtggctacagaagaatacggtgtggtctccagcaacctgcaatcgtctacggccggaccccagacacagactgtcaacagccagggggctctgcccggcatggtctggcagaaccgggacgtgtacctgcagggtcccatctgggccaaaattcctcacacggacggcaactttcacccgtctcccctgatgggcggatttggactcaaacacccgcctcctcaaattctcatcaaaaacaccccggtacctgctaatcctccagaggtgtttactcctgccaagtttgcctcatttatcacgcagtacagcaccggccaggtcagcgtggagatcgagtgggaactgcagaaagaaaacagcaaacgctggaatccagagattcagtacacctcaaattatgccaagtctaataatgtggaatttgctgtcaacaacgaaggggtttatactgagcctcgccccattggcacccgttacctcacccgtaacctgtaa

SEQ ID NO: 404 - protein, 728 aa, Artificial Sequence; identical to SEQ ID NO: 72
  Description of Artificial Sequence: Synthetic polypeptide

SEQ ID NO: 405 - protein, 728 aa, Artificial Sequence; identical to SEQ ID NO: 164
  Description of Artificial Sequence: Synthetic polypeptide

SEQ ID NO: 406 - protein, 728 aa, Artificial Sequence; identical to SEQ ID NO: 164
  Description of Artificial Sequence: Synthetic polypeptide

SEQ ID NO: 407 - protein, 733 aa, Artificial Sequence
  Description of Artificial Sequence: Synthetic polypeptide
MAADGHLPDWLEDNLSEGIREWWDLKPGAPKPKANQQKQDDGRGLVLPGYKYLGPFNGLDKGEPVNAADAAALEHDKAYDQQLKAGDNPYLRYNHADAEFQERLQEDTSFGGNLGRAVFQAKKRVLEPLGLVEEGAKTAPGKKRPIESPDSSTGIGKKGQQPAKKKLNFGQTGDSESVPDPQPIGEPPAGPSGLGSGTMAAGGGAPMADNNEGADGVGSSSGNWHCDSTWLGDRVITTSTRTWALPTYNNHLYKQISNGTSGGSTNDNTYFGYSTPWGYFDFNRFHCHFSPRDWQRLINNSWGFRPKRLNFKLFNIQVKEVTQNEGTKTIANNLTSTIQVFTDSEYQLPYVLGSAHQGCLPPFPADVFMIPQYGYLTLNNGSQAVGRSSFYCLEYFPSQMLRTGNNFEFSYQFEDVPFHSSYAHSQSLDRLMNPLIDQYLYYLSRTQSTGGTAGTQQLLFSQAGPNNMSAQAKNWLPGPCYRQQRVSTTLSQNNNSNFAWTGATKYHLNGRDSLVNPGVAMATHKDDEERFFPSSGVLMFGKQGAGKDNVDYSSVMLTSEEEIKTTNPVATEQYGVVADNLQQQNAAPIVGAVNSQGALPGMVWQNRDVYLQGPIWAKIPHTDGNFHPSPLMGGFGLKHPPPQILIKNTPVPADPPTTFSQAKLASFITQYSTGQVSVEIEWELQKENSKRWNPEIQYTSNYYKSTNVDFAVNTEGTYSEPRPIGTRYLTRNL

SEQ ID NO: 408 - DNA, 3113 bp, Artificial Sequence
  Description of Artificial Sequence: Synthetic polynucleotide
gaattcgccctttctacggctgcgtcaactggaccaatgagaactttcccttcaacgattgcgtcgacaagatggtgatctggtgggaggagggcaagatgacggccaaggtcgtggagtccgccaaggccattctcggcggcagcaaggtgcgcgtggaccaaaagtgcaagtcgtccgcccagatcgatcccacccccgtgatcgtcacttccaacaccaacatgtgcgccgtgattgacgggaacagcaccaccttcgagcaccagcagccgttacaagaccggatgttcaaatttgaactcacccgccgtctggagcatgactttggcaaggtgacaaagcaggaagtcaaagagttcttccgctgggcgcaggatcacgtgaccgaggtggcgcatgagttctacgtcagaaagggtggagccaacaagagacccgcccccgatgacgcggataaaagcgagcccaagcgggcctgcccctcagtcgcggatccatcgacgtcagacgcggaaggagctccggtggactttgccgacaggtaccaaaacaaatgttctcgtcacgcgggcatgcttcagatgctgcttccctgcaagacatgcgagagaatgaatcagaatttcagcatttgcttcacgcacgggaccagagactgttcagaatgtttccccggcgtgtcagaatctcaaccggtcgtcagaaagaggacgtatcggaaactctgtgccattcatcatctgctggggcgggctcccgagattgcttgctcggcctgcgatctggtcaacgtggacctggatgactgtgtttctgagcaataaatgacttaaaccaggtatggctgccgatggtcatcttccagattggctcgaggacaacctctctgagggcattcgcgagtggtgggacttgaaacctggagccccgaaacccaaagccaaccagcaaaagcaggacgacggccggggtctggtgcttcctggctacaagtacctcggacccttcaacggactcgacaagggggagcccgtcaacgcggcggacgcagcggccctcgagcacgacaaggcctacgaccagcagctcaaagcgggtgacaatccgtacctgcggtataaccacgccgacgccgagtttcaggagcgtcttcaagaagatacgtcttttgggggcaacctcgggcgagcagtcttccaggccaagaagcgggttctcgaacctctcggtctggttgaggaaggcgctaagacggctcctggaaagaagagacccatagaatcccccgactcctccacgggcatcggcaagaaaggccagcagcccgctaaaaagaagctcaactttgggcagactggcgactcagagtcagtgcccgaccctcaaccaatcggagaaccccccgcaggcccctctggtctgggatctggtacaatggctgcaggcggtggcgctccaatggcagacaataacgaaggcgccgacggagtgggtagttcctcaggaaattggcattgcgattccacatagctgggcgacagagtcatcaccaccagcacccgaacctgggccctccccacctacaacaaccacctctacaagcaaatctccaacgggacatcgggaggaagcaccaacgacaacacctacttcggctacagcaccccctgggggtattttgactttaacagattccactgccacttctcaccacgtgactggcagcgactcatcaacaacagctggggattccggcccaagagactcaacttcaagctcttcaacatccaggtcaaggaggtcacgcagaatgaaggcaccaagaccatcgccaataaccttaccagcacgattcaggtctttacggactcggaataccagctcccgtacgtcctcggctctgcgcaccagggctgcctgcctccgttcccggcggacgtcttcatgattcctcagtacgggtacctgactctgaacaacggcagtcaggccgtgggccgttcctccttctactgcctggagtactttccttctcaaatgctgagaacgggcaacaactttgagttcagctaccagtttgaggacgtgccttttcacagcagctacgcgcacagccaaagcctggaccggctgatgaaccccctcatcgaccagtacctgtactacctgtctcggactcagtccacgggaggtaccgcaggaactcagcagttgctattttctcaggccgggcctaataacatgtcggctcaggccaaaaactggctacccgggccctgctaccggcagcaacgcgtctccacgacactgtcgcaaaataacaacagcaactttgcttggaccggtgccaccaagtatcatctgaatggcagagactctctggtaaatcccggtgtcgctatggcaacgcacaaggacgacgaagagcgattttttccatccagcggagtcttgatgtttgggaaacagggagctggaaaagacaacgtggactatagcagcgttatgctaaccagtgaggaagaaatcaaaaccaccaacccagtggccacagaacagtacggcgtggtggccgataacctgcaacagcaaaacgccgctcctattgtaggggccgtcaacagtcaaggagccttacctggcatggtctggcagaaccgggacgtgtacctgcagggtcctatctgggccaagattcctcacacggacggcaactttcatccttcgccgctgatgggaggctttggactgaaacacccgcctcctcagatcctgattaagaatacacctgttcccgcggatcctccaactaccttcagtcaagccaagctggcgtcgttcatcacgcagtacagcaccggacaggtcagcgtggaaattgaatgggagctgcagaaagagaacagcaagcgctggaacccagagattcagtatacttccaactactacaaatctacaaatgtggactttgctgtcaatactgagggtacttattcagagcctcgccccattggcacccgttacctcacccgtaacctgtaattgcctgttaatcaataaaccggttaattcgtttcagttgaactttggtctctgcgaagggcgaattc

SEQ ID NO: 409 - protein, 731 aa, Artificial Sequence
  Description of Artificial Sequence: Synthetic polypeptide
MAADGYLPDWLEDNLSEGIREWWDLKPGAPKPKANQQKQDDGRGLVLPGYKYLGPFNGLDKGEPVNEADAAALEHDKAYDKQLEQGDNPYLKYNHADAEFQERLQEDTSFGGNLGRAVFRAKKRVLEPLGLVEEGAKTAPGKKRPIESPDSSTGIGKKGQQPAKKKLNFGQTGDSESVPDPQPLGEPPAAPSGLGSGTMAAGGGAPMADNNEGADGVGNASGNWHCDSTWLGDRVITTSTRTWALPTYNNHLYKQISSQSGATNDNHFFGYSTPWGYFDFNRFHCHFSPRDWQRLINNNRGFRPRKLRFKLFNIQVKEVTTNDGVTTIANNLTSTIQVFSDSEYQLPYVLGSAHQGCLPPFPADVFMIPQYGYLTLNNGSQSVGRSSFYCLEYFPSQMLRTGNNFEFSYQFEDVPFHSSYAHSQSLDRLMNPLIDQYLYYLSRTQSTGGTAGTQQLLFSQAGPNNMSAQAKNWLPGPCYRQQRVSTTLSQNNNSNFAWTGATKYHLNGRDSLVNPGVAMATHKDDEERFFPSSGVLMFGKQGAGKDNVDYSSVMLTSEEEIKTTNPVATEQYGVVADNLQQQNAAPIVGAVNSQGALPGMAWQNRDVYLQGPIWAKIPHTDGNFHPSPLMGGFGLKHPPPQILIKNTPVPADPPTTFSQAKLASFITQYSTGQVSVEIEWELQKENSKRWNPEIQYTSNYYKSTNVDFAVNTEGTYSEPRPIGTRYLTRNL

SEQ ID NO: 410 - DNA, 3106 bp, Artificial Sequence
  Description of Artificial Sequence: Synthetic polynucleotide
gaattcgcccttctacggctgcgtcaactggaccaatgagaactttcccttcaacgattgcgtcgacaagatggtgatctggtgggaggagggcaagatgacggccaaggtcgtggagtccgccaaggccattctcggcggcagcaaggtgcgcgtggaccaaaagtgcaagtcgtccgcccagatcgaccccacccccgtgatcgtcacctccaacaccaacatgtgcgccgtgattgacgggaacagcaccaccttcgagcaccagcagccgttgcaggaccggatgttcaaatttgaactcacccgccgtctggagcatgactttggcaaggcgacaaagcaggaagtcaaagagttcttccgctgggcgcaggatcacgtgaccgaggtggcgcatgagttctacgtcagaaagggtggagccaacaagagacccgcccccgatgacgcggataaaagcgagcccaagcgggcccgcccctcagtcgcggatccatcgacgtcagacgcggaaggagctccggtggactttgccgacaggtaccaaaacaaatgttctcgtcacgcgggcatgcttcagatgctgtttccctgcaaaacatgcgagagaatgaatcagaatttcaacatttgcttcacgcacgggaccagagactgttcagaatgtttccccggcgtgtcagaatctcaaccggtcgtcagaaagaggacgtatcggaaactctgtgccattcatcatctgctggggcgggctcccgagattgcttgctcggcctgcgatctggtcaacgtggacctggatgactgtgtttctgagcaataaatgacttaaaccaggtatggctgccgatggttatcttccagattggctcgaggacaacctctctgagggcattcgcgagtggtgggacttgaaacctggagccccgaaacccaaagccaaccagcaaaagcaggacgacggccggggtctggtgcttcctggctacaagtacctcggacccttcaacggactcgacaagggagagccggtcaacgaggcagacgccgcggccctcgagcacgacaaggcctacgacaagcagctcgagcagggggacaacccgtacctcaagtacaaccacgccgacgccgagtttcaggagcgtcttcaagaagatacgtcttttgggggcaacctcgggcgagcagtcttccgggccaagaagcgggttctcgaacctctcggtctggttgaggaaggcgctaagacggctcctggaaagaagagacccatagaatcccccgactcctccacgggcatcggcaagaaaggccagcagcccgctaaaaagaagctcaactttgggcagactggcgactcagagtcagtgcccgacccccaacctctcggagaacctcccgccgcgccctcaggtctgggatctggtacaatggctgcaggcggtggcgcaccaatggcagacaataacgaaggcgccgacggagtgggtaatgcctccggaaattggcattgcgattccacatggctgggcgacagagtcatcaccaccagcacccgcacctgggccctgcccacctacaacaaccacctctacaagcagatatcaagtcagagcggggctaccaacgacaaccacttcttcggctacagcaccccctggggctattttgacttcaacagattccactgccacttctcaccacgtgactggcagcgactcatcaacaacaaccggggattccggcccagaaagctgcggttcaagttgttcaacatccaggtcaaggaggtcacgacgaacgacggcgttacgaccatcgctaataaccttaccagcacgattcaggtcttctcggactcggagtaccaactgccgtacgtcctcggctctgcgcaccagggctgcctccctccgttccctgcggacgtgttcatgattcctcagtacggatatctgactctaaacaacggcagtcagtctgtgggacgttcctccttctactgcctggagtactttccttctcagatgctgagaacgggcaataactttgaattcagctaccagtttgaggacgtgccctttcacagcagctacgcgcacagccaaagcctggaccggctgatgaaccccctcatcgaccagtacctgtactacctgtctcggactcagtccacgggaggtaccgcaggaactcagcagttgctattttctcaggccgggcctaataacatgtcggctcaggccaaaaactggctacccgggccctgctaccggcagcaacgcgtctccacgacactgtcgcaaaataacaacagcaactttgcttggaccggtgccaccaagtatcatctgaatggcagagactctctggtaaatcccggtgtcgctatggcaacgcacaaggacgacgaagagcgattttttccatccagcggagtcttgatgtttgggaaacagggagctggaaaagacaacgtggactatagcagcgttatgctaaccagtgaggaagaaatcaaaaccaccaacccagtggccacagaacagtacggcgtggtggccgataacctgcaacagcaaaacgccgctcctattgtaggggccgtcaacagtcaaggagccttacctggcatggcctggcagaaccgggacgtgtacctgcagggtcctatctgggccaagattcctcacacggacggcaactttcatccttcgccgctgatgggaggctttggactgaaacacccgcctcctcagatcctgattaagaatacacctgttcccgcggatcctccaactaccttcagtcaagccaagctggcgtcgttcatcacgcagtacagcaccggacaggtcagcgtggaaattgaatgggagctgcagaaagagaacagcaagcgctggaacccagagattcagtatacttccaactactacaaatctacaaatgtggactttgctgtcaatactgagggtacttattcagagcctcgccccattggcacccgttacctcacccgtaacctgtaattgcctgttaatcaataaaccggttaattcgtttcagttgaactttggtctctgcgaagggcgaattc

SEQ ID NO: 411 - protein, 738 aa, Artificial Sequence
  Description of Artificial Sequence: Synthetic polypeptide
MAADGYLPDWLEDNLSEGIREWWDLKPGAPKPKANQQKQDDGRGLVLPGYKYLGPFNGLDKGEPVNEADAAALEHDKAYDKQLEQGDNPYLKYNHADAEFQERLQEDTSFGGNLGRAVFQAKKRVLEPLGLVEEGAKTAPGKKRPVEPSPQRSPDSSTGIGKTGQQPAKKRLNFGQTGDSESVPDPQPIGEPPAGPSGLGSGTMAAGGGAPMADNNEGADGVGSSSGNWHCDSTWLGDRVITTSTRTWALPTYNNHLYKQISNGTSGGSTNDNTYFGYSTPWGYFDFNRFHCHFSPRDWQRLINNNWGFRPKRLNFKLFNIQVKEVTQNEGTKTIANNLTSTIQVFTDSEYQLPYVLGSAHQGCLPPFPADVFMIPQYGYLTLNNGSQAVGRSSFYCLEYFPSQMLRTGNNFEFSYQFEDVPFHSSYAHSQSLDRLMNPLIDQYLYYLSRTQSTGGTAGTQQLLFSQAGPNNMSAQAKNWLPGPCYRQQRVSTTLSQNNNSNFAWTGATKYHLNGRDSLVNPGVAMATHKDDEERFFPSSGVLMFGKQGAGKDNVDYSSVMLTSEEEIKTTNPVATEQYGVVADNLQQQNAAPIVGAVNSQGALPGMVWQNRDVYLQGPIWAKIPHTDGNFHPSPLMGGFGLKHPPPQILIKNTPVPADPPTTFSQAKLASFITQYSTGQVSVEIEWELQKENSKRWNPEIQYTSNYYKSTNVDFAVNTEGTYSEPRPIGTRYLTRNL

SEQ ID NO: 412 - DNA, 3197 bp, Artificial Sequence
  Description of Artificial Sequence: Synthetic polynucleotide
gaattcgccctttctacggctgcgtcaactggaccaatgagaactttcccttcaacgattgcgtcgacaagatggtgatctggtgggaggagggcaagatgacggccaaggtcgtggagtccgccaaggccattctcggcggcagcaaggtgcgcgtggaccaaaagtgcaagtcgtccgcccagatcgaccccacccccgtgatcgtcacctccaacaccaacatgtgcgccgtgattgacgggaacagcaccaccttcgagcaccagcagccgttacaagaccggatgttcaaatttgaactcacccgccgtctggagcacgactttggcaaggtgacaaagcaggaagtcaaagagttcttccgctgggcgcaggatcacgtgaccgaggtggcgcatgagttctacgtcagaaagggtggagccaacaagagacccgcccccgatgacgcggataaaagcgagcccaagcgggcctgcccctcagtcgcggatccatcgacgtcagacgcggaaggagctccggtggactttgccgacaggtaccaaaacaaatgttctcgtcacgcgggcatgcttcagatgctgtttccctgcaagacatgcgagagaatgaatcagaatttcaacatttgcttcacgcacgggaccagagactgttcagaatgtttccccggcgtgtcagaatctcaaccggtcgtcagaaagaggacgtatcggaaactctgtgccattcatcatctgctggggcgggctcccgagattgcttgctcggcctgcgatctggtcaacgtggacctggatgactgtgtttctgagcaataaatgacttaaaccaggtatggctgccgatggttatcttccagattggctcgaggacaacctctctgagggcattcgcgagtggtgggacttgaaacctggagccccgaaacccaaagccaaccagcaaaagcaggacgacggccggggtctggtgcttcctggctacaagtacctcggacccttcaacggactcgacaagggagagccggtcaacgaggcagacgccgcggccctcgagcacgacaaggcctacgacaagcagctcgagcagggggacaacccgtacctcaagtacaaccacgccgacgccgagtttcaggagcgtcttcaagaagatacgtcttttgggggcaacctcgggcgagcagtcttccaggccaagaagcgggttctcgaacctctcggtctggttgaggaaggcgctaagacggctcctggaaagaagagaccggtagagccatcaccccagcgttctccagactcctctacgggcatcggcaagacaggccagcagcccgcgaaaaagagactcaactttgggcagactggcgactcagagtcagtgcccgaccctcaaccaatcggagaaccccccgcaggcccctctggtctgggatctggtacaatggctgcaggcggtggcgctccaatggcagacaataacgaaggcgccgacggagtgggtagttcctcaggaaattggcattgcgattccacatggctgggcgacagagtcatcaccaccagcacccgaacctgggccctccccacctacaacaaccacctctacaagcaaatctccaacgggacatcgggaggaagcaccaacgacaacacctacttcggctacagcaccccctgggggtattttgactttaacagattccactgccacttctcaccacgtgactggcagcgactcatcaacaacaactggggattccggcccaagagactcaacttcaagctcttcaacatccaggtcaaggaggtcacgcagaatgaaggcaccaagaccatcgccaataaccttaccagcacgattcaggtctttacggactcggaataccagctcccgtacgtcctcggctctgcgcaccagggctgcctgcctccgttcccggcggacgtcttcatgattcctcagtacgggtacctgactctgaacaacggcagtcaggccgtgggccgttcctccttctactgcctggagtactttccttctcaaatgctgagaacgggcaacaactttgagttcagctaccagtttgaggacgtgccttttcacagcagctacgcgcacagccaaagcctggaccggctgatgaaccccctcatcgaccagtacctgtactacctgtctcggactcagtccacgggaggtaccgcaggaactcagcagttgctattttctcaggccgggcctaataacatgtcggctcaggccaaaaactggctacccgggccctgctaccggcagcaacgcgtctccacgacactgtcgcaaaataacaacagcaactttgcttggaccggtgccaccaagtatcatctgaatggcagagactctctggtaaatcccggtgtcgctatggcaacgcacaaggacgacgaagagcgattttttccatccagcggagtcttgatgtttgggaaacagggagctggaaaagacaacgtggactatagcagcgttatgctaaccagtgaggaagaaatcaaaaccaccaacccagtggccacagaacagtacggcgtggtggccgataacctgcaacagcaaaacgccgctcctattgtaggggccgtcaacagtcaaggagccttacctggcatggtctggcagaaccgggacgtgtacctgcagggtcctatctgggccaagattcctcacacggacggcaactttcatccttcgccgctgatgggaggctttggactgaaacacccgcctcctcagatcctgattaagaatacacctgttcccgcggatcctccaactaccttcagtcaagccaagctggcgtcgttcatcacgcagtacagcaccggacaggtcagcgtggaaattgaatgggagctgcagaaagagaacagcaagcgctggaacccagagattcagtatacttccaactactacaaatctacaaatgtggactttgctgtcaatactgagggtacttattcagagcctcgccccattggcacccgttacctcacccgtaacctgtaattgcctgttaatcaataaaccggttaattcgtttcagttgaactttggtctctgcgaagggcgaattcgtttaaacctgcaggactagtccctttagtgagggttaattctgagcttggcgtaatcatgggtcatag

SEQ ID NO: 413 - protein, 735 aa, Artificial Sequence
  Description of Artificial Sequence: Synthetic polypeptide
MAADGYLPDWLEDNLSEGIREWWDLKPGAPKPKANQQKQDDGRGLVLPGYKYLGPFNGLDKGEPVNEADAAALEHDKAYDKQLEQGDNPYLKYNHADAEFQERLQEDTSFGGNLGRAVFQAKKRVLEPLGLVEEGAKTAPGKKRPVEPSPQRSPDSSTGIGKTGQQPAKKRLNFGQTGDSESVPDPQPIGEPPAGPSGLGSGTMAAGGGAPMADNNEGADGVGSSSGNWHCDSTWLGDRVITTSTRTWALPTYNNHLYKQISNGTSGGSTNDNTYFGYSTPWGYFDFNRFHCHFSPRDWQRLINNNWGFRPRKLRFKLFNIQVKEVTTDDGVTTIANNLTSTIQVFSDSEYQLPYVLGSAHQGCLPPFPADVFMIPQYGYLTLNNGSQSVGRSSFYCLEYFPSQMLRTGNNFEFSYTFEEVPFHSSYAHSQSLDRLMNPLIDQYLYYLARTQSTTGSTRELQFHQAGPNTMAEQSKNWLPGPCYRQQRLSKNIDSNNNSNFAWTGATKYHLNGRNSLTNPGVAMATNKDDEDQFFPINGVLVFGKTGAANKTTLENVLMTSEEEIKTTNPVATEEYGVVSSNLQSSTAGPQTQTVNSQGALPGMVWQNRDVYLQGPIWAKIPHTDGNFHPSPLMDGFGLKHPPPQILIKNTPVPANPPEVFTPAKFASFITQYSTGQVSVEIEWELQKENSKRWNPEIQYTSNYAKSNNVEFAVNNEGVYTEPRPIGTRYLTRNL

SEQ ID NO: 414 - DNA, 3276 bp, Artificial Sequence
  Description of Artificial Sequence: Synthetic polynucleotide
gaattcgcccttcgcagagaccaaagttcaactgaaacgaattaaccggtttattgattaacaggcaattacaggttacgggtgaggtaacgggtgccaatggggcgaggctcagtataaaccccttcgttgttgacagcaaattccacattattagacttggcataatttgaggtgtactgaatctctggattccagcgtttgctgttttctttctgcagttcccactcgatctccacgctgacctggccggtgctgtactgcgtgataaatgaggcaaacttggcaggagtaaacacctctggaggattagcaggtaccggggtgtttttgatgagaatttgaggaggcgggtgtttgagtccaaatccgtccatcaggggagacgggtgaaagttgccgtccgtgtgaggaattttggcccagatgggaccctgcaggtacacgtcccggttctgccagaccatgccgggcagagccccctggctgttgacagtctgtgtctggggtccggccgtagacgattgcaggttgctggagaccacaccgtattcttctgtagccacgggattggtggttttgatctcctcctcgctggtcattagcacgttttccagcgttgtcttgttggcagcccccgttttgccaaaaaccagcactccgttgatgggaaagaactggtcctcgtcgtccttgttggtggccatggctacgcccgggttggttaatgaatttctaccattcagatggtatttagtggccccggtccaggcaaagttactgttgttgttgctgtctatgttttttgacagtctctgctgccgataacagggtccgggcagccagttctttgattgctcggccatggtgttgggcccagcctgatggaactgcagctcccttgtggaccccgtagtgctctgggtccgggccaggtagtacaggtactggtcgatgaggggattcatcagccggtccaggctctggctatgcgcatagctgctgtggaaaggcacttcctcaaaggtgtagctgaattcaaagttattgcccgttctcagcatctgagaaggaaagtactccaggcagtagaaggaggaacgtcccacagactgactgccgttgtttagagtcagatatccgtactgaggaatcatgaacacgtccgcagggaacggagggaggcagccctggtgcgcagagccgaggacgtacggcagttggtactccgagtccgagaagacctgaatcgtgctggtaaggttattagcgatggtcgtaacgccgtcgtccgtcgtgacctccttgacctggatgttgaacaacttgaaccgcagctttctgggccggaatccccagttgttgttgatgagtcgctgccagtcacgtggtgagaagtggcagtggaatctgttaaagtcaaaatacccccagggggtgctgtagccgaagtaggtgttgtcgttggtgcttcctcccgatgtcccgttggagatttgcttgtagaggtggttgttgtaggtggggagggcccaggttcgggtgctggtggtgatgactctgtcgcccagccatgtggaatcgcaatgccaatttcctgaggaactacccactccgtcggcgccttcgttattgtctgccattggagcgccaccgcctgcagccattgtaccagatcccagaccagaggggcctgcggggggttctccgattggttgagggtcgggcactgactctgagtcgccagtctgcccaaagttgagtctctttttcgcgggctgctggcctgtcttgccgatgcccgtagaggagtctggagaacgctggggtgatggctctaccggtctcttctttccaggagccgtcttagcgccttcctcaaccagaccgagaggttcgagaacccgcttcttggcctggaagactgctcgcccgaggttgcccccaaaagacgtatcttcttgaagacgctcctgaaactcggcgtcggcgtggttgtacttgaggtacgggttgtccccctgctcgagctgcttgtcgtaggccttgtcgtgctcgagggccgcggcgtctgcctcgttgaccggctctcccttgtcgagtccgttgaagggtccgaggtacttgtagccaggaagcaccagaccccggccgtcgtcctgcttttgctggttggctttgggtttcggggctccaggtttcaagtcccaccactcgcgaatgccctcagagaggttgtcctcgagccaatctggaagataaccatcggcagccatacctggtttaagtcatttattgctcagaaacacagtcatccaggtccacgttgaccagatcgcaggccgagcaagcaatctcgggagcccgccccagcagatgatgaatggcacagagtttccgatacgtcctctttctgacgaccggttgagattctgacacgccggggaaacattctgaacagtctctggtcccgtgcgtgaagcaaatgttgaaattctgattcattctctcgcatgtcttgcagggaaacagcatctgaagcatgcccgcgtgacgagaacacttgttttggtacctgtcggcaaagtccaccggagctccttccgcgtctgacgtcgatggatgcaaaatgtcgcaaaagcactcacgtgacagctaatacaggaccactcccctatgacgtgatttacgtcagcgctatgcccgcgtgacgagaacatttgttttggtacctgtcggcaaagtccaccggagctccttccgcgtctgacgtcgatggatccgcgactgaggggcaggcccgcttgggctcgcttttatccgcgtcatcgggggcgggtctcttgttggctccaccctttctgacgtagaactcatgcgccacctcggtcacgtgatcctgcgcccagcggaagaactctttgacttcctgctttgtcaccttgccaaagtcatgctccagacggcgggtgagttcaaatttgaacatccggtcctgcaacggctgctggtgctcgaaggtggtgctgttcccgtcaatcacggcgcacatgttggtgttggaagtgacgatcacgggggtgggatcgatctgggcggaagacttgcacttttggtccacgcgcaccttgctgccgccgagaatggccttggcggactccacgaccttggccgtcatcttgccctcctcccaccagatcaccatcttgtcgacgcaatcgttgaagggaaagttctcattggtccagttgacgcagccgtagaaagggcgaattc

SEQ ID NO: 415 - protein, 738 aa, Artificial Sequence; identical to SEQ ID NO: 80
  Description of Artificial Sequence: Synthetic polypeptide

SEQ ID NO: 416 - protein, 738 aa, Artificial Sequence
  Description of Artificial Sequence: Synthetic polypeptide
MAADGYLPDWLEDNLSEGIREWWDLKPGAPKPKANQQKQDDGRGLVLPGYKYLGPFNGLDKGEPVNAADAAALEHDKAYDQQLKAGDNPYLRYNHADAEFQERLQEDTSFGGNLGRAVFQAKKRVLEPLGLVEEGAKTAPGKKRPVEPSPQRSPDSSTGIGKKGHQPARKRLNFGQTGDSESVPDPQPIGEPPAGPSGLGSGTMAAGGGAPMADNNEGADGVGSSSGNWHCDSTWLGDRVITTSTRTWALPTYNNHLYKQISNGTSGGSTNDNTYFGYSTPWGYFDFNRFHCHFSPRDWQRLINNNWGFRPKRLNFKLFNIQVKEVTQNEGTKTIANNLTSTIQVFTDSEYQLPYVPGSAHQGCLPPFPADVFMIPQYGYLTLNNGSQAVGRSSFYCLEYFPSQMLRTGNNFEFSYTFEDVPFHSSYAHSQSLDRLMNPLIDQYLYYLSRTQSTGGTQGTQQLLFSQAGPANMSAQAKNWLPGPCYRQQRVSTTLSQNNNSNFAWTGATKYHLNGRDSLVNPGVAMATHKDDEERFFPSSGVLMFGKQGAGKDNVDYSSVMLTSEEEIKTTNPVATEQYGVVADNLQQTNGAPIVGTVNSQGALPGMVWQNRDVYLQGPIWAKIPHTDGNFHPSPLMGGFGLKHPPPQILIKNTPVPADPPTTFSQAKLASFITQYSTGQVSVEIEWELQKENSKRWNPEIQYTSNYYKSTNVDFAVNTEGTYSEPRPIGTRYLTRNL

SEQ ID NO: 417 - protein, 738 aa, Artificial Sequence; identical to SEQ ID NO: 78
  Description of Artificial Sequence: Synthetic polypeptide

SEQ ID NO: 418 - protein, 728 aa, Artificial Sequence
  Description of Artificial Sequence: Synthetic polypeptide
MAADGYLPDWLEDNLSEGIREWWDLKPGAPKPKANQQKQDDGRGLVLPGYKYLGPFNGLDKGEPVNEADAAALEHDKAYDKQLEQGDNPYLKYNHADAEFQERLQEDTSFGGNLGRAVFQAKKRVLEPLGLVEEGAKTAPGKKRPIESPDSSTGIGRKGQQPAKKKLNFGQTGDSESVPDPQPIGEPPAGPSGLGSGTMAAGGGAPMADNNEGADGVGNASGNWHCDSTWLGDRVITTSTRTWALPTYNNHLYKQISSQSGATNDNHFFGYSTPWGYFDFNRFHCHFSPRDWQRLINNNWGFRPRKLRFKLFNIQVKEVTTNDGVTTIANNLTSTIQVFSDSEYQLPYVLGSAHQGCLPPFPADVFMIPQYGYLTLNNGSQSVGRSSFYCLEYFPSQMLRTGNNFEFSYTFEEVPFHSSYAHSQSLDRLMNPLIDQYLYYLARTQSTTGSTRELQFHQAGPNTMAEQSKNWLPGPCYRQQRLSKNIDSNNNSNFAWTGATKYHLNGRNSLTNPGVAMATNKDDEDQFFPINGVLVFGKTGAANKTTLENVLMTSEEEIKTTNPVATEEYGVVSSNLQSSTAGPQTQTVNSQGALPGMVWQNRDVYLQGPIWAKIPHTDGNFHPSPLMGGFGLKHPPPQILIKNTPVPANPPEVFTPAKFASFITQYSTGQVSVEIEWELQKENSKRWNPEIQYTSNYAKSNNVEFAVNNEGVYTEPRPIGTRYLTRNL

SEQ ID NO: 419 - DNA, 2489 bp, Artificial Sequence
  Description of Artificial Sequence: Synthetic polynucleotide
gaattcgccctttctacggctgcgtcaactggaccaatgagaactttcccttcaacgattgcgtcgacaagatggtgatctggtgggaggagggcaagatgacggccaaggtcgtgaagtccgccaaggccattcatcatctgctggggcgggctcccgagattgcttgctcggcctgcgatctggtcaacgtggacctggatgactgtgtttctgagcaataaatgacttaaaccaggtatggctgccgatggttatcttccagattggctcgaggacaacctctctgagggcattcgcgagtggtgggacttgaaacctggagccccgaaacccaaagccaaccagcaaaagcaggacgacggccggggtctggtgcttcctggctacaagtacctcggacccttcaacggactcgacaagggagagccggtcaacgaggcagacgccgcggccctcgagcacgacaaggcctacgacaagcagctcgagcagggggacaacccgtacctcaagtacaaccacgccgacgccgagtttcaggagcgtcttcaagaagatacgtcttttgggggcaacctcgggcgagcagtcttccaggccaagaagcgggttctcgaacctctcggtctggttgaggaaggcgctaagacggctcctggaaagaagagacccatagaatcccccgactcctccacgggcatcggcaggaaaggccagcagcccgctaaaaagaagctcaactttgggcagactggcgactcagagtcagtgcccgaccctcaaccaatcggagaaccccccgcaggcccctctggtctgggatctggtacaatggctgcaggcggtggcgctccaatggcagacaataacgaaggcgccgacggagtgggtaatgcctccggaaattggcattgcgattccacatggctgggcgacagagtcatcaccaccagcacccgcacctgggccctgcccacctacaacaaccacctctacaagcagatatcaagtcagagcggggctaccaacgacaaccacttcttcggctacagcaccccctggggctattttgacttcaacagattccactgccacttctcaccacgtgactggcagcgactcatcaacaacaactggggattccggcccagaaagctgcggttcaagttgttcaacatccaggtcaaggaggtcacgacgaacgacggcgttacgaccatcgccaataaccttaccagcacgattcaggtcttctcggactcggagtaccaactgccgtacgtcctcggctctgcgcaccagggctgcctccctccgttccctgcggacgtgttcatgattcctcagtacggatatctgactctaaacaacggcagtcagtctgtgggacgttcctccttctactgcctggagtactttccttctcagatgctgagaacgggcaataactttgaattcagctacacctttgaggaagtgcctttccacagcagctatgcgcacagccagagcctggaccggctgatgaatcccctcatcgaccagtacctgtactacctggcccggacccagagcactacggggtccacaagggagctgcagttccatcaggctgggcccaacaccatggccgagcaatcaaagaactggctgcccggaccctgttatcggcagcagagactgtcaaaaaacatagacagcaacaacaacagtaactttgcctggaccggggccactaaataccatctgaatggtagaaattcattaaccaacccgggcgtagccatggccaccaacaaggacgacgaggaccagttctttcccatcaacggagtgctggtttttggcaaaacgggggctgccaacaagacaacgctggaaaacgtgctaatgaccagcgaggaggagatcaaaaccaccaatcccgtggctacagaagaatacggtgtggtctccagcaacctgcaatcgtctacggccggaccccagacacagactgtcaacagccagggggctctgcccggcatggtctggcagaaccgggacgtgtacctgcagggtcccatctgggccaaaattcctcacacggacggcaactttcacccgtctcccctgatgggcggatttggactcaaacacccgcctcctcaaattctcatcaaaaacaccccggtacctgctaatcctccagaggtgtttactcctgccaagtttgcctcatttatcacgcagtacagcaccggccaggtcagcgtggagatcgagtgggaactgcagaaagaaaacagcaaacgctggaatccagagattcagtacacctcaaattatgccaagtctaataatgtggaatttgctgtcaacaacgaaggggtttatactgagcctcgccccattggcacccgttacctcacccgtaacctgtaattgcctgttaatcaataaaccggttaattcgtttcagttgaactttggtcaagggcgaattc

SEQ ID NO: 420 - protein, 728 aa, Artificial Sequence
  Description of Artificial Sequence: Synthetic polypeptide
MAADGYLPDWLEDNLSEGIREWWDLKPGAPKPKANQQKQDDGRGLVLPGYKYLGPFNGLDKGEPVNAADAAALEHDKAYDQQLKAGDNPYLRYNHADAEFQERLQEDTSFGGNLGRAVFQAKKRVLEPLGLVEEGAKTAPGKKRPIESPDSSTGIGKKGQQPAKKKLNFGQTGDSESVPDPQPIGEPPAGPSGLGSGTMAAGGGAPMADNNEGADGVGNASGNWHCDSTWLGDRVITTSTRTWALPTYNNHLYKQISSQSGATNDNHFFGYSTPWGYFDFNRFHCHFSPRDWQRLINNNWGFRPRKLRFKLFNIQVKEVTTNDGVTTIANNLTSTIQVFSDSEYQLPYVLGSAHQGCLPPFPADVFMIPQYGYLTLNNGSQSVGRSSFYCLEYFPSQMLRTGNNFEFSYTFEEVPFHSSYAHSQSLDRLMNPLIDQYLYYLARTQSTTGSTRELQFHQAGPNTMAEQSKNWLPGPCYRRQRLSKDIDSNNNSNFAWTGATKYHLNGRNSLTNPGVAMATNKDDEDQFFPINGVLVFGKTGAANKTTLENVLMTSEEEIKTTNPVATEEYGVVSSNLQSSTAGPQTQTVNSQGALPGMVWQNRDVYLQGPIWAKIPHTDGNFHPSPLMGGFGLKHPPPQILIKNTPVPANPPEVFTPAKFASFITQYSTGQVSVEIEWELQKENSKRWNPEIQYTSNYAKSNNVEFAVNNEGVYTEPRPIGTRYLTRNL

SEQ ID NO: 421 - DNA, 3098 bp, Artificial Sequence
  Description of Artificial Sequence: Synthetic polynucleotide
gaattcgccctttctacggctgcgtcaactggaccaatgagaactttcccttcaacgattgcgtcgacaagatggtgatctggtgggaggagggcaagatgacggccaaggtcgtggagtccgccaaggccattctcggcggcagcaaggtgcgcgtggaccaaaagtgcaagtcttccgcccagatcgatcccacccccgtgatcgtcacttccaacaccaacatgtgcgccgtgattgacgggaacagcaccaccttcgagcaccagcagccgttacaagaccggatgttcaaatttgaactcacccgccgtctggagcacgactttggcaaggtgacaaagcaggaagtcaaagagttcttccgctgggcgcaggatcacgtgaccgaggtggcgcatgagttctacgtcagaaagggtggagccaacaagagacccgcccccgatgacgcggataaaagcgagcccaagcgggcctgcccctcagtcgcggatccatcgacgtcagacgcggaaggagctccggtggactttgccgacaggtaccaaaacaaatgttctcgtcacgcgggcatgcttcagatgctgtttccctgcaagacatgcgagagaatgaatcagaatttcaacatttgcttcacgcacgggaccggagactgttcagaatgtttccccggcgtgtcagaatctcaaccggtcgtcagaaagaggacgtatcggaaactctgtgccattcatcatctgctggggcgggctcccgagattgcttgctcggcctgcgatctggtcaacgtggacctggatgactgtgtttctgagcaataaatgacttaaaccaggtatggctgccgatggttatcttccagattggctcgaggacaacctctctgagggcattcgcgagtggtgggacttgaaacctggagccccgaaacccaaagccaaccagcaaaagcaggacgacggccggggtctggtgcttcctggctacaagtacctcggacccttcaacggactcgacaagggagagccggtcaacgcggcggacgcagcggccctcgagcacgacaaggcctacgaccagcagctcaaagcgggtgacaatccgtacctgcggtataaccacgccgacgccgagtttcaggagcgtcttcaagaagatacgtcttttgggggcaacctcgggcgagcagtcttccaggccaagaagcgggttctcgaacctctcggtctggttgaggaaggcgctaagacggctcctggaaagaagagacccatagaatcccccgactcctccacgggcatcggcaagaaaggccagcagcccgctaaaaagaagctcaactttgggcagactggcgactcagagtcagtgcccgaccctcaaccaatcggagaaccccccgcaggcccctctggtctgggatctggtacaatggctgcaggcggtggcgctccaatggcagacaataacgaaggcgccgacggagtgggtaatgcctccggaaattggcattgcgattccacatggctgggcgacagagtcatcaccaccagcacccgcacctgggccctgcccacctacaacaaccacctctacaagcagatatcaagtcagagcggggctaccaacgacaaccacttcttcggctacagcaccccctggggctattttgacttcaacagattccactgccacttctcaccacgtgactggcagcgactcatcaacaacaactggggattccggcccagaaagctgcggttcaagttgttcaacatccaggtcaaggaggtcacgacgaacgacggcgttacgaccatcgctaataaccttaccagcacgattcaggtcttctcggactcggagtaccaactgccgtacgtcctcggctctgcgcaccagggctgcctccctccgttccctgcggacgtgttcatgattcctcagtacggatatctgactctaaacaacggcagtcagtctgtgggacgttcctccttctactgcctggagtactttccttctcagatgctgagaacgggcaataactttgaattcagctacacctttgaggaagtgcctttccacagcagctatgcgcacagccagagcctggaccggctgatgaatcccctcatcgaccagtacctgtactacctggcccggacccagagcactacggggtccacaagggagctgcagttccatcaggctgggcccaacaccatggccgagcaatcaaagaactggctgcccggaccctgttatcggcggcagagactgtcaaaagacatagacagcaacaacaacagtaactttgcctggaccggggccactaaataccatctgaatggtagaaattcattaaccaacccgggcgtagccatggccaccaacaaggacgacgaggaccagttctttcccatcaacggagtgctggtttttggcaaaacgggggctgccaacaagacaacgctggaaaacgtgctaatgaccagcgaggaggagatcaaaaccaccaatcccgtggctacagaagaatacggtgtggtctccagcaacctgcaatcgtctacggccggaccccagacacagactgtcaacagccagggggctctgcccggcatggtctggcagaaccgggacgtgtacctgcagggtcccatctgggccaaaattcctcacacggacggcaactttcacccgtctcccctgatgggcggatttggactcaaacacccgcctcctcaaattctcatcaaaaacaccccggtacctgctaatcctccagaggtgtttactcctgccaagtttgcctcatttatcacgcagtacagcaccggccaggtcagcgtggagatcgagtgggaactgcagaaagagaacagcaaacgctggaatccagagattcagtacacctcaaattatgccaagtctaataatgtggaatttgctgtcaacaacgaaggggtttatactgagcctcgccccattggcacccgttacctcacccgtaacctgtaattacttgttaatcaataaaccggttgattcgtttcagttgaactttggtctctgcgaagggcgaattc

SEQ ID NO: 422 - protein, 685 aa, Artificial Sequence
  Description of Artificial Sequence: Synthetic polypeptide
MAADGYLPDWLEDNLSEGIREWWDLKPGAPKPKANQQKQDDGRGLVLPGYKYLGPFNGLDKGEPVNEADAAALEHDKAYDKQLEQGDNPYLKYNHADAEFQERLQEDTSFGGNLGRAVFQAKKRVLEPLGLVEEGAKTAPGKKRPVEPSPQRSPDSSTGIGKTGQQPAKKRLNFGQTGDSESVPDPQPIGEPPAGPSGLGSGTMAAGGGAPMADNNEGADGVGSSSGNWHCDSTWLGDRVITTSTRTWALPTYNNHLYKQISNGTSGGSTNDNTYFGYSTPWGYFDFNRFHCHFSPRDWQRLINNNWGFRPKRLNFKLFNIQVKEVTQNEGTKTIANNLTSTIQVFTDSEYQLPYVLGSAHQGCLPPFPADVFMIPQYGYLTLNNGSQAVGRSSFYCLEYFPSQMLRTGNNFEFSYQFEDVPFHSSYAHSQSLDRLTNPLIDQYLYYLARTQSTTGSTRGLQFHQAGPNTMAEQSKNWLPGPCYRQQRLSKNIDSNNNSNFAWTGATKYHLNGRNSLTNPGVAMATNKDDEDQFFPINGVLVFGKTGAANKTTLENVLMTSEEEIKTTNPVATEEYGVVSSNLQSSTAGPQTQTVNSQGALPGMVWQNRDVYLQGPIWAKIPHTDGNFHPSPLMGGFGLKHPPPQILIKYTSNYYKSTNVDFAVNTEGTYSEPRPIGTRYLTRNL

SEQ ID NO: 423 - DNA, 2969 bp, Artificial Sequence
  Description of Artificial Sequence: Synthetic polynucleotide
gaattcgccctttctacggctgcgtcaactggaccaatgagaactttcccttcaacgattgcgtcgacaagatggtgatctggtgggaggagggcaagatgacggccaaggtcgtggagtccgccaaggccattctcggcggcagcaaggtgcgcgtggaccaaaagtgcaagtcgtccgcccagatcgaccccacccccgtgatcgtcacctccaacaccaacatgtgcgccgtgattgacgggaacagcaccaccttcgagcaccagcagccgttacaagaccggatgttcaaatttgaactcacccgccgtctggagcacgactttggcaaggtgacaaagcaggaagtcaaagagttcttccgctgggcgcaggatcacgtgaccgaggtggcgcatgagttctacgtcagaaagggtggagccaacaagagacccgcccccgatgacgcggataaaagcgagcccaagcgggcctgcccctcagtcgcggatccatcgacgtcagacgcggaaggagctccggtggactttgccgacaggtaccaaaacaaatgttctcgtcacgcgggcatgcttcagatgctgtttccctgcaagacatgcgagagaatgaatcagaatttcaacatttgcttcacgcacgggaccagagactgttcagaatgtttccccggcgtgtcagaatctcaaccggtcgtcagaaagaggacgtatcggaaactctgtgccattcatcatctgctggggcgggctcccgagattgcttgctcggcctgcgatctggtcaacgtggacctggatgactgtgtttctgagcaataaatgacttaaaccaggtatggctgccgatggttatcttccagattggctcgaggacaacctctctgagggcatccgcgagtggtgggacttgaaacctggagccccgaaacccaaagccaaccagcaaaagcaggacgacggccggggtctggtgcttcctggctacaagtacctcggacccttcaacggactcgacaagggagagccggtcaacgaggcagacgccgcggccctcgagcacgacaaggcctacgacaagcagctcgagcagggggacaacccgtacctcaagtacaaccacgccgacgccgagtttcaggagcgtcttcaagaagatacgtcttttgggggcaacctcgggcgagcagtcttccaggccaagaagcgggttctcgaacctctcggtctggttgaggaaggcgctaagacggctcctggaaagaagagaccggtagagccatcaccccagcgttctccagactcctctacgggcatcggcaagacaggccagcagcccgcgaaaaagagactcaactttgggcagactggcgactcagagtcagtgcccgaccctcaaccaatcggagaaccccccgcaggcccctctggtctgggatctggtacaatggctgcaggcggtggcgctccaatggcagacaataacgaaggcgccgacggagtgggtagttcctcaggaaattggcattgcgattccacatggctgggcgacagagtcatcaccaccagcacccgaacctgggccctccccacctacaacaaccacctctacaagcaaatctccaacgggacatcgggaggaagcaccaacgacaacacctacttcggctacagcaccccctgggggtattttgactttaacagattccactgccacttctcaccacgtgactggcagcgactcatcaacaacaactggggattccggcccaagagactcaacttcaagctcttcaacatccaggtcaaggaggtcacgcagaatgaaggcaccaagaccatcgccaataaccttaccagcacgattcaggtctttacggactcggaataccagctcccgtacgtcctcggctctgcgcaccagggctgcctgcctccgttcccggcggacgtcttcatgattcctcagtacgggtacctgactctgaacaacggcagtcaggccgtgggccgttcctccttctactgcctggagtactttccttctcaaatgctgagaacgggcaacaactttgagttcagctaccagtttgaggacgtgccttttcacagcagctacgcgcacagccaaagcctggaccggctgacgaaccccctcatcgaccagtacctgtactacctggcccggacccagagcactacggggtccacaagggggctgcagttccatcaggctgggcccaacaccatggccgagcaatcaaagaactggctgcccggaccctgttatcggcagcagagactgtcaaaaaacatagacagcaacaacaacagtaactttgcctggaccggggccactaaataccatctgaatggtagaaattcattaaccaacccgggcgtagccatggccaccaacaaggacgacgaggaccagttctttcccatcaacggagtgctggtttttggcaaaacgggggctgccaacaagacaacgctggaaaacgtgctaatgaccagcgaggaggagatcaaaaccaccaatcccgtggctacagaagaatacggtgtggtctccagcaacctgcaatcgtctacggccggaccccagacacagactgtcaacagccagggggctctgcccggcatggtctggcagaaccgggacgtgtacctgcagggtcccatctgggccaaaattcctcacacggacggcaactttcacccgtctcccctgatgggcggatttggactcaaacacccgcctcctcaaattctcatcaagtatacttccaactactacaaatctacaaatgtggactttgctgtcaatactgagggtacttattcagagcctcgccccattggcacccgttacctcacccgtaacctgtaattgcctgttaatcaataaaccggttaattcgtttcagttgaactttggtctctgcgaagggcgaattc

SEQ ID NO: 424 - protein, 733 aa, Artificial Sequence
  Description of Artificial Sequence: Synthetic polypeptide
MAADGYLPDWLEDNLSEGIREWWDLKPGAPKPKANQQKQDDGRGLVLPGYKYLGPFNGLDKGEPVNAADAAALEHDKAYDQQLKAGDNPYLRYNHADAEFQERLQEDTSFGGNLGRAVFQAKKRVLEPLGLVEEGAKTAPGKKRPIESPDSSTGIGKKGQQPAKKKLNFGQTGDSESVPDPQPIGEPPAGPSGLGSGTMAAGGGAPMADNNEGADGVGSSSGNWHCDSTWLGDRVITTSTRTWALPTYNNHLYKQISNGTSGGSTNDNTYFGYSTPWGYFDFNRFHCHFSPRDWQRLINNNWGFRPKRLNFKLFNIQVKEVTQNEGTKTIANNLTSTIQVFTDSEYQLPYVLGSAHQGCLPPFPADVFMIPQYGYLTLNNGSQAVGRSSFYCLEYFPSQMLRTGNNFEFSYQFEDVPFHSSYAHSQSLDRLMNPLIDQYLYYLSRTQSTGGTAGTQQLLFSQAGPNNMSAQAKNWLPGPCYRQQRVSTTVSQNNNSNFAWTGATKYHLNGRDSLVNPGVAMATHKGDEERFFPSSGVLMFGKQGAGKDNVDYSSVMLTSEEEIKTTNPVATEQYGVVADNLQQQNAAPIVGAVNSQGALPGMVWQNRDVYLQGPIWAKIPHTDGNFHPSPLMGGFGLKHPPPQILIKNTPVPADPPTTFSQAKLASFITQYSTGQVSVEIEWELQKENSKRWNPEIQYTSNYYKSTNVDFAVNTEGTYSEPRPIGTRYLTRSL

SEQ ID NO: 425 - DNA, 3113 bp, Artificial Sequence
  Description of Artificial Sequence: Synthetic polynucleotide
gaattcgccctttctacggctgcgtcaactggaccaatgagaactttcccttcaacgattgcgtcgacaagatggtgatctggtgggaggagggcaagatgacggccaaggtcgtggagtccgccaaggccattctcggcggcagcaaggtgcgcgtggaccaaaagtgcaagtcgtccgcccagatcgatcccacccccgtgatcgtcacttccaacaccaacatgtgcgccgtgattgacgggaacagcaccaccttcgagcaccagcagccgttacaagaccggatgttcaaatttgaactcacccgccgtctggagcatgactttggcaaggtgacaaagcaggaagtcaaagagttcttccgctgggcgcaggatcacgtgaccgaggtggcgcatgagttctacgtcagaaagggtggagccaacaagagacccgcccccgatgacgcggataaaagcgagcccaagcgggcctgcccctcagtcgcggatccatcgacgtcagacgcggaaggagctccggtggactttgccgacaggtaccaaaacaaatgttctcgtcacgcgggcatgcttcagatgctgtttccctgcaagacatgcgagagaatgaatcagaatttcaacatttgcttcacgcacgggaccagagactgttcagaatgtttccccggcgtgtcagaatctcaaccggtcgtcagaaagaggacgtatcggaaactctgtgccattcatcatctgctggggcgggctcccgagattgcttgctcggcctgcgatctggtcaacgtggacctggatgactgtgtttctgagcaataaatgacttaaaccaggtatggctgccgatggttatcttccagattggctcgaggacaacctctctgagggcattcgcgagtggtgggacttgaaacctggagccccgaaacccaaagccaaccagcaaaagcaggacgacggccggggtctggtgcttcctggctacaagtacctcggacccttcaacggactcgacaagggggagcccgtcaacgcggcggacgcagcggccctcgagcacgacaaggcctacgaccagcagctcaaagcgggtgacaatccgtacctgcggtataaccacgccgacgccgagtttcaggagcgtcttcaagaagatacgtcttttgggggcaacctcgggcgagcagtcttccaggccaagaagcgggttctcgaacctctcggtctggttgaggaaggcgctaagacggctcctggaaagaagagacccatagaatcccccgactcctccacgggcatcggcaagaaaggccagcagcccgctaaaaagaagctcaactttgggcagactggcgactcagagtcagtgcccgaccctcaaccaatcggagaaccccccgcaggcccctctggtctgggatctggtacaatggctgcaggcggtggcgctccaatggcagacaataacgaaggcgccgacggagtgggtagttcctcaggaaattggcattgcgattccacatggctgggcgacagagtcatcaccaccagcacccgaacctgggccctccccacctacaacaaccacctctacaagcaaatctccaacgggacatcgggaggaagcaccaacgacaacacctacttcggctacagcaccccctgggggtattttgactttaacagattccactgccacttctcaccacgtgactggcagcgactcatcaacaacaactggggattccggcccaagagactcaacttcaagctcttcaacatccaggtcaaggaggtcacgcagaatgaaggcaccaagaccatcgccaataaccttaccagcacgattcaggtctttacggactcggaataccagctcccgtacgtcctcggctctgcgcaccagggctgcctgcctccgttcccggcggacgtcttcatgattcctcagtacgggtacctgactctgaacaacggcagtcaggccgtgggccgttcctccttctactgcctggagtactttccttctcaaatgctgagaacgggcaacaactttgagttcagctaccagtttgaggacgtgccttttcacagcagctatgcgcacagccaaagcctggaccggctgatgaaccccctcatcgaccagtacctgtactacctgtctcggactcagtccacgggaggtaccgcaggaactcagcagttgctattttctcaggccgggcctaataacatgtcggctcaggccaaaaactggctacccgggccctgctaccggcagcaacgcgtctccacgacagtgtcgcaaaataacaacagcaactttgcttggaccggtgccaccaagtatcatctgaatggcagagactctctggtaaatcccggtgtcgctatggcaacgcacaagggcgacgaagagcgattttttccatccagcggagtcttgatgtttgggaaacagggagctggaaaagacaacgtggactatagcagcgttatgctaaccagtgaggaagaaatcaaaaccaccaacccagtggccacagaacagtacggcgtggtggccgataacctgcaacagcaaaacgccgctcctattgtaggggccgtcaacagtcaaggagccttacctggcatggtctggcagaaccgggacgtgtacctgcagggtcctatctgggccaagattcctcacacggacggcaactttcatccttcgccgctgatgggaggctttggactgaaacacccgcctcctcagatcctgattaagaatacacctgttcccgcggatcctccaactaccttcagtcaagccaagctggcgtcgttcatcacgcagtacagcaccggacaggtcagcgtggaaattgaatgggagctgcagaaagagaacagcaagcgctggaacccagagattcagtatacttccaactactacaaatctacaaatgtggactttgctgtcaatactgagggtacttattcagagcctcgccccattggcacccgttacctcacccgtagcctgtaattgcctgttaatcaataaaccggttgattcgtttcagttgaactttggtctctgcgaagggcgaattc

SEQ ID NO: 426 - protein, 738 aa, Artificial Sequence
  Description of Artificial Sequence: Synthetic polypeptide
MAADGYLPDWLEDNLSEGIREWWDLKPGAPKPKANQQKQDDGRGLVLPGYKYLGPFNGLDKGEPVNAADAAALEHDKAYDQQLKAGDNPYLRYNHADAEFQERLQEDTSFGGNLGRAVFQAKKRVLEPLGLVEEGAKTAPGKKRPVEPSPQRSPDSSTGIGKTGQQPAKKRLNFGQTGDSESVPDPQPIGEPPAGPSGLGSGTMAAGGGAPMADNNEGADGVGSSSGNWHCDSTWLGDRVITTSTRTWALPTYNNHLYKQISNGTSGGSTNDNTYFGYSTPWGYFDFNRFHCHFSPRDWQRLINNNWGFRPKRLNFKLFNIQVKEVTQNEGTKTIANNLTSTIQVFTDSEYQLPYVLGSAHQGCPPPFPADVFMIPQYGYLTLNNGSQAVGRSSFYCLEYFPSQMRRTGNNFEFSYQFEDVPFHSSYAHSQSLDRLMNPLIDQYLYYLSRTQSTGGTAGTQQLLFSQAGPNNMSAQAKNWLPGPCYRQQRVSTTLSQNNNSNFAWTGATKYHLNGRDSLVNPGVAMATHKDDEERFFPSSGVLMFGKQGAGKDNVDYSSVMLTSEEEIKTTNPVATEQYGVVADNLQQQNAAPIVGAVNSQGALPGMVWQNRDVYLQGPIWAKIPHTDGNFHPSPLMGGFGLKHPPPQILIKNTPVPADPPTTFSQAKLASFITQYSTGQVSVEIEWELQKENSKRWNPEIQYTSNYYKSTNVDFAVNTEGTYSEPRPIGTRYLTRNL

SEQ ID NO: 427 - DNA, 3128 bp, Artificial Sequence
  Description of Artificial Sequence: Synthetic polynucleotide
gaattcgccctttctacggctgcgtcaactggaccaatgagaactttcccttcaacgattgcgtcgacaagatggtgatctggtgggaggagggcaagatgacggccaaggtcgtggagtccgccaaggccattctcggcggcagcaaggtgcgcgtggaccaaaagtgcaagtcgtccgcccagatcgaccccacccccgtgatcgtcacctccaacaccaacatgtgcgccgtgattgacgggaacagcaccaccttcgagcaccagcagccgttgcaggaccggatgttcaaatttgaactcacccgccgtctggagcatgactttggcaaggtgacaaagcaggaagtcaaagagttcttccgctgggcgcaggatcacgtgaccgaggtggcgcatgagttctacgtcagaaagggtggagccaacaagagacccgcccccgatgacgcggataaaagcgagcccaagcgggcctgcccctcagtcgcggatccatcgacgtcagacgcggaaggagctccggtggactttgccgacaggtaccaaaacaaatgttctcgtcacgcgggcatgcttcagatgctgtttccctgcaagacatgcgagagaatgaatcagaatttcaacatttgcttcacgcgcgggaccagagactgttcagaatgtttcccgggcgtgtcagaatctcaaccggtcgtcagaaagaggacgtatcggaaactctgtgccattcatcatctgctggggcgggctcccgagattgcttgctcggcctgcgatctggtcaacgtggacctggatgactgtgtttctgagcaataaatgacttaaaccaggtatggctgccgatggttatcttccagattggctcgaggacaacctctctgagggcattcgcgagtggtgggacttgaaacctggagccccgaaacccaaagccaaccagcaaaagcaggacgacggccggggtctggtgcttcctggctacaagtacctcggacccttcaacggactcgacaagggggagcccgtcaacgcggcggacgcagcggccctcgagcacgacaaggcctacgaccagcagctcaaagcgggtgacaatccgtacctgcggtataaccacgccgacgccgagtttcaggagcgtctgcaagaagatacgtcttttgggggcaacctcgggcgagcagtcttccaggccaagaagcgggttctcgaacctctcggtctggttgaggaaggcgctaagacggctcctggaaagaagagaccggtagagccatcaccccagcgttctccagactcctctacgggcatcggcaagacaggccagcagcccgcgaaaaagagactcaactttgggcagactggcgactcagagtcagtgcccgaccctcaaccaatcggagaaccccccgcaggcccctctggtctgggatctggtacaatggctgcaggcggtggcgctccaatggcagacaataacgaaggcgccgacggagtgggtagttcctcaggaaattggcattgcgattccacatggctgggcgacagagtcatcaccaccagcacccgaacctgggccctccccacctacaacaaccacctctacaagcaaatctccaacgggacatcgggaggaagcaccaacgacaacacctacttcggctacagcaccccctgggggtattttgactttaacagattccactgccacttctcaccacgtgactggcagcgactcatcaacaacaactggggattccggcccaagagactcaacttcaagctcttcaacatccaggtcaaggaggtcacgcagaatgaaggcaccaagaccatcgccaataaccttaccagcacgattcaggtctttacggactcggaataccagctcccgtacgtcctcggctctgcgcaccagggctgcccgcctccgttcccggcggacgtcttcatgattcctcagtacgggtacctgactctgaacaacggcagtcaggccgtgggccgttcctccttctactgcctggagtactttccttctcaaatgcggagaacgggcaacaactttgagttcagctaccagtttgaggacgtgccttttcacagcagctacgcgcatagccaaagcctggaccggctgatgaaccccctcatcgaccagtacctgtactacctgtctcggactcagtccacgggaggtaccgcaggaactcagcagttgctattttctcaggccgggcctaataacatgtcggctcaggccaaaaactggctacccgggccctgctaccggcagcaacgcgtctccacgacactgtcgcaaaataacaacagcaactttgcttggaccggtgccaccaagtatcatctgaatggcagagactctctggtaaatcccggtgtcgctatggcaacgcacaaggacgacgaagagcgattttttccatccagcggagtcttgatgtttgggaaacagggagctggaaaagacaacgtggactatagcagcgttatgctaaccagtgaggaagaaatcaaaaccaccaacccagtggccacagaacagtacggcgtggtggccgataacctgcaacagcaaaacgccgctcctattgtaggggccgtcaacagtcaaggagccttacctggcatggtctggcagaaccgggacgtgtacctgcagggtcctatctgggccaagattcctcacacggacggcaactttcatccttcgccgctgatgggaggctttggactgaaacacccgcctcctcagatcctgattaagaatacacctgttcccgcggatcctccaactaccttcagtcaagccaagctggcgtcgttcatcacgcagtacagcaccggacaggtcagcgtggaaattgaatgggagctgcagaaagagaacagcaagcgctggaacccagagattcagtatacttccaactactacaaatctacaaatgtggactttgctgtcaatactgagggtacttattcagagcctcgccccattggcacccgttacctcacccgtaacctgtaattgcctgttaatcaataaaccggttaattcgtttcagttgaactttggtctctgcgaagggcgaattc

SEQ ID NO: 428 - protein, 738 aa, Artificial Sequence; identical to SEQ ID NO: 416
  Description of Artificial Sequence: Synthetic polypeptide

SEQ ID NO: 429 - DNA, 1933 bp, Artificial Sequence
  Description of Artificial Sequence: Synthetic polynucleotide
  modified_base (1302)..(1302): a, c, g, or t
caaggcctacgaccagcagctcaaagcgggtgacaatccgtacctgcggtataaccacgccgacgccgagtttcaggagcgtcttcaagaagatacgtcttttgggggcaacctcgggcgagcagtcttccaggccaaaaagcgggttctcgaacctcttggtctggttgagacgccagctaagacggcacctggaaagaagcgaccggtagactcgccagactccacctcgggcatcggcaagaaaggccagcagcccgcgaaaaagagactcaactttgggcagactggcgactcagagtcagtccccgaccctcaaccaatcggagaaccaccagcaggcccctctggtctgggatctggtacaatggctgcaggcggtggcgcaccaatggctgacaataacgagggcgccgacggagtgggtaatgcctcaggaaattggcattgcgattccacatggctgggcgacagagtcatcaccaccagcacccgaacctgggccctgcccacctacaacaaccacctctacaagcaaatctccagtcagtcagcagggagcaccaacgataacgtctatttcggctacagcaccccctgggggtattttgacttcaacagattccattgccacttctcaccacgtgactggcagcgacttatcaacaacaactggggattccggcccaagaagctcaacttcaagctcttcaacatccaggtcaaggaggtcacgacgaatgacggtgtcacaaccatcgctaataaccttaccagcacggttcaggtcttttcggactcggaatatcaactgccgtacgtcctcggctccgcgcaccagggctgcctgcctccgttcccggcagacgtgttcatgattccgcagtacggatacctgactctgaacaatggcagccaatcggtaggccgttcctccttctactgcctggagtactttccttctcagatgctgagaacgggcaacaacttcacctttagctacaccttcgaggacgtgcctttccacagcagctacgcgcacagccagagtctggaccggctgatgaatcccctcatcgaccagtacctgtactacttggccagaacacagagcaacgcaggaggtactgctggcaatcgggaactgcagttttatcagggcggacctaccaccatggccgaacaagcaaagaactggctgcccggaccttgcttccggcaacagagagtatccaagacgctggatcaaaataacaacagcaactttgcctggactggtgccacaaaataccatttaaatgnaagaaattcattggttaatcccggtgtcgccatggcaacccacaaggacgacgaggaacgcttcttcccttcgagcggagttctaatttttggcaaaactggagcagctaataaaactacattagaaaacgtgctcatgacaaatgaagaagaaattcgtcctaccaacccggtagctaccgaggaatacgggattgtaagcagcaacttgcaggcggctagcaccgcagcccagacacaagttgttaacaaccagggagccttacctggcatggtctggcagaaccgggacgtgtacctgcaaggtcccatttgggccaagattcctcacacggacggcaactttcacccgtctcctctaatgggtggctttggactgaaacacccgcctccccagatcctgatcaaaaacacaccggtacctgctaatcctccagaagtgtttactcctgccaagtttgcttccttcatcacgcagtacagcaccgggcaagtcagcgttgagatcgagtgggagctgcagaaagagaacagcaagcgctggaacccagagattcagtacacctccaactttgacaaacagactggagtggactttgctgttgacagccagggtgtttactctgagcct

SEQ ID NO: 430 - protein, 733 aa, Artificial Sequence
  Description of Artificial Sequence: Synthetic polypeptide
MAADGYLPDWLEDNLSEGIREWWDLKPGAPKPKANQQKQDDGRGLVLPGYKYLGPFNGLDKGEPVNAADAAALEHDKAYDQQLKAGDNPYLRYNHADAEFQERLQEDTSFGGNLGRAVFQAKKRVLEPLGLVEEGAKTAPGKKRPLESPQEPDSSSGIGKKGKQPAKKRLNFEEDTGAGDGPPEGSDTSAMSSDIEMRAAPGGNAVDAGQGSDGVGNASGDWHCDSTWSEGKVTTTSTRTWVLPTYNNHLYLRLGTTSNSNTYNGFSTPWGYFDFNRFHCHFSPRDWQRLINNNWGLRPKAMRVKIFNIQVKEVTTSNGETTVANNLTSTVQIFADSSYELPYVMDAGQEGSLSPFPNDVFMVPQYGYCGIVTGENQNQTDRNAFYCLEYFPSQMLRTGNNFEMAYNFGKVPFHSMYAYSQSPDRLMNPLLDQYLWHLQSTTSGETLNQGNAATTFGKIRSGDFAFYRKNWLPGPCVKQQRLSKTASQNYKIPASGGNALLKYDTHYTLNNRWSNIAPGPPMATAGPSDGDFSNAQLIFPGPSVTGNTTTSANNLLFTSEEEIAATNPRDTDMFGQIADNNQNATTAPITGNVTAMGVLPGMVWQNRDIYYQGPIWAKIPHADGHFHPSPLIGGFGLKHPPPQIFIKNTPVPANPATTFTAARVDSFITQYSTGQVAVQIEWEIEKERSKRWNPEVQFTSNYGNQSSMLWAPDTTGKYTEPRVIGSRYLTNHL

SEQ ID NO: 431 - DNA, 3105 bp, Artificial Sequence
  Description of Artificial Sequence: Synthetic polynucleotide
gaattcgcccttgctgcgtcaactggaccaatgagaactttcccttcaacgattgcgtcgacaagatggtgatctggtgggaggagggcaagatgaccgccaaggtcgtggagtccgccaaggccattctgggcggaagcaaggtgcgcgtggaccaaaagtgcaagtcatcggcccagatcgaccccacgcccgtgatcgtcacctccaacaccaacatgtgcgccgtgatcgacgggaacagcaccaccttcgagcaccagcagccgctgcaggaccgcatgttcaagttcgagctcacccgccgtctggagcacgactttggcaaggtgaccaagcaggaagtcaaagagttcttccgctgggctcaggatcacgtgactgaggtggcgcatgagttctacgtcagaaagggcggagccaccaaaagacccgcccccagtgacgcggatataagcgagcccaagcgggcctgcccctcagttgcggagccatcgacgtcagacgcggaagcaccggtggactttgcggacaggtaccaaaacaaatgttctcgtcacgcgggcatgcttcagatgctgtttccctgcaagacatgcgagagaatgaatcagaatttcaacgtctgcttcacgcacggggtcagagactgctcagagtgcttccccggcgcgtcagaatctcaacccgtcgtcagaaaaaagacgtatcagaaactgtgcgcgattcatcatctgctggggcgggcacccgagattgcgtgttcggcccgcgatctcgtcaacgtggacttggatgactgtgtttctgagcaataaatgacttaaaccaggtatggctgctgacggttatcttccagattggctcgaggacaacctctctgagggcattcgcgagtggtgggacctgaaacctggagcccccaagcccaaggccaaccagcagaagcaggacgacggccggggtctggtgcttcctggctacaagtacctcggacccttcaacggactcgacaagggggagcccgtcaacgcggcggacgcagcggccctcgagcacgacaaggcctacgaccagcagctcaaagcgggtgacaatccgtacctgcggtataaccacgccgacgccgagtttcaggagcgtctgcaagaagatacgtcttttgggggcaacctcgggcgagcagtcttccaggccaagaagagggtactcgaacctctgggcctggttgaagaaggtgctaagacggctcctggaaagaagagaccgttagagtcaccacaagagcccgactcctcctcaggaatcggcaaaaaaggcaaacaaccagccaaaaagagactcaactttgaagaggacactggagccggagacggaccccctgaaggatcagataccagcgccatgtcttcagacattgaaatgcgtgcagcaccgggcggaaatgctgtcgatgcgggacaaggttccgatggagtgggtaatgcctcgggtgattggcattgcgattccacctggtctgagggcaaggtcacaacaacctcgaccagaacctgggtcttgcccacctacaacaaccacttgtacctgcggctcggaacaacatcaaacagcaacacctacaacggattctccaccccctggggatactttgactttaacagattccactgtcacttctcaccacgtgactggcaaagactcatcaacaacaactggggactacgaccaaaagccatgcgcgttaaaatcttcaatatccaagttaaggaggtcacaacgtcgaacggcgagactacggtcgctaataaccttaccagcacggttcagatatttgcggactcgtcgtatgagctcccgtacgtgatggacgctggacaagagggaagtctgtctcctttccccaatgacgtcttcatggtgcctcaatatggctactgtggcattgtgactggcgaaaatcagaaccagacggacagaaatgctttctactgcctggagtattttccttcacaaatgctgagaactggcaataactttgaaatggcttacaactttgggaaggtgccgttccactcaatgtatgcttacagccagagcccggacagactgatgaatcccctcctggaccagtacctgtggcacttacagtcgaccacctctggagagactctgaatcaaggcaatgcagcaaccacatttggaaaaatcaggagtggagactttgccttttacagaaagaactggctgcctgggccttgtgttaaacagcagagactctcaaaaactgccagtcaaaattacaagattcctgccagcgggggcaacgctctgttaaagtatgacacccactataccttaaacaaccgctggagcaacatagcgcctggacctccaatggcaacagctggaccttcagatggggacttcagcaacgcccagctcatcttccctggaccatcagtcaccggaaacacaacaacctcagcaaacaatctgttgtttacatcagaagaagaaattgctgccaccaacccaagagacacggacatgtttggtcagattgctgacaataatcagaatgctacaactgctcccataaccggcaacgtgactgctatgggagtgcttcctggcatggtgtggcaaaacagagacatttactaccaagggccaatttgggccaagatcccacacgcggacggacattttcatccttcaccgctaattggcggttttggactgaaacatccgcctccccagatatttatcaaaaacacccccgtacctgccaatcctgcgacaaccttcactgcagccagagtggactctttcatcacacaatacagcaccggccaggtcgctgttcagattgaatgggaaatcgaaaaggaacgctccaaacgctggaatcctgaagtgcagtttacttcaaactatgggaaccagtcttctatgttgtgggctcccgatacaactgggaagtatacagagccgcgggttattggctctcgttatttgactaatcatttgtaactgcctagttaatcaataaaccgtgtgattcgtttcagttgaactttggtctctgcgaagggcgaattc

SEQ ID NO: 432 - protein, 733 aa, Artificial Sequence
  Description of Artificial Sequence: Synthetic polypeptide
MAADGYLPDWLEDNLSEGIREWWDLKPGAPKPKANQQKQDDGRGLVLPGYKYLGPFNGLDKGEPVNAADAAALEHDKAYDQQLKAGDNPYLRYNHADAEFQERLQEDTSFGGNLGRAVFQAKKRVLEPLGLVEEGAKTAPGKKRPLESPQEPDSSSGIGKKGKQPAKKRLNFEEDTGAGDGPPEGSDTSAMSSDIEMRAAPGGNAVDAGQGSDGVGNASGDWHCDSTWSEGKVTTTSTRTWVLPTYNNHLYLRLGTTSNSNTYNGFSTPWGYFDFNRFHCHFSPRDWQRLINNNWGLRPKAMRVKIFNIQVKEVTTSNGETTVANNLTSTVQIFADSSYELPYVMDAGQEGSLPPFPNDVFMVPQYGYCGIVTGENQNQTDRNAFYCLEYFPSQMLRTGNNFEMAYNFEKVPFHSMYAHSQSLDRLMNPLLDQYLWHLQSTTSGETLNQGNAATTFGKIRSGDFAFYRKNWLPGPCVKQQRFSKTASQNYKIPASGGNALLKYDTHYTLNNRWSNIAPGPPMATAGPSDGDFSNAQLIFPGPSVTGNTTTSANNLLFTSEEEIAATNPRDTDMFGQIADNNQNATTAPITGNVTAMGVLPGMVWQNRDIYYQGPIWAKIPHADGHFHPSPLIGGFGLKHPPPQIFIKNTPVPANPATTFTAARVDSFITQYSTGQVAVQIEWEIEKERSKRWNPEVQFTSNYGNQSSMLWAPDTTGKYTEPRVIGSRYLTNHL

SEQ ID NO: 433 - DNA, 3105 bp, Artificial Sequence
  Description of Artificial Sequence: Synthetic polynucleotide
gaattcgcccttgctgcgtcaactggaccaatgagaactttcccttcaacgattgcgtcgacaagatggtgatctggtgggaggagggcaagatgaccgccaaggtcgtggagtccgccaaggccattctgggcggaagcaaggtgcgcgtggaccaaaagtgcaagtcatcggcccagatcgaccccacgcccgtgatcgtcacctccaacaccaacatgtgcgccgtgatcgacgggaacagcaccaccttcgagcaccagcagccgctgcaggaccgcatgttcaagttcgagctcacccgccgtctggagcacgactttggcaaggtgaccaagcaggaagtcaaagagttcttccgctgggctcaggatcacgtgactgaggtggcgcatgagttctacgtcagaaagggcggagccaccaaaagacccgcccccagtgacgcggatataagcgagcccaagcgggcctgcccctcagttgcggagccatcgacgtcagacgcggaagcaccggtggactttgcggacaggtaccaaaacaaatgttctcgtcacgcgggcatgcttcagatgctgtttccctgcaagacatgcgagagaatgaatcagaatttcaacgtctgcttcacgcacggggtcagagactgctcagagtgcttccccggcgcgtcagaatctcaacccgtcgtcagaaaaaagacgtatcagaaactgtgcgcgattcatcatctgctggggcgggcacccgagattgcgtgttcggcctgcgatctcgtcaacgtggacttggatgactgtgtttctgagcaataaatgacttaaaccaggtatggctgctgacggttatcttccagattggctcgaggacaacctctctgagggcattcgcgagtggtgggacctgaaacctggagcccccaagctcaaggccaaccagcagaagcaggacgacggccggggtctggtgcttcctggctacaagtacctcggacccttccacggactcgacaagggggagcccgtcaacgcggcggacgcagcggccctcgagcacgacaaggcctacgaccagcagctcaaagcgggtgacaatccgtacctgcggtataaccacgccgacgccgagtttcaggagcgtctgcaagaagatacgtcttttgggggcaacctcgggcgagcagtcttccaggccaagaagagggtactcgaaccactgggcctggttgaagaaggtgctaagacggctcctggaaagaagagaccgttagagtcaccacaagagcccgactcctcctcaggaatcggcaaaaaaggcaaacaaccagccaaaaagagactcaactttgaagaggacactggagccggagacggaccccctgaaggatcagataccagcgccatgtcttcagacattgaaatgcgtgcagcaccgggcggaaatgctgtcgatgcgggacaaggttccgatggagtgggtaatgcctcgggtgattggcattgcgattccacctggtctgagggcaaggtcacaacaacctcgaccagaacctgggtcttgcccacctacaacaaccacttgtacctgcggctcggaacaacatcaaacagcaacacctacaacggattctccaccccctggggatactttgactttaacagattccactgtcacttctcaccacgtgactggcaaagactcatcaacaacaactggggactacgaccaaaagccatgcgcgttaaaatcttcaatatccaagttaaggaggtcacaacgtcgaacggcgagactacggtcgctaataaccttaccagcacggttcagatatttgcggactcgtcgtatgagctcccgtacgtgatggacgctggacaagagggaagtctgcctcctttccccaatgacgtcttcatggtgcctcaatatggctactgtggcattgtgactggcgaaaatcagaaccagacggacagaaatgctttctactgcctggagtattttccttcacaaatgctgagaactggcaataactttgaaatggcttacaactttgagaaggtgccgttccactcaatgtatgctcacagccagagcctggacagactgatgaatcccctcctggaccagtacctgtggcacttacagtcgaccacctctggagagactctgaatcaaggcaatgcagcaaccacatttggaaaaatcaggagtggagactttgccttttacagaaagaactggctgcctgggccttgtgttaaacagcagagattctcaaaaactgccagtcaaaattacaagattcctgccagcgggggcaacgctctgttaaagtatgacacccactataccttaaacaaccgctggagcaacatagcgcctggacctccaatggcaacagctggaccttcagatggggacttcagcaacgcccagctcatcttccctggaccatcagtcaccggaaacacaacaacctcagcaaacaatctgttgtttacatcagaaggagaaattgctgccaccaacccaagagacacggacatgtttggtcagattgctgacaataatcagaatgctacaactgctcccataaccggcaacgtgactgctatgggagtgcttcctggcatggtgtggcaaaacagagacatttactaccaagggccaatttgggccaagatcccacacgcggacggacattttcatccttcaccgctaattggcggttttggactgaaacatccgcctccccagatatttatcaaaaacacccccgtacctgccaatcctgcgacaaccttcactgcagccagagtggactctttcatcacacaatacagcaccggccaggtcgctgttcagattgaatgggaaatcgaaaaggaacgctccaaacgccggaatcctgaagtgcagtttacttcaaactatgggaaccagtcttctatgttgtgggctcccgatacaactgggaagtatacagagccgcgggttattggctctcgttatttgactaatcatttgtaactgcctagttaatcaataaaccgtgtgattcgtttcagttgaactttggtctctgcgaagggcgaattc

SEQ ID NO: 434 - protein, 733 aa, Artificial Sequence
  Description of Artificial Sequence: Synthetic polypeptide
MAADGYLPDWLEDNLSEGIREWWDLKPGAPKPKANQQKQDDGRGLVLPGYEYLGPFNGLDKGEPVNAADAAALEHDKAYDQQLKAGDNPYLRYNHADAEFQERLQEDTSFGGNLGRAVFQAKKRVLEPLGLVEEGAKTAPGKKRPLESPQEPDSSSGIGKKGKQPAKKRLNFEEDTGAGDGPPEGSDTSAMSSDIEMRAAPGGNAVDAGQGSDGVGNASGDWHCDSTWSEGKVTTTSTRTWVLPTYNNHLYLRLGTTSNSNTYNGFSTPWGYFDFNRFHCHFSPRDWQRLINNNWGLRPKAMRVKIFNIQVKEVTTSNGETTVANNLTSTVQIFADSSYELPYVMDAGQEGSLPPFPNDVFMVPQYGYCGIVTGENQNQTDRNAFYCLEYFPSQMLRTGNNFETAYNFEKVPFHSMYAHSQSLDGLMNPLLDQYLWHLQSTTSGETLNQGNAATTFGKIRSGDFAFYRKNWLPGPCVKQQRFSKTASQNYKIPASGGNALLKYDTHYTLNNRWSNIAPGPPMATAGPSDGDFSNAQLIFPGPSVTGNTTTSANNLLFTSEEEIAATNPRDTDMFGQIADNNQNATTAPITGNVTAMGVLPGMVWQNRDIYYQGPIWAKIPHADGHFHPSPLIGGFGLKHPPPQIFIKNTPVPAYPATTFTAARVDSFITQYSTGQVAVQIEWEIEKERSKRWNPEVQFTSNCGNQSSMLWAPDTTGKYTEPRVIGSRYLTNHL

SEQ ID NO: 435 - DNA, 3105 bp, Artificial Sequence
  Description of Artificial Sequence: Synthetic polynucleotide
gaattcgcccttcgcagagaccaaagttcaactgaaacgaatcacacggtttattgattaactaggcagttacaaatgattagtcaaataacgagagccaataacccgcggctctgtatacttcccagttgtatcgggagcccacaacatagaagactggttcccacagtttgaagtaaactgcacttcaggattccagcgtttggagcgttccttttcgatttcccattcaatctgaacagcgacctggccggtgctgtattgtgtgatgaaagagtccactctggctgcagtgaaggttgtcgcaggataggcaggtacgggggtgtttttgataaatatctggggaggcggatgtttcagtccaaaaccgccaattagcggtgaaggatgaaaatgtccgtccgcgtgtgggatcttggcccaaattggcccttggtagtaaatgtctctgttttgccacaccatgccaggaagcactcccatagcagtcacgttgccggttatgggagcagttgtagcattctgattattgtcagcaatctgaccaaacatgtccgtgtctcttgggttggtggcagcaatttcttcttctgatgtaaacaacagattgtttgctgaggttgttgtgtttccggtgactgatggtccagggaagatgagctgggcgttgctgaagtccccatctgaaggtccagctgttgccattggaggtccaggcgctatgttgctccagcggttgtttaaggtatagtgggtgtcatactttaacagagcgttgcccccgctggcaggaatcttgtaattttgactggcagtttttgagaatctctgctgtttaacacaaggcccaggcagccagttctttctgtaaaaggcaaagtctccactcctgatttttccaaatgtggttgctgcattgccttgattcagagtctctccagaggtggtcgactgtaagtgccacaggtactggtccaggaggggattcatcagtccgtccaggctctggctgtgagcatacattgagtggaacggcaccttctcaaagttgtaagccgtttcaaagttattgccagttctcagcatttgtgaaggaaaatactccaggcagtagaaagcatttctgtccgtctggttctgattttcgccagtcacaatgccacagtagccatattgaggcaccatgaagacgtcattggggaaaggaggcagacttccctcttgtccagcgtccatcacgtacgggagctcatacgacgagtccgcaaatatctgaaccgtgctggtaaggttattagcgaccgtagtctcgccgttcgacgttgtgacctccttaacttggatattgaagattttaacgcgcatggcttttggtcgtagtccccagttgttgttgatgagtctttgccagtcacgtggtgagaagtgacagtggaatctgttaaagtcaaagtatccccagggggtggagaatccgttgtaggtgttgctgtttgatgttgttccgagccgcaggtacaagtggttgttgtaggtgggcaagacccaggttctggtcgaggttgttgtgaccttgccctcagaccaggtggaatcgcaatgccaatcacccgaggcattacccactccatcggaaccttgtcccgcatcgacagcatttccgcccggtgctgcacgcatttcaatgtctgaagacatggcgctggtatctgatccttcagggggtccgtctccggctccagtgtcctcttcaaagttgagtctctttttggctggttgtttgccttttttgccgattcctgaggaggagtcgggctcttgtggtgactctaacggtctcttctttccaggagccgtcttagcaccttcttcaaccaggcccagaggttcgagtaccctcttcttggcctggaagactgctcgcccgaggttgcccccaaaagacgtatcttcttgcagacgctcctgaaactcggcgtcggcgtggttataccgcaggtacggattgtcacccgctttgagctgctggtcgtaggccttgtcgtgctcgagggccgctgcgtccgccgcgttgacgggctcccccttgtcgagtccgttgaagggtccgaggtactcgtagccaggaagcaccagaccccggccgtcgtcctgcttctgctggttggccttgggcttgggggctccaggtttcaggtcccaccactcgcgaatgccctcagagaggttgtcctcgagccaatctggaagataaccgtcagcagccatacctggtttaagtcatttattgctcagaaacacagtcatccaagtccacgttgacgagatcgcaggccgaacacgcaatctcgggtgcccgccccagcagatgatgaatcgcgcacagtttctgatacgtcttttttctgacgacgggttgagattctgacgcgccggggaagcactctgagcagtctctgaccccgtgcgtgaagcagacgttgaaattctgattcattctctcgcatgtcttgcagggaaacagcatctgaagcatgcccgcgtgacgagaacatttgttttggtacctgtccgcaaggtccaccggtgcttccgcgtctgacgtcgatggctccgcaactgaggggcaggcccgcttgggctcgcttatatccgcgtcactgggggcgggtcttttggtggctccgccctttctgacgtagaactcatgcgccacctcagtcacgtgatcctgagcccagcggaagaactctttgacttcctgcttggtcaccttgccaaagtcgtgctccagacggcgggtgagctcgaacttgaacatgcggtcctgcagcggctgctggtgctcgaaggtggtgctgttcccgtcgatcacggcgcacatgttggtgttggaggtgacgatcacgggcgtggggtcgatctgggccgatgacttgcacttttggtccacgcgcaccttgcttccgcccagaatggccttggcggactccacgaccttggcggtcatcttgccctcctcccaccagatcaccatcttgtcgacgcaatcgttgaagggaaagttctcattggtccagttgacgcagcaagggcgaattc

SEQ ID NO: 436 - protein, 729 aa, Artificial Sequence
  Description of Artificial Sequence: Synthetic polypeptide
MAADGYLPDWLEDNLSEGIREWWDLKPGAPKPKANQQKQDDGRGLVLPGYKYLGPFNGLDKGEPVNAADAAALEHDKAYDQQLKAGDNPYLRYNHADAEFQERLQEDTSFGGNLGRAVFQAKKRVLEPLGLVEEGAKTAPGKKRPIDSPDSSTGIGKKGQQPAKKKLNFGQTGDSESVPDPQPLGEPPAAPSSVGSGTMAAGGGAPMADNNEGADGVGNASGNWHCDSTWLGDRVITTSTRTWALPTYNNHLYKQISSSSSGATNDNHYFGYSTPWGYFDFNRFHCHFSPRDWQRLINNNWGFRPKKLRFKLFNIQVKEVTTNDGVTTIANNLTSTVQVFSDSEYQLPYVLGSAHQGCLPPFPADVFMIPQYGYLTLNNGSQSVGRSSFYCLEYFPSQMLRTGNNFEFSYSFEDVPFHSSYAHSQSLDRLMNPLIDQYLYYLARTQSTTGSTRELQFHQAGPNTMAEQSKNWLPGPCYRQQGLSKNLDFNNNSNFAWTAATKYHLNGRNSLTNPGIPMATNKDDEDQFFPINGVLVFGKTGAANKTTLENVLMTSEEEIKTTNPVATEEYGVVSSNLQPSTAGPQSQTINSQGALPGMVWQNRDVYLQGPIWAKIPHTDGNFHPSPLMGGFGLKHPPPQILIKNTPVPANPPEVFTPAKFASFITQYSTGQVSVEIEWELQKENSKRWNPEIQYTSNYAKSNNVEFAVNPDGVYTEPRPIGTRYLPRNL

SEQ ID NO: 437 - DNA, 3094 bp, Artificial Sequence
  Description of Artificial Sequence: Synthetic polynucleotide
gaattcgcccttgctgcgtcaactggaccaagagaactttcccttcaacgattgcgtcgacaagatggtgatctggtgggaggagggcaagatgacggccaaggtcgtggagtccgccaaagccattctgggcggaagcaaggtgcgcgtcgaccaaaagtgcaagtcctcggcccagatcgatcccacccccgtgatcgtcacctccaacaccaacatgtgcgccgtgatcgacgggaacagcaccaccttcgagcaccagcagccgttgcaggaccggatgttcaaatttgaactcacccgccgtctggaacacgactttggcaaggtgaccaagcaggaagtcaaagagttcttccgctgggctagtgatcacgtgactgaggtgacgcatgagttctacgtcagaaagggcggagccagcaaaagacccgcccccgatgacgcggatataagcgagcccaagcgggcctgtccctcagtcacggacccatcgacgtcagacgcggaaggagctccggtggactttgccgacaggtaccaaaacaaatgttctcgtcacgcgggcatgcttcagatgctgtttccctgcaaaacgtgcgagagaatgaatcagaatttcaacatttgcttcacgcacggggtcagagactgtttagaatgtttccccggcgtgtcagaatctcaaccggtcgtcagaaaaaagacgtatcggaagctgtgtgcgattcatcatctgctggggcgggcacccgagattgcttgctcggcctgcgacctggtcaacgtggacctggacgactgtgtttctgagcaataaatgacttaaaccgggtatggctgccgatggttatcttccagattggctcgaggacaacctctctgagggcattcgcgagtggtgggacctgaaacctggagccccgaaacccaaagccaaccagcaaaagcaggacgacggccggggtctggtgcttcctggctacaagtacctcggacccttcaacggactcgacaagggggagcccgtcaacgcggcggacgcagcggccctcgagcacgacaaggcctacgaccagcagctcaaagcgggtgacaatccgtacctgcggtataaccacgccgacgccgagtttcaggagcgtctgcaagaagatacgtcatttgggggcaacctcgggcgagcagtcttccaggccaagaagcgggttctcgaacctctcggtctggttgaggaaggcgctaagacggctcctggaaagaagagacccatagactctccagactcctccacgggcatcggcaaaaaaggccagcagcccgctaaaaagaagctcaattttggtcagactggcgactcagagtcagtccccgaccctcaacctcttggagaacctccagcagcgccctctagtgtgggatctggtacaatggctgcaggcggtggcgcaccaatggcagacaataacgaaggtgccgacggagtgggtaatgcctcaggaaattggcattgcgattccacatggctgggcgacagagtcatcaccaccagcaccagaacctgggccctccccacctacaacaaccacctctacaagcaaatctccagcagcagctcaggagccaccaatgacaaccactacttcggctacagcaccccctgggggtattttgactttaacagattccactgccacttctcaccacgtgactggcagcgactcatcaacaacaactggggattccggcccaagaagctgcggttcaagctcttcaacatccaggtcaaggaggtcacaacgaatgacggcgtcacgaccatcgctaataaccttaccagcacggttcaggtcttctcggactcggaataccagctgccgtacgtcctcggctctgcgcaccagggctgcctgcctccgttcccggcggacgtcttcatgattcctcagtacggctacctgactctgaacaacggcagccaatcggtgggccgttcctccttctactgcctggaatatttcccctctcaaatgctgagaacgggcaacaactttgagttcagttacagcttcgaggacgtgcctttccacagcagctacgcgcacagccagagcctagaccggctgatgaaccctctcatcgaccagtacctgtactacctggcccggacccagagcaccacgggttccaccagggaactgcaatttcatcaagctgggcccaatactatggccgagcagtcaaagaactggctgcctggaccctgctataggcaacagggactgtcaaagaacttggactttaacaacaacagcaattttgcctggactgctgccactaaatatcatctgaatggcagaaactctttgaccaatcctggcattcccatggcaaccaacaaggatgatgaggaccagttctttcccatcaacggggtactggtttttggcaagacgggagctgccaacaaaactacgctggaaaacgttctgatgaccagcgaggaggagatcaagaccactaaccctgtggctacagaagaatacggtgtggtctccagcaacctgcagccgtctacagccgggcctcaatcacagactatcaacagccagggagcactgcctggcatggtctggcagaaccgggacgtgtatctgcagggtcccatctgggccaaaattcctcacacggatggcaactttcacccgtctcctctgatgggcggttttggactcaaacacccgcctccacagatcctgatcaaaaacacacctgtacctgctaatcctccggaggtgtttactcctgccaagtttgcctccttcatcacgcagtacagcaccggacaagtcagcgtggaaatcgagtgggagctgcagaaagaaaacagcaagcgctggaacccagaaattcagtatacttccaattatgccaagtctaataatgttgaatttgctgtgaaccctgatggtgtttatactgagcctcgccccattggcactcgttacctcccccgtaatctgtaattgcttgttaatcaataaaccggttgattcgtttcagttgaactttggtctctgcgaagggcgaattc

SEQ ID NO: 438 - protein, 1458 aa, Artificial Sequence
  Description of Artificial Sequence: Synthetic polypeptide
MAADGYLPDWLEDNLSEGIREWWDLKPGAPKPKANQQKQDDGRGLVLPGYKYLGPFNGLDKGEPVNAADAAALEHDKAYDQQLKAGDNPYLRYNHADAEFQERLQEDTSFGGNLGRAVFQAKKRVLEPLGLVEEGAKTAPGKKRPIDSPDSSTGIGKKGQQPAKKKLNFGQTGDSESVPDPQPLGEPPAAPSSVGSGTMAAGGGAPTADNNEGADGVGNASGNWHCDSTWLGDRVITTSTRTWALPTYNNHLYKQISSSSSGATNDNHYFGYSTPWGYFDFNRFHCHFSPRDWQRLINNNWGFRPKKLRFKLFNIQVKEVTTNDGVTTIANNLTSTVQVFSDSEYQLPYVLGSAHQGCLPPFPADVFMIPQYGYLTLNNGSQSVGRSSFYCLEYFPSQMLRTGNNFEFSYSFEDVPFHSSYAHSQSLDRLMNPLIDQYLYYLARTQSTTGSTRELQFHQAGPNTMAEQSKNWLPGPCYRQQRLSKNLDFNNNSNFAWTAATKYHLNGRNSLTNPGIPMATNKDDEDQFFPINGVLVFGKTGAANKTTLENVLMTSEEEIKTTNPVATEEYGVVSSNLQSSTAGPQSQTINSQGALPGMVWQNRDVYLQGPIWAKIPHTDGNFHPSPLMGGFGLEHPPPQILIKNTPVPANPPEVFTPAKFASFITQYSTGQVSVEIEWELQKENSKRWNPEIQYTSNYAKSNNVEFAVNPDGVYTEPRPIGTRYLTRNLMAADGYLPDWLEDNLSEGIREWWDLKPGAPKPKANQQKQDDGRGLVLPGYKYLGPFNGLDKGEPVNAADAAALEHDKAYDQQLKAGDNPYLRYNHADAEFQERLQEDTSFGGNLGRAVFQAKKRVLEPLGLVEEGAKTAPGKKRPIGSPDSSTGIGKKGQQPAKKKLNFGQTGDSESVPDPQPLGEPPAAPSSVGSGTMAAGGGAPMADNNEGADGVGNASGNWHCDSTWLGDRVITTSTRTWALPTYNNHLYKQISSSSSGATNDNHYFGYSTPWGYFDFNRFHCHFSPRDWQRLINNNWGFRPKKLRFKLLNIQVKEVTTNDGVTTIANNLTSTVQVFSDSEYQLPYVLGSAHQGCLPPFPADVFMIPQYGYLTLDNGSQSVGRSSFYCLEYFPSQMLRTGNNFEFSYSFEDVPFHSSYAHSQSLDRLMNPLIDQYLYYLARTQSTTGSTRELQFHQAGPNTMAEQSKNWLPGPCYRQQRLSKNLDFNNNSNFAWTAATKYHLNGRNSLTNPGIPMATNKDDEDQFFPINGVLVFGKTGAANKTTLENVLMTSEEEIKTTNPVATEEYGVVSSNLQSSTAGPQSQTINSQGALPGMVWQNRDVYLQGPIWAKIPHTDGNFHPSPLMGGFGLKHPPPQILIKNTPVPANPPEVFTPAKFASFITQYSTGQVSVEIEWELQKENSKRWNPEIQYTSNYAKSNNVEFAVNPDGVYTEPRPIGTRYLTRNL

SEQ ID NO: 439 - DNA, 3095 bp, Artificial Sequence
  Description of Artificial Sequence: Synthetic polynucleotide
gaattcgcccttcgcagagaccaaagttcaactgaaacgaatcaaccggtttattgattaacaagcaattacagattacgggtgaggtaacgagtgccaatggggcgaggctcagtataaacaccatcagggttcacagcaaattcaacattattagacttggcataattggaagtatactgaatttctgggttccagcgcttgctgttttctttctgcagctcccactcgatttccacgctgacttgtccggtgctgtactgcgtgatgaaggaggcaaacttggcaggagtaaacacctccggaggattagcaggtacaggtgtgtttttgatcaggatctgtggaggcgggtgtttgagtccaaaaccgcccatcagaggagacgggtgaaagttgccatccgtgtgaggaattttggcccagatgggaccctgcagatacacgtcccggttctgccagaccatgccaggcagtgctccctggctgttgatagtctgtgattgaggcccggctgtagacgactgcaggttgctggagaccacaccgtattcttctgtagccacagggttagtggtcttgatctcctcctcgctggtcatcagaacgttttccagcgtagttttgttggcagctcccgtcttgccaaaaaccagtaccccgttgatgggaaagaactggtcctcatcatccttgttggttgccatgggaatgccaggattggtcaaagagtttctgccattcagatgatatttagtggcagcagtccaggcaaaattgctgttgttgttaaagtccaagttctttgacagtctctgttgcctatagcagggtccaggcagccagttctttgactgctcggccatagtattgggcccagcttgatgaaattgcagttccctggtggaacccgtggtgctctgggtccgggccaggtagtacaggtactggtcgatgagagggttcatcagccggtctaggctctggctgtgcgcgtagctgctgtggaaaggcacgtcctcgaagctgtaactgaactcaaagttgttgcccgttctcagcatttgagaggggaaatattccaggcagtagaaggaggaacggcccaccgattggctgccgttgtccagagtcaggtagccgtactgaggaatcatgaagacgtccgccgggaacggaggcaggcagccctggtgcgcagagccgaggacgtacggcagctggtattccgagtccgagaagacctgaaccgtgctggtaaggttattagcgatggtcgtgacgccgtcattcgttgtgacctccttgacctggatgttgaggagcttgaaccgcagcttcttgggccggaatccccagttgttgttgatgagtcgctgccagtcacgtggtgagaagtggcagtggaatctgttaaagtcaaaatacccccagggggtgctgtagccgaagtagtggttgtcattggtggctcctgagctgctgctggagatttgcttgtagaggtggttgttgtaggtggggagggcccaggttctggtgctggtggtgatgactctgtcgcccagccatgtggaatcgcaatgccaatttcctgaggcattacccactccgtcggcaccttcgttattgtctgccattggtgcgccaccgcctgcagccattgtaccagatcccacactagagggcgctgctggaggttctccaagaggttgagggtcggggactgactctgagtcgccagtctgaccaaaattgagcttctttttagcgggctgctggccttttttgccgatgcccgtggaggagtctggagagcctatgggtctcttctttccaggagccgtcttagcgccttcctcaaccagaccgagaggttcgagaacccgcttcttggcctggaagactgctcgcccgaggttgcccccaaatgacgtatcttcttgcagacgctcctgaaactcggcgtcggcgtggttataccgcaggtacggattgtcacccgctttgagctgctggtcgtaggccttgtcgtgctcgagggccgctgcgtccgccgcgttgacgggctcccccttgtcgagtccgttgaagggtccgaggtacttgtagccaggaagcaccagaccccggccgtcgtcctgcttttgctggttggctttgggtttcggggctccaggtttcaggtcccaccactcgcgaatgccctcagagaggttgtcctcgagccaatctggaagataaccatcggcagccatacctggtttaagtcatttattgctcagaaacacagtcgtccaggtccacgttgaccaggtcgcaggccgagcaagcaatctcgggtgcccgccccagcagatgatgaatcgcacacagcttccgatacgtcttttttctgacgaccggttgagattctgacacgccggggaaacattctaaacagtctctgaccccgtgcgtgaagcaaatgttgaaattctgattcattctctcgcacgttttgcagggaaacagcacctgaagcatgcccgcgtgacgagaacatttgttttggtacctgtcggcaaagtccaccggagctccttccgcgtctgacgtcgatgggtccgtgactgagggacgggcccgcttgggctcgcttatatccgcgtcatcgggggcgggtcttttgctggctccgccctttctgacgtagaactcatgcgtcacctcagtcacgtgatcactagcccagcggaagaactctttgacttcctgctttgtcaccttgccaaagtcgtgttccagacggcgggtgagttcaaatttgaacatccggtcctgcaacggttgctggtgctcgaaggtggtgctgttcccgtcgatcacggcgcacatgttggtgttggaggtgacgatcacgggggtgggatcgatctgggcggacgacttgcacttttggtccacgcgcaccttgctgccgccgagaatggccttggcggactccacgaccttggccgtcatcttgccctcctcccaccagatcaccatcttgtcgacgcaatcgttgaagggaaagttctcattggtccagttgacgcagcaagggcgaattc

SEQ ID NO: 440 - DNA, 3095 bp, Artificial Sequence
  Description of Artificial Sequence: Synthetic polynucleotide
gaattcgcccttcgcagagaccaaagttcaactgaaacgaatcaaccggtttattgattaacaagcaattacagattacgggtgaggtaacgagtgccaatggggcgaggctcagtataaacaccatcagggttcacagcaaattcaacattattagacttggcataattggaagtatactgaatttctgggttccagcgcttgctgttttctttctgcagctcccactcgatttccacgctgacttgtccggtgctgtactgcgtgatgaaggaggcaaacttggcaggagtaaacacctccggaggattagcaggtacaggtgtgtttttgatcaggatctgtggaggcgggtgttcgagtccaaaaccgcccatcagaggagacgggtgaaagttgccatccgtgtgaggaattttggcccagatgggaccctgcagatacacgtcccggttctgccagaccatgccaggcagtgctccctggctgttgatagtctgtgattgaggcccggctgtagacgactgcaggttgctggagaccacaccgtattcttctgtagccacagggttagtggtcttgatctcctcctcgctggtcatcagaacgttttccagcgtagttttgttggcagctcccgtcttgccaaaaaccagtaccccgttgatgggaaagaactggtcctcatcatccttgttggttgccatgggaatgccaggattggtcaaagagtttctgccattcagatgatatttagtggcagcagtccaggcaaaattgctgttgttgttaaagtccaagttctttgacagtctctgttgcctatagcagggtccaggcagccagttctttgactgctcggccatagtattgggcccagcttgatgaaattgcagttccctggtggaacccgtggtgctctgggtccgggccaggtagtacaggtactggtcgatgagagggttcatcagccggtctaggctctggctgtgcgcgtagctgctgtggaaaggcacgtcctcgaagctgtaactgaactcaaagttgttgcccgttctcagcatttgagaggggaaatattccaggcagtagaaggaggaacggcccaccgattggctgccgttgttcagagtcaggtagccgtactgaggaatcatgaagacgtccgccgggaacggaggcaggcagccctggtgcgcagagccgaggacgtacggcagctggtattccgagtccgagaagacctgaaccgtgctggtaaggttattagcgatggtcgtgacgccgtcattcgttgtgacctccttgacctggatgttgaagagcttgaaccgcagcttcttgggccggaatccccagttgttgttgatgagtcgctgccagtcacgtggtgagaagtggcagtggaatctgttaaagtcaaaatacccccagggggtgctgtagccgaagtagtggttgtcattggtggctcctgagctgctgctggagatttgcttgtagaggtggttgttgtaggtggggagggcccaggttctggtgctggtggtgatgactctgtcgcccagccatgtggaatcgcaatgccaatttcctgaggcattacccactccgtcggcaccttcgttattgtctgccgttggtgcgccaccgcctgcagccattgtaccagatcccacactagagggcgctgctggaggttctccaagaggttgagggtcggggactgactctgagtcgccagtctgaccaaaattgagcttctttttagcgggctgctggccttttttgccgatgcccgtggaggagtctggagagtctatgggtctcttctttccaggagccgtcttagcgccttcctcaaccagaccgagaggttcgagaacccgcttcttggcctggaagactgctcgcccgaggttgcccccaaatgacgtatcttcttgcaggcgctcctgaaactcggcgtcggcgtggttataccgcaggtacggattgtcacccgctttgagctgctggtcgtaggccttgtcgtgctcgagggccgctgcgtccgccgcgttgacgggctcccccttgtcgagtccgttgaagggtccgaggtacttgtagccaggaagcaccagaccccggccgtcgtcctgcttttgctggttggctttgggtttcggggctccaggtttcaggtcccaccactcgcgaatgccctcagagaggttgtcctcgagccaatctggaagataaccatcggcagccatacctggtttaagccatttattgctcagaaacacagtcgtccaggtccacgttgaccaggtcgcaggccgagcaggcaatctcgggtgcccgccccagcagatgatgaatcgcacacagcttccgatacgtcttttttctgacgaccggttgagattctgacacgccggggaaacattctaaacagtctctgaccccgtgcgtgaagcaaatgttgaaattctgattcattctctcgcacgttttgcagggaaacagcatctgaagcatgcccgcgtggcgagaacatttgttttggtacctgtcggcaaagtccaccggagctccttccgcgtctgacgtcgatgggtccgtgactgagggacaggcccgcttgggctcgcttatatccgcgtcatcgggggcgggtcttttgctggctccgccctttctgacgtagaactcatgcgtcacctcagtcacgtgatcactagcccagcggaagaactctttgacttcctgctttgtcaccttgccaaagtcgtgttccagacggcgggtgagttcaaatttgaacatccggtcctgcaacggctgctggtgctcgaaggtggtgctgttcccgtcgatcacggcgcgcatgttggtgttggaggtgacgatcacgggggtgggatcgatctgggcggacgacttgcacttttggtccacgcgcaccttgctgccgccgagaatggccttggcggactccacgaccttggccgtcatcttgccctcctcccaccagatcaccatcttgtcgacgcaatcgttgaagggaaagttctcattggtccagttgacgcagcaagggcgaattc

SEQ ID NO: 441 - protein, 729 aa, Artificial Sequence; identical to SEQ ID NO: 169
  Description of Artificial Sequence: Synthetic polypeptide

SEQ ID NO: 442 - protein, 729 aa, Artificial Sequence
  Description of Artificial Sequence: Synthetic polypeptide
MAADGYLPDWLEDNLSEGIREWWDLKPGAPKPKANQQKQDDGRGLVLPGYKYLGPFNGLDKGEPVNAADAAALEHDKAYDQQLKAGDNPYLRYNHADAEFQERLQEDTSFGGNLGRAVFQAKKRVLEPLGLVEEGAKTAPGKKRPIDSPDSSTGIGKKGQQPAKKKLNFGQTGDSESVPDPQPLGEPPAAPSSVGSGTMAAGGGAPTADNNEGADGVGNASGNWHCDSTWLGDRVITTSTRTWALPTYNNHLYKQISSSSSGATNDNHYFGYSTPWGYFDFNRFHCHFSPRDWQRLINNNWGFRPKKLRFKLFNIQVKEVTTNDGVTTIANNLTSTVQVFSDSEYQLPYVLGSAHQGCLPPFPADVFMIPQYGYLTLNNGSQSVGRSSFYCLEYFPSQMLRTGNNFEFSYSFEDVPFHSSYAHSQSLDRLMNPLIDQYLYYLARTQSTTGSTRELQFHQAGPNTMAEQSKNWLPGPCYRQQRLSKNLDFNNNSNFAWTAATKYHLNGRNSLTNPGIPMATNKDDEDQFFPINGVLVFGKTGAANKTTLENVLMTSEEEIKTTNPVATEEYGVVSSNLQSSTAGPQSQTINSQGALPGMVWQNRDVYLQGPIWAKIPHTDGNFHPSPLMGGFGLKHPPPQILIKNTPVPANPPEVFTPAKFASFITQYSTGQVSVEIEWELQKENSKRWNPEIQYTSNYAKSNNVEFAVNPDGVYTEPRPIGTRYLTRNL

SEQ ID NO: 443 - protein, 729 aa, Artificial Sequence
  Description of Artificial Sequence: Synthetic polypeptide
MAADGYLPDWLEDNLSEGIREWWDLKPGAPKPKANQQKQDDGRGLVLPGYKYLGPFNGLDKGEPVNAADAAALEHDKAYDQQLKAGDNPYLRYNHADAEFQERLQEDTSFGGNLGRAVFQAKKRVLEPLGLVEEGAKTAPGKKRPIDSPDSSTGIGKKGQQPAKKKLNFGQTGDSESVPDPQPLGEPPAAPSSVGSGTMAAGGGAPMADNNEGADGVGNASGNWHCDSTWLGDRVITTSTRTWALPTYNNHLYKQISSSSSGATNDNHYFGYSTPWGYFDFNRFHCHFSPRDWQRLINNNWGFRPKKLRFKLFNIQVKEVTTNDGVTTIANNLTSTVQVFSDSEYQLPYVLGSAHQGCLPPFPADVFMIPQYGYLTLNNGSQSVGRSSFYCLEYFPSQMLRTGNNFEFSYSFEDVPFHSSYAHSQSLDRLMNPLIDQYLYYLARTQSTTGSTRELQFHQAGPNTMAEQSKNWLPGPCYRQQRLSKNLDFNNNSNFAWTAATKYHLNGRNSLTNPGIPMATNKDDEDQFFPINGVLVFGKTGAANKTTLENVLMTSEEEIKTTNPVATEEYGVVSSNLQSSTAGPQSQTINSQGALPGMVWQNRDVYLQGPIWAKIPHTDGNFHPSPLMGGFGLKHPPPQILIKNTPVPANPPEVFTPAKFASFITQYSTGQVSVEIEWELQKENSKRWNPEIQYTSNYAKSNNVEFAVNPDGVYTEPRPIGTRYLTRNL

SEQ ID NO: 444 - DNA, 2217 bp, Artificial Sequence
  Description of Artificial Sequence: Synthetic polynucleotide
atggctgctgacggttatcttccagattggctcgaggacaacctctctgagggcattcgcgagtggtgggacctgaaacctggagcccccaagcccaaggccaaccagcagaagcaggacgacggccggggtctggtgcttcctggctacaagtacctcggacccttcaacggactcgacaagggggagcccgtcaacgcggcggacgcagcggccctcgagcacgacaaggcctacgaccagcagctcaaagcgggtgacaatccgtacctgcggtataaccacgccgacgccgagtttcaggagcgtctacaagaagatacgtcttttgggggcaacctcgggcgagcagtcttccaggccaagaagcgggttctcgaacctctcggtctggttgaggaagctgctaagacggctcctggaaagaagagaccggtagaaccgtcacctcagcgttcccccgactcctccacgggcatcggcaagaaaggccagcggcccgctaaaaagagactgaactttggtcagactggcgactcagagtcagtccccgaccctcaaccaatcggagaaccaccagcaggcccctctggtctgggatctggtacaatggctgcaggcggtggcgctccaatggcagacaataacgaaggcgccgacggagtgggtagttcctcaggaaattggcattgcgattccacatggctgggcgacagagtcatcaccaccagcacccgaacctgggccctgcccacctacaacaaccacctctacaagcaaatatccaatgggacatcgggaggaagcaccaacgacaacacctacttcggctacagcaccccctgggggtattttgacttcaacagattccactgccacttctcaccacgtgactggcagcgactcatcaacaacaactggggattccggccaaaaagactcagcttcaagcccttcaacatccaggtcaaggaggtcacgcagaatgaaggcaccaagaccatcgccaataaccttaccagcacgattcaggtatttacggactcggaataccagctgccgtacgtcctcggctccgcgcaccagggctgcctgcctccgttcccggcggacgtcttcatgattccccagtacggctaccttacactgaacaatggaagtcaagccgtaggccgttcctccttctactgcctggaatattttccatctcaaatgctgcgaactggaaacaattttgaattcagctacaccttcgaggacgtgcctttccacagcagctacgcacacagccagagcttggaccgactgatgaatcctctcatcgaccagtacctgcactacttatccagaactcagtccacaggaggaactcaaggtacccagcaattgttattttctcaagctgggcctgcaaacatgtcggctcaggctaagaactggctacctggaccttgctaccggcagcagcgagtctctacgacactgtcgcaaaacaacaacagcaactttgcttggactggtgccaccaaatatcacctgaacggaagagactctttggtaaatcccggtgtcgccatggcaacccacaaggacgacgaggaacgcttcttcccgtcgagtggagtcctgatgtttggaaaacagggtgctggaagagacaatgtggactacagcagcgttatgctaaccagcgaagaagaaattaaaaccactaaccctgtagccacagaacaatacggtgtggtggctgacaacttgcagcaaaccaatacagggcctattgtgggaaatgtcaacagccaaggagccttacctggcatggtctggcagaaccgagacgtgtacctgcagggtcccatctgggccaagattcctcacacggacggcaacttccacccttcaccgctaatgggaggatttggactgaagcacccacctcctcagatcctgatcaagaacacgccggtacctgcggatcctccaacaacgttcagccaggcgaaattggcttccttcattacgcagtacagcaccggacaggtcagcgtggaaatcgagtgggagctgcagaaggagaacagcaaacgctggaacccagagattcagtacacttcaaactactacaaatctacaaatgtggactttgctgtcaatacagagggaacttattctgagcctcgccccattggtactcgctacctcacccgtaatctgtaa

SEQ ID NO: 445 - protein, 738 aa, Artificial Sequence
  Description of Artificial Sequence: Synthetic polypeptide
MAADGYLPDWLEDNLSEGIREWWDLKPGAPKPKANQQKQDDGRGLVLPGYKYLGPFNGLDKGEPVNAADAAALEHDKAYDQQLKAGDNPYLRYNHADAEFQERLQEDTSFGGNLGRAVFQAKKRVLEPLGLVEEAAKTAPGKKRPVEPSPQRSPDSSTGIGKKGQRPAKKRLNFGQTGDSESVPDPQPIGEPPAGPSGLGSGTMAAGGGAPMADNNEGADGVGSSSGNWHCDSTWLGDRVITTSTRTWALPTYNNHLYKQISNGTSGGSTNDNTYFGYSTPWGYFDFNRFHCHFSPRDWQRLINNNWGFRPKRLSFKPFNIQVKEVTQNEGTKTIANNLTSTIQVFTDSEYQLPYVLGSAHQGCLPPFPADVFMIPQYGYLTLNNGSQAVGRSSFYCLEYFPSQMLRTGNNFEFSYTFEDVPFHSSYAHSQSLDRLMNPLIDQYLHYLSRTQSTGGTQGTQQLLFSQAGPANMSAQAKNWLPGPCYRQQRVSTTLSQNNNSNFAWTGATKYHLNGRDSLVNPGVAMATHKDDEERFFPSSGVLMFGKQGAGRDNVDYSSVMLTSEEEIKTTNPVATEQYGVVADNLQQTNTGPIVGNVNSQGALPGMVWQNRDVYLQGPIWAKIPHTDGNFHPSPLMGGFGLKHPPPQILIKNTPVPADPPTTFSQAKLASFITQYSTGQVSVEIEWELQKENSKRWNPEIQYTSNYYKSTNVDFAVNTEGTYSEPRPIGTRYLTRNL

SEQ ID NO: 446 - DNA, 2217 bp, Artificial Sequence
  Description of Artificial Sequence: Synthetic polynucleotide
atggctgctgacggttatcttccagattggctcgaggacaacctctctgagggcattcgcgagtggtgggacctgaaacctggagcccccaagcccaaggccaaccagcagaagcaggacgacggccggggtctggtgcttcctggctacaagtacctcggacccttcaacggactcgacaagggggagcccgtcaacgcggcggacgcagcggccctcgagcacgacaaggcctacgaccagcagctcaaagcgggtgacaatccgtacctgcggtataaccacgccgacgccgagtttcaggagcgtctgcaagaagatacgtcttttgggggcaacctcgggcgagcagtcttccaggccaagaagcgggttctcgaacctctcggtctggttgaggaagctgctaagacggctcctggaaagaagagaccggtagaaccgtcacctcagcgttcccccgactcctccacgggcatcggcaagaaaggccagcagcccgctaaaaagagactgaactttggtcagactggcgactcagagtcagtccccgaccctcaaccaatcggagaaccaccagcaggcccctctggtctgggatctggtacaatggctgcaggcggtggcgctccaatggcagacaataacgaaggcgccgacggagtgggtagttcctcaggaaattggcattgcgattccacatggctgggcgacagagtcatcaccaccagcacccgaacctgggccctgcccacctacaacaaccacctctacaagcaaatatccaatgggacatcgggaggaagcaccaacgacaacacctacttcggctacagcaccccctgggggtattttgacttcaacagattccactgccacttctcaccacgtgactggcagcgactcatcaacaacaactggggattccggccaaaaagactcagcttcaagctcttcaacatccaggtcaaggaggtcacgcagaatgaaggcaccaagaccatcgccaataaccttaccagcacgattcaggtatttacggactcggaataccagctgccgtacgtcctcggctccgcgcaccagggctgcctgcctccgttcccggcggacgtcttcatgattccccagtacggctaccttacactgaacaatggaagtcaagccgtaggccgttcctccttctactgcctggaatattttccatctcaaatgctgcgaactggaaacaattttgaattcagctacaccttcgaggacgtgcctttccacagcagctacgcacacagccagagcttggaccgactgatgaatcctctcatcgaccagtacctgtactacttatccagaactcagtccacaggaggaactcaaggtacccagcaattgttattttctcaagctgggcctgcaaacatgtcggctcaggctaagaactggctacctggaccttgctaccggcagcagcgagtctctacgacactgtcgcaaaacaacaacagcaactttgcttggactggtgccaccaaatatcacctgaacggaagagactctttggtaaatcccggtgtcgccatggcaacccacaaggacgacgaggaacgcttcttcccgtcgagtggagtcctgatgtttggaaaacagggtgctggaagagacaatgtggactacagcagcgttatgctaaccagcgaagaagaaattaaaaccactaaccctgtagccacagaacaatacggtgtggtggctgataacttgcagcaaaccaatacggggcctattgtgggaaatgtcaacagccaaggagccttacctggcatggtctggcagaaccgagacgtgtacctgcagggtcccatctgggccaagattcctcacacggacggcaacttccacccttcaccgctaatgggaggatttggactgaagcacccacctcctcagatcctgatcaagaacacgccggtacctgcggatcctccaacaacgttcagccaggcgaaattggcttccttcattacgcagtacagcaccggacaggtcagcgtggaaatcgagtgggagctgcagaaggagaacagcaaacgctggaacccagagattcagtacacttcaaactactacaaatctacaaatgtggactttgctgtcaatacagagggaacttattctgagcctcgccccattggtactcgttacctcacccgtaatctgtaa

SEQ ID NO: 447 - protein, 738 aa, Artificial Sequence; identical to SEQ ID NO: 99
  Description of Artificial Sequence: Synthetic polypeptide

SEQ ID NO: 448 - protein, 738 aa, Artificial Sequence
  Description of Artificial Sequence: Synthetic polypeptide
MAADGYLPDWLEDNLSEGIREWWDLKPGAPKPKANQQKQDDGRGLVLPGYKYLGPFNGLDKGEPVNAADAAALEHDKAYDQQLKAGDNPYLRYNHADAEFQERLQEDTSFGGNLGRAVFQAKKRVLEPLGLVEEAAKTAPGKKRPVEPSPQRSPDSSTGIGKKGQQPAKKRLNFGQTGDSESVPDPQPIGEPPAGPSGLGSGTMAAGGGAPMADNNEGADGVGSSSGNWHCDSTWLGDRVITTSTRTWALPTYNNHLYKQISNGTSGGSTNDNTYFGYSTPWGYFDFNRFHCHFSPRDWQRLINNNWGFRPKRLSFKLFNIQVKEVTQDEGTKTIANNLTSTIQVFTDSEYQLPYVLGSAHQGCLPPFPADVFMIPQYGYLTLNNGSQAVGRSSFYCLEYFPSQMLRTGNNFEFSYTFEDVPFHSSYAHSQSLDRLMNPLIDQYLYYLSRTQSTGGTQGTQQLLFSQAGPANMSARAKNWLPGPCYRQQRVSTTLSQNNNSNFAWTGATKYHLNGRDSLVNPGVAMATHKDDEERFFPSSGVLMFGKQGAGRDNVDYSSVMLTSEEEIKTTNPVATEQYGVVADNLQQANTGPIVGNVNSQGALPGMVWQNRDVYLQGPIWAKIPHTDGNFHPSPLMGGFGLKHPPPQILIKNTPVPADPPTTFSQAKLASFITQYSTGQVSVEIEWELQKENSKRWNPEIQYTSNYYKSTNVDFAVNSEGTYSEPRPIGTRYLTRNL

SEQ ID NO: 449 - DNA, 2217 bp, Artificial Sequence
  Description of Artificial Sequence: Synthetic polynucleotide
atggctgctgacggttatcttccagattggctcgaggacaacctctctgagggcattcgcgagtggtgggacctgaaacctggagcccccaagcccaaggccaaccagcagaagcaggacgacggccggggtctggtgcttcctggctacaagtacctcggacccttcaacggactcgacaagggggagcccgtcaacgcggcggacgcagcggccctcgagcacgacaaggcctacgaccagcagctcaaagcgggtgacaatccgtacctgcggtataaccacgccgacgccgagtttcaggagcgtctgcaagaagatacgtcttttgggggcaacctcgggcgagcagtcttccaggccaagaagcgggttctcgaacctctcggtctggttgaggaagctgctaagacggctcctggaaagaagagaccggtagaaccgtcacctcagcgttcccccgactcctccacgggcatcggcaagaaaggccagcagcccgctaaaaagagactgaactttggtcagactggcgactcagagtcagtccccgaccctcaaccaatcggagaaccaccagcaggcccctctggtctgggatctggtacaatggctgcaggcggtggcgctccaatggcagacaataacgaaggcgccgacggagtgggtagttcctcaggaaattggcattgcgattccacatggctgggcgacagagtcatcaccaccagcacccgaacctgggccctgcccacctacaacaaccacctctacaagcaaatatccaatgggacatcgggaggaagcaccaacgacaacacctacttcggctacagcaccccctgggggtattttgacttcaacagattccactgccacttctcaccacgtgactggcagcgactcatcaacaacaactggggattccggccaaaaagactcagcttcaagctcttcaacatccaggtcaaggaggtcacgcaggatgaaggcaccaagaccatcgccaataaccttaccagcacgattcaggtatttacggactcggaataccagctgccgtacgtcctcggctccgcgcaccagggctgcctgcctccgttcccggcggacgtcttcatgattccccagtacggctaccttacactgaacaatggaagtcaagccgtaggccgttcctccttctactgcctggaatattttccatctcaaatgctgcgaactggaaacaattttgaattcagctacaccttcgaggacgtgcctttccacagcagctacgcacacagccagagcttggaccgactgatgaatcctctcatcgaccagtacctgtactacttatccagaactcagtccacaggaggaactcaaggtacccagcaattgttattttctcaagctgggcctgcaaacatgtcggctcgggctaagaactggctacctggaccttgctaccggcagcagcgagtctctacgacactgtcgcaaaacaacaacagcaactttgcttggactggtgccaccaaatatcacctgaacggaagagactctttggtaaatcccggtgttgctatggcaacgcataaggacgacgaggaacgtttctttccatcgagcggagtcctgatgtttggaaaacagggtgctggaagagacaatgtggactatagcagcgttatgctaaccagcgaggaagaaattaaaaccactaaccctgtagccacagaacaatacggtgtggtggctgacaacttgcagcaagccaatacagggcctattgtgggaaatgtcaacagccaaggagccttacctggcatggtctggcagaaccgagacgtgtacctgcagggtcccatctgggccaaaattcctcacacggacggcaattttcacccgtctcctctgatgggcggctttggactgaagcacccacctccccagatcctgatcaagaatacgccggtacctgcggatcctccaacgacgttcagccaggcaaaattggcttccttcatcacgcagtacagcaccggccaggtcagcgtggagatcgagtgggagctgcagaaggagaacagcaagcgatggaacccagaaattcagtacacttccaactactacaaatctacaaatgtggactttgctgtcaattctgagggtacatattcagagcctcgccccattggtactcgttatctgacacgtaatctgtaa

SEQ ID NO: 450 - DNA, 2211 bp, Artificial Sequence
  Description of Artificial Sequence: Synthetic polynucleotide
atggctgccgatggttatcttccagattggctcgaggacaacctctctgagggcattcgcgagtggtgggacttgaaacctggagccccgaaacccaaagccaaccagcaaaagcaggacgacggccggggcctggtgcttcctggctacaagtacctcggacccttcaacggactcgacaagggggagcccgtcaacgcggcggacgcagcggccctcgagcacgacaaggcctacgaccagcagctcgaagcgggtgacaatccgtacctgcggtataaccacgccgacgccgagtttcaggagcgtctgcaagaagatacgtcttttgggggcaacctcgggcgagcagtcttccaggccaagaagcgggttctcgaacctctcggtctggttgaggaaggcgctaagacggctcctggaaagaagagaccagtagagcagtcaccccaagaaccagactcctcctcgggcatcggcaagaaaggccaacagcccgccagaaaaagactcaattttggccagactggcgactcagagtcagttccagaccctcaacctctcggagaacctccagcagcgccctctggtgtgggacctaatacaatggctgcaggcggtggcgcaccaatggcagacaataacgaaggcgccgacggagtgggtagttcctcgggaaattggcattgcgattccacatggctgggcgacagagtcatcaccaccagcacccgaacctgggccctgcccacctacaacaaccacctctacaagcaaatctccaacgggacatcgggaggagccaccaacgacaacacctacttcggctacagcaccccctgggggtattttgactttaacagattccactgccacttttcaccacgtgactggcagcgactcatcaacaacaactggggattccggcccaagagactcagcttcaagctcttcaacatccaggtcaaggaggtcacgcagaatgaaggcaccaagaccatcgccaataacctcaccagcaccatccaggtgtttacggactcggagtaccagctgccgtacgttctcggctctgcccaccagggctgcctgcctccgttcccggcggacgtgttcatgattccccagtacggctacctaacactcaacaacggtagtcaggccgtgggacgctcctccttctactgcctggaatactttccttcgcagatgctgagaaccggcaacaacttccagtttacttacaccttcgaggacgtgcctttccacagcagctacgcccacagccagagcttggaccggctgatgaatcctctgattgaccagtacctgtactacttgtctcggactcaaacaacaggaggcacggcaaatacgcagactctgggcttcagccaaggtgggcctaatacaatggccaatcaggcaaagaactggctgccaggaccctgttaccgccaacaacgcgtctcaacgacaaccgggcaaaacaacaatagcaactttgcctggactgctgggaccaaataccatctgaatggaagaaattcattggctaatcctggcatcgctatggcaacacacaaagacgacgaggagcgttttttcccagtaacgggatcctgtttttggcaacaaaatgctgccagagacaatgcggattacagcgatgtcatgctcaccagcgaggaagaaatcaaaaccactaaccctgtggctacagaggaatacggtatcgtggcagataacttgcagcagcaaaacacggctcctcaaattggaactgtcaacagccagggggccttacccggtatggtctggcagaaccgggacgtgtacctgcagggtcccatctgggccaagattcctcacacggacggcaacttccacccgtctccgctgatgggcggctttggcctgaaacatcctccgcctcagatcctgatcaagaacacgcctgtacctgcggatcctccgaccaccttcaaccagtcaaagctgaactctttcatcacgcaatacagcaccggacaggtcagcgtggaaattgaatgggagctacagaaggaaaacagcaagcgctggaaccccgagatccagtacacctccaactactacaaatctacaagtgtggactttgctgttaatacagaaggcgtgtactctgaaccccgccccattggcacccgttacctcacccgtaatctgtaa

SEQ ID NO: 451 - protein, 736 aa, Artificial Sequence
  Description of Artificial Sequence: Synthetic polypeptide
MAADGYLPDWLEDNLSEGIREWWDLKPGAPKPKANQQKQDDGRGLVLPGYKYLGPFNGLDKGEPVNAADAAALEHDKAYDQQLEAGDNPYLRYNHADAEFQERLQEDTSFGGNLGRAVFQAKKRVLEPLGLVEEGAKTAPGKKRPVEQSPQEPDSSSGIGKKGQQPARKRLNFGQTGDSESVPDPQPLGEPPAAPSGVGPNTMAAGGGAPMADNNEGADGVGSSSGNWHCDSTWLGDRVITTSTRTWALPTYNNHLYKQISNGTSGGATNDNTYFGYSTPWGYFDFNRFHCHFSPRDWQRLINNNWGFRPKRLSFKLFNIQVKEVTQNEGTKTIANNLTSTIQVFTDSEYQLPYVLGSAHQGCLPPFPADVFMIPQYGYLTLNNGSQAVGRSSFYCLEYFPSQMLRTGNNFQFTYTFEDVPFHSSYAHSQSLDRLMNPLIDQYLYYLSRTQTTGGTANTQTLGFSQGGPNTMANQAKNWLPGPCYRQQRVSTTTGQNNNSNFAWTAGTKYHLNGRNSLANPGIAMATHKDDEERFFPVTGSCFWQQNAARDNADYSDVMLTSEEEIKTTNPVATEEYGIVADNLQQQNTAPQIGTVNSQGALPGMVWQNRDVYLQGPIWAKIPHTDGNFHPSPLMGGFGLKHPPPQILIKNTPVPADPPTTFNQSKLNSFITQYSTGQVSVEIEWELQKENSKRWNPEIQYTSNYYKSTSVDFAVNTEGVYSEPRPIGTRYLTRNL

SEQ ID NO: 452 - DNA, 2214 bp, Artificial Sequence
  Description of Artificial Sequence: Synthetic polynucleotide
atggctgctgacggttatcttccagattggctcgaggacaacctctctgagggcattcgcgagtggtgggacctgaaacctggagcccccaagcccaaggccaaccagcagaagcaggacgacggccggggtctggtgcttcctggctacaagtacctcggacccttcaacggactcgacaagggggagcccgtcagcgcggcggacgcagcggccctcgagcacgacaaggcctgcgaccagcggctcaaagcgggtgacaatccgtacctgcggtataaccacgccgacgccgagtttcaggagcgtctgcaagaagatacgtcttttgggggcaacctcgggcgagcagtcttccaggccaagaagcgggttctcgaacctctcggtctggttgaggaagctgctaagacggctcctggaaagaagggaccggtagaaccgtcacctcagcgttcccccgactcctccacgggcatcggcaagaaaggccagcagcccgctagaaagagactgaactttgggcagactggcgactcagagtcagtccccgaccctcaaccaatcggagaaccaccagcaggcccctctggtctgggatctggtacaatggctgcaggcggtggcgcaccaatggctgacaataacgagggcgccgacggagtgggtaatgcctcaggaaattggcattgcgattccacatggctgggcgacagagtcatcaccaccagcacccgaacctgggctttgcccacctacaacaatcacctctacaagcaaatctccagtcagtcagcaggtagcaccaacgacaacgtctacttcggctacagcaccccctgggggtattttgacttcaacagattccactgtcacttctcaccacgtgactggcagcggctcatcaacaacaactggggattccggcccaagaagctcaacttcaagctgttcaacatccaggtcaaggaggtcacaacgaatgacggcgtcacgaccatcgccaataaccttaccagcacggttcaggtcttttcggactcggaataccagctgccctacgtcctcggctccgcacaccagggctgcctgcctccgttcccggcggacgtcttcatgattccccagtacggctacctgactctgaacaatggcagccaatcggtgggtcgttcctctttctactgcctggaatatttcccttctcaaatgctgagaacgggcaacaacttcaccttcagctacaccttcgaggacgttcccttccacagcagctacgcacacagccagagcctggaccggctgatgaatcctcttatcgaccagtacctgtattacctggccagaacacagagcaacgcaggaggcacagctggcaatcgggaactgcagttttatcagggcgggcctaccaccatggccgaacaagccaaaaactggctgcctggaccttgcttccggcaacaaagagtctccaagacgctggatcaaaacaacaacagcaactttgcttggactggtgccaccaaataccatctaaatggaagaaattcattggttaatcccggtgtcgccatggcaacccacaaggacgacgaggaacgcttcttcccttcgagcggagtcctgatttttggaaaaactggagcagctaataagactacactggaaaatgtgttaatgacaaatgaagaggaaattcgtcctaccaacccggtagccaccgaggaatacgggactgttagcagcaacctgcaggcggctaacactgcagcccagacacaagttgtcaacaaccagggagccttacctggtatggtctggcagaaccgggacgtgtacctgcagggtcccatctgggccaagattcctcacacggacggcaactttcacccgtctccgctgatgggcggctttggactgaagcatccgcctcctcagatcctgatcaaaaacactcctgttcctgctaatcccccggaggtgtttacgcctgccaagtttgcttctttcatcacacagtacagcaccggccaggtcagcgtggagatcgagtgggagctgcagaaggagaacagcaagcgctggaacccagagattcagtatacctccaattttgacgaacagactggtgtggactttgccgttgacagccagggtgtttattctgagcctcgccccattggtactcgttacctcacccgtaatctgtaa

SEQ ID NO: 453 - protein, 737 aa, Artificial Sequence
  Description of Artificial Sequence: Synthetic polypeptide
MAADGYLPDWLEDNLSEGIREWWDLKPGAPKPKANQQKQDDGRGLVLPGYKYLGPFNGLDKGEPVSAADAAALEHDKACDQRLKAGDNPYLRYNHADAEFQERLQEDTSFGGNLGRAVFQAKKRVLEPLGLVEEAAKTAPGKKGPVEPSPQRSPDSSTGIGKKGQQPARKRLNFGQTGDSESVPDPQPIGEPPAGPSGLGSGTMAAGGGAPMADNNEGADGVGNASGNWHCDSTWLGDRVITTSTRTWALPTYNNHLYKQISSQSAGSTNDNVYFGYSTPWGYFDFNRFHCHFSPRDWQRLINNNWGFRPKKLNFKLFNIQVKEVTTNDGVTTIANNLTSTVQVFSDSEYQLPYVLGSAHQGCLPPFPADVFMIPQYGYLTLNNGSQSVGRSSFYCLEYFPSQMLRTGNNFTFSYTFEDVPFHSSYAHSQSLDRLMNPLIDQYLYYLARTQSNAGGTAGNRELQFYQGGPTTMAEQAKNWLPGPCFRQQRVSKTLDQNNNSNFAWTGATKYHLNGRNSLVNPGVAMATHKDDEERFFPSSGVLIFGKTGAANKTTLENVLMTNEEEIRPTNPVATEEYGTVSSNLQAANTAAQTQVVNNQGALPGMVWQNRDVYLQGPIWAKIPHTDGNFHPSPLMGGFGLKHPPPQILIKNTPVPANPPEVFTPAKFASFITQYSTGQVSVEIEWELQKENSKRWNPEIQYTSNFDEQTGVDFAVDSQGVYSEPRPIGTRYLTRNL

SEQ ID NO: 454 - DNA, 2214 bp, Artificial Sequence
  Description of Artificial Sequence: Synthetic polynucleotide
atggctgccgatggttatcttccagattggctcgaggacaacctctctgagggcattcgcgagtggtgggacctgaaacctggagccccgaaacccaaagccaaccagcaaaagcaggacgacggccggggtctggtgcttcctggctacaagtacctcggacccttcaacggactcgacaagggggagcccgtcaacgcggcggacgcagcggccctcgagcacgacaaggcctacgaccagcagctcaaagcgggtgacaatccgtacctgcggtataaccacgccgacgccgagtttcaggagcgtctgcaagaagatacgtcttttgggggcaacctcgggcgagcagtcttccaggccaagaagcgggttctcgaacctctcggtctggttgaggaagctgctaagacggctcctggaaagaagagaccggtagaaccgtcacctcagcgttcccccgactcctccacgggcatcggcaagaaaggccagcagcccgctagaaagagactgaactttgggcagactggcgactcagagtcagtccccgaccctcaaccaatcggagaaccaccagcaggcccctctggtctgggatctggtacaatggctgcaggcggtggcgctccaatggcagacaataacgaaggcgccgacggagtgggtaatgcctcaggaaattggcattgcgattccacatggctgggcgacagagtcatcaccaccagcacccgaacctgggctttgcccacctacaacaaccacctctacaagcaaatctccagtcagtcagcaggtagcaccaacgacaacgtctacttcggctacagcaccccctgggggtattttgacttcaacagattccactgtcacttctcaccacgtgactggcagcggctcatcaacaacaactggggattccggcccaagaagctcaacttcaagctgttcaacatccaggtcaaggaggtcacaacgaatgacggcgtcacgaccatcgccaataaccttaccagcacggttcaggtcttttcggactcggaataccagctgccctacgtcctcggctccgcacaccagggctgcctgcctccgttcccggcggacgtcttcatgattcctcagtacggctacctgactctcaacaacggtagtcaggccgtgggacgttcctccttctactgcctggagtacttcccctctcagatgctgagaacgggcaacaacttttccttcagctacactttcgaggacgtgcctttccacagcagctacgcgcacagccagagtttggacaggctgatgaatcctctcatcgaccagtacctgtactacctgtcaagaacccagtctacgggaggcacagcgggaacccagcagttgctgttttctcaggccgggcctagcaacatgtcgactcaggccagaaactggctgcctggaccctgctacagacagcagcgcgtctccacgacactgtcgcaaaacaacaacagcaactttgcctggactggtgccaccaagtatcatctgaacggcagagactctctggtgaatccgggcgtcgccatggcaaccaacaaggacgacgaggaccgcttcttcccatccagcggcatcctcatgtttggcaagcagggagctggaaaagacaacgtggactatagcaacgtgatgctaaccagcgaggaagaaatcaagaccaccaaccccgtggccacagaacagtatggcgtggtggctgataacctacagcagcaaaacaccgctcctattgtgggggccgtcaacagccagggagccttacctggcatggtctggcagaaccgggacgtgtacctgcagggtcctatttgggccaagattcctcacacagatggcaactttcacccgtctcctttaatgggcggctttggacttaaacatccgcctcctcagatccttatcaaaaacactcctgttcctgcggatcctccaacagcgttcaaccaggccaagctgaattctttcatcacgcagtacagcaccggacaagtcagcgtggagatcgagtgggagctgcagaaggagaacagcaagcgctggaacccagagattcagtatacttccaactactacaaatctacaaatgtggactttgctgttaatactgagggtgcttactctgagcctcgccccattggcactcgttacctcacccgtaatctgtaa

SEQ ID NO: 455 - protein, 737 aa, Artificial Sequence
  Description of Artificial Sequence: Synthetic polypeptide
MAADGYLPDWLEDNLSEGIREWWDLKPGAPKPKANQQKQDDGRGLVLPGYKYLGPFNGLDKGEPVNAADAAALEHDKAYDQQLKAGDNPYLRYNHADAEFQERLQEDTSFGGNLGRAVFQAKKRVLEPLGLVEEAAKTAPGKKRPVEPSPQRSPDSSTGIGKKGQQPARKRLNFGQTGDSESVPDPQPIGEPPAGPSGLGSGTMAAGGGAPMADNNEGADGVGNASGNWHCDSTWLGDRVITTSTRTWALPTYNNHLYKQISSQSAGSTNDNVYFGYSTPWGYFDFNRFHCHFSPRDWQRLINNNWGFRPKKLNFKLFNIQVKEVTTNDGVTTIANNLTSTVQVFSDSEYQLPYVLGSAHQGCLPPFPADVFMIPQYGYLTLNNGSQAVGRSSFYCLEYFPSQMLRTGNNFSFSYTFEDVPFHSSYAHSQSLDRLMNPLIDQYLYYLSRTQSTGGTAGTQQLLFSQAGPSNMSTQARNWLPGPCYRQQRVSTTLSQNNNSNFAWTGATKYHLNGRDSLVNPGVAMATNKDDEDRFFPSSGILMFGKQGAGKDNVDYSNVMLTSEEEIKTTNPVATEQYGVVADNLQQQNTAPIVGAVNSQGALPGMVWQNRDVYLQGPIWAKIPHTDGNFHPSPLMGGFGLKHPPPQILIKNTPVPADPPTAFNQAKLNSFITQYSTGQVSVEIEWELQKENSKRWNPEIQYTSNYYKSTNVDFAVNTEGAYSEPRPIGTRYLTRNL

SEQ ID NO: 456 - DNA, 2217 bp, Artificial Sequence
  Description of Artificial Sequence: Synthetic polynucleotide
atggctgccgatggttatcttccagattggctcgaggacaacctctctgagggcattcgcgagtggtgggacctgaaacctggagccccgaaacccaaagccaaccagcaaaagcaggacgacggccggggtctggtgcttcctggctacaagtacctcggacccttcaacggactcgacaagggggagcccgtcaacgcggcggacgcagcggccctcgagcacgacaaggcctacgaccagcagctcaaagcgggtgacaatccgtacctgcggtataatcacgccgacgccgagtttcaggagcgtctgcaagaagatacgtcttttgggggcaacctcgggcgagcagtcttccaggccaagaagcgggttctcgaacctctcggtctggttgaggaaggcgctaagacggctcctggaaagaagagaccggtagagccgtcaccacagcgttcccccgactcctccacgggcatcggcaagaaaggccagcagcccgccagaaagagactcaatttcggtcagactggcgactcagagtcagtccccgaccctcaacctatcggagaacctccagcagcgccctctagtgtgggatctggtacaatggctgcaggcggtggcgcaccaatggcagacaataacgaaggtgccgacggagtgggtagttcctcgggaaattggcattgcgattccacatggctgggcgacagagtcatcaccaccagcacccgaacctgggccctgcccacctacaacaaccacctctacaagcaaatctccaacgggacctcgggaggcagcaccaacgacaacacctactttggctacagcaccccctgggggtattttgactttaacagattccactgccacttctcaccacgtgactggcagcgactcatcaacaacaactggggattccggcccaagagactcagcttcaagctcttcaacatccaggtcaaagaggtcacgcagaatgaaggcaccaagaccatcgccaataacctcaccagcaccatccaggtgtttacggactcggaataccagctgccgtacgtcctcggctctgcccaccagggctgcctgcctccgttcccggcggacgtcttcatgattcctcagtacggctacctgactctcaacaacggtagtcaggccgtgggacgttcctccttctactgcctggagtacttcccctctcagatgctgagaacgggcaacaacttttccttcagctacactttcgaggacgtgcctttccacagcagctacgcgcacagccagagtttggacaggctgatgaatcctctcatcgaccagtacctgtactacctgtcaagaacccagtctacgggaggcacagcgggaacccagcagttgctgttttctcaggccgggcctagcaacatgtcggctcaggccagaaactggctgcctggaccctgctacagacagcagcgcgtctccacgacactgtcgcaaaacaacaacagcaactttgcctggactggtgccaccaagtatcatctgaacggcagagactctctggtgaatccgggcgtcgccatggcaaccaacaaggacgacgaggaccgcttcttcccatccagcggcatcctcatgtttggcaagcagggagctggaaaagacaacgtggactatagcaacgtgatgctaaccagcgaggaagaaatcaaggccaccaaccccgtggccacagaacagtatggcgtggtggctgataacctacagcagcaaaacaccgctcctattgtgggggccgtcaacagccagggagccttacctggcatggtctggcagaaccgggacgtgtacctgcagggtcctatttgggccaagattcctcacacagatggcaactttcacccgtctcctttaatgggcggctttggacttaaacatccgcctcctcagatcctcatcaaaaacactcctgttcctgcggatcctccaacagcgttcaaccaggccaagctgaattctttcatcacgcagtacagcaccggacaagtcagcgtggagatcgagtgggagctgcagaaggagaacagcaagcgctggaacccagagattcagtatacttccaactactacaaatctacaaatgtggactttgctgttaatactgagggtgtttactctgagcctcgccccattggcactcgttacctcacccgtaatctgtaa

SEQ ID NO: 457 - protein, 738 aa, Artificial Sequence
  Description of Artificial Sequence: Synthetic polypeptide
MAADGYLPDWLEDNLSEGIREWWDLKPGAPKPKANQQKQDDGRGLVLPGYKYLGPFNGLDKGEPVNAADAAALEHDKAYDQQLKAGDNPYLRYNHADAEFQERLQEDTSFGGNLGRAVFQAKKRVLEPLGLVEEGAKTAPGKKRPVEPSPQRSPDSSTGIGKKGQQPARKRLNFGQTGDSESVPDPQPIGEPPAAPSSVGSGTMAAGGGAPMADNNEGADGVGSSSGNWHCDSTWLGDRVITTSTRTWALPTYNNHLYKQISNGTSGGSTNDNTYFGYSTPWGYFDFNRFHCHFSPRDWQRLINNNWGFRPKRLSFKLFNIQVKEVTQNEGTKTIANNLTSTIQVFTDSEYQLPYVLGSAHQGCLPPFPADVFMIPQYGYLTLNNGSQAVGRSSFYCLEYFPSQMLRTGNNFSFSYTFEDVPFHSSYAHSQSLDRLMNPLIDQYLYYLSRTQSTGGTAGTQQLLFSQAGPSNMSAQARNWLPGPCYRQQRVSTTLSQNNNSNFAWTGATKYHLNGRDSLVNPGVAMATNKDDEDRFFPSSGILMFGKQGAGKDNVDYSNVMLTSEEEIKATNPVATEQYGVVADNLQQQNTAPIVGAVNSQGALPGMVWQNRDVYLQGPIWAKIPHTDGNFHPSPLMGGFGLKHPPPQILIKNTPVPADPPTAFNQAKLNSFITQYSTGQVSVEIEWELQKENSKRWNPEIQYTSNYYKSTNVDFAVNTEGVYSEPRPIGTRYLTRNL

SEQ ID NO: 458 - DNA, 2217 bp, Artificial Sequence
  Description of Artificial Sequence: Synthetic polynucleotide
atggctgccgatggttatcttccagattggctcgaggacaacctctctgagggcattcgcgagtggtgggacctgaaacctggagccccgaaacccaaagccaaccagcaaaagcaggacgacggccggggtctggtgcttcctggctacaagcacctcggacccttcaacggactcgacaagggggagcccgtcaacgcggcggacgcagcggccctcgagcacgacaaggcctacgaccagcagctcaaagcgggtgacaatccgtacctgcggtataatcacgctgacgccgagtttcaggagcgtctgcaagaagatacgtcttttgggggcaacctcgggcgagcagtcttccaggccaagaagcgggttctcgaacctctcggtctggttgaggaaggcgctaagacggctcctggaaagaagagaccggtagagccgtcaccacagcgttcccccgactcctccacgggcatcggcaagaaaggccagcagcccgccagaaagagactcaatttcggtcagactggcgactcagagtcagtccccgaccctcaacctatcggagaacctccagcagcgccctctagtgtgggatctggtacaatggctgcaggcggtggcgcaccaatggcagacaataacgaaggtgccgacggagtgggtagttcctcgggaaattggcattgcgattccacatggctgggcgacagagtcatcaccaccagcacccgaacctgggccctgcccacctacaacaaccacctctacaagcaaatctccaacgggacctcgggaggcagcaccaacgacaacacctactttggctacagcaccccctgggggtattttgactttaacagattccactgccacttctcaccacgtgactggcagcgactcatcaacaacaactggggattccggcccaagagactcagcttcaagctcttcaacatccaggtcaaagaggtcacgcagaatgaaggcaccaagaccatcgccaataaccttaccagcacggttcaggtcttttcggactcggaataccagctgccctacgtcctcggctccgcacaccagggctgcctgcctccgttcccggcggacgtcttcatgattccccagtacggctacctgactctgaacaatggcagccaatcggtgggtcgttcctctttctactgcctggaatatttcccttctcaaatgctgagaacgggcaacaacttcaccttcagctacaccttcgaggacgttcccttccacagcagctacgcacacagccagagcctggaccggctgatgaatcctcttatcgaccagtacctgtattacctggccagaacacagagcaacgcaggaggcacagctggcaatcgggaactgcagttttatcagggcgggcctaccaccatggccgaacaagccaaaaactggctgcctggaccttgcttccggcaacaaagagtctccaagacgctggatcaaaacaacaacagcaactttgcttggactggtgccaccaaataccatctaaatggaagaaattcattggttaatcccggtgtcgccatggcaacccacaaggacgacgaggaacgcttcttcccttcgagcggagtcctgatttttggaaaaactggagcagctaataagactacactggaaaatgtgttaatgacaaatgaagaggaaattcgtcctaccaacccggtagccaccgaggaatacgggactgttagcagcaacctgcaggcggctaacactgcagcccagacacaagttgtcaacaaccagggagccttacctggtatggtctggcagaaccgggacgtgtacctgcagggtcccatctgggccaagattcctcacacggacggcaactttcacccgtctccgctgatgggcggctttggactgaagcatccgcctcctcagatcctgatcaaaaacactcctgttcctgctaatcccccggaggtgtttacgcctgccaagtttgcttctttcatcacacagtacagcaccggccaggtcagcgtggagatcgagtgggagctgcagaaggagaacagcaagcgctggaacccagagattcagtatacctccaattttgacaaacagactggtgtggactttgccgttgacagccagggtgtttattctgagcctcgccccattggtactcgttacctcacccgtaatctgtaa

SEQ ID NO: 459 - protein, 738 aa, Artificial Sequence
  Description of Artificial Sequence: Synthetic polypeptide
MAADGYLPDWLEDNLSEGIREWWDLKPGAPKPKANQQKQDDGRGLVLPGYKHLGPFNGLDKGEPVNAADAAALEHDKAYDQQLKAGDNPYLRYNHADAEFQERLQEDTSFGGNLGRAVFQAKKRVLEPLGLVEEGAKTAPGKKRPVEPSPQRSPDSSTGIGKKGQQPARKRLNFGQTGDSESVPDPQPIGEPPAAPSSVGSGTMAAGGGAPMADNNEGADGVGSSSGNWHCDSTWLGDRVITTSTRTWALPTYNNHLYKQISNGTSGGSTNDNTYFGYSTPWGYFDFNRFHCHFSPRDWQRLINNNWGFRPKRLSFKLFNIQVKEVTQNEGTKTIANNLTSTVQVFSDSEYQLPYVLGSAHQGCLPPFPADVFMIPQYGYLTLNNGSQSVGRSSFYCLEYFPSQMLRTGNNFTFSYTFEDVPFHSSYAHSQSLDRLMNPLIDQYLYYLARTQSNAGGTAGNRELQFYQGGPTTMAEQAKNWLPGPCFRQQRVSKTLDQNNNSNFAWTGATKYHLNGRNSLVNPGVAMATHKDDEERFFPSSGVLIFGKTGAANKTTLENVLMTNEEEIRPTNPVATEEYGTVSSNLQAANTAAQTQVVNNQGALPGMVWQNRDVYLQGPIWAKIPHTDGNFHPSPLMGGFGLKHPPPQILIKNTPVPANPPEVFTPAKFASFITQYSTGQVSVEIEWELQKENSKRWNPEIQYTSNFDKQTGVDFAVDSQGVYSEPRPIGTRYLTRNL

SEQ ID NO: 460 - protein, 737 aa, Artificial Sequence
  Description of Artificial Sequence: Synthetic polypeptide
MAADGYLPDWLEDNLSEGIREWWDLKPGAPKPKANQQKQDDGRGLVLPGYKYLGPFNGLDKGEPVNAADAAALEHDKAYDQQLKAGDNPYLRYNHADAEFQERLQEDTSFGGNLGRAVFQAKKRVLEPLGLVEEAAKTAPGKKRPVEPSPQRSPDSSTGIGKKGQQPARKRLNFGQTGDSESVPDPQPIGEPPAGPSGLGSGTMAAGGGAPMADNNKGADGVGNASGNWHCDSTWLGDRVITTSTRTWALPTYNNHLYKQISSQSAGSTNDNVYFGYSTPWGYFDFNRFHCHFSPRDWQRLINSNWGFRPKKLNFKLFNIQVKEVTTNDGVTTIANNLTSTVQVFSDSEYQLPYVLGSAHQGCLPPFPADVFMIPQYGYLTLNNGSQSVGRSSFYCLEYFPSQMLRTGNNFTFSYTFEDVPFHSSYAHSQSLDRLMNPLIDQYLYYLARTQSNAGGTAGNRELQFYQGGPTTMAEQAKNWLPGPCFRQQRVSKTLDQNNNSNFAWTGATKYHLNGRNSLVNPGVAMATHKDDEERFFPSSGVLIFGKTGAANKTTLENVLMTNEEEIRPTNPVATEEYGTVSSNLQAANTAAQTQVVNNQGALPGMVWQNRDVYLQGPIWAKIPHTDGNFHPSPLMGGFGLKHPPPQILIKNTPVPANPPEVFTPAKFASFITQYSTGQVSVEIEWELQKENSKRWNPEIQYTSNFDKQTGVDFAVDSQGVYSEPRPIGTRYLTRNL

SEQ ID NO: 461 - protein, 737 aa, Artificial Sequence
  Description of Artificial Sequence: Synthetic polypeptide
MAADGYLPDWLEDNLSEGIREWWDLKPGAPKPKANQQKQDDGRGLVLPGYKYLGPFNGLDKGEPVNAADAAALEHDKAYDQQLKAGDNPYLRYNHADAEFQERLQEDTSFGGNLGRAVFQAKKRVLEPLGLVEEAAKTAPGKKRPVEPSPQRSPDSSTGIGKKGQQPARKRLNFGQTGDSESVPDPQPIGEPPAGPSGLGSGTMAAGGGAPMADNNEGADGVGNASGNWHCDSTWLGDRVITTSTRTWALPTYNNHLYKQISSQSAGSTNDNVYFGYSTPWGYFDFNRFHCHFSPRDWQRLINSNWGFRPKKLNFKLFNIQVKEVTTNDGVTTIANNLTSTVQVFSDSEYQLPYVLGSAHQGCLPPFPADVFMIPQYGYLTLNNGSQSVGRSSFYCLEYFPSQMLRTGNNFTFSYTFEDVPFHSSYAHSQSLDRLMNPLIDQYLYYLARTQSNAGGTAGNRELQFYQGGPTTMAEQAKNWLPGPCFRQQRVSKTLDQNNNSNFAWTGATKYHLNGRNSLVNPGVAMATHKDDEERFFPSSGVLIFGKTGAANKTTLENVLMTNEEEIRPTNPVATEEYGTVSSNLQAANTAAQTQVVNNQGALPGMVWQNRDVYLQGPIWAKIPHTDGNFHPSPLMGGFGLKHPPPQILIKNTPVPANPPEVFTPAKFASFITQYSTGQVSVEIEWELQKENSKRWNPEIQYTSNFDKQTGVDFAVDSQGVYSEPRPIGTRYLTRNL

SEQ ID NO: 462 - protein, 737 aa, Artificial Sequence
  Description of Artificial Sequence: Synthetic polypeptide
MAADGYLPDWLEDNLSEGIREWWDLKPGAPKPKANQQKQDDGRGLVLPGYKYLGPFNGLDKGEPVNAADAAALEHDKAYDQQLKAGDNPYLRYNHADAEFQERLQEDTSFGGNLGRAVFQAKKRVLEPLGLVEEAAKTAPGKKRPVEPSPQRSPDSSTGIGKKGQQPARKRLNFGQTGDSESVPDPQPIGEPPAGPSGLGSGTMAAGGGAPMADNNEGADGVGNASGNWHCDSTWLGDRVITTSTRTWALPTYNNHLYKQISSQSAGSTNDNVYFGYSTPWGYFDFNRFHCHFSPRDWQRLINNNWGFRPKKLNFKLFNIQVKEVTTNDGVTTIANNLTSTVQVFSDSEYQLPYVLGSAHQGCLPPFPADVFMIPQYGYLTLNNGSQSVGRSSFYCLEYFPSQMLRTGNNFTFSYTFEDVPFHSSYAHSQSLDRLMNPLIDQYLYYLARTQSNAGGTAGNRELQFYQGGPTTMAEQAKNWLPGPCFRQQRVSKTLDQNNNSNFAWTGATKYHLNGRNSLVNPGVAMATHKDDEERFFPSSGVLIFGKTGAANKTTLENVLMTNEEEIRPTNPVATEEYGTVSSNLQAANTAAQTQVVNNQGALPGMVWQNRDVYLQGPIWAKIPHTDGNFHPSPLMGGFGLKHPPPQILIKNTPVPANPPEVFTPAKFASFITQYSTGQVSVEIEWELQKENSKRWNPEIQYTSNFDKQTGVDFAVDSQGVYSEPRPIGTRYLTRNL

SEQ ID NO: 463 - protein, 737 aa, Artificial Sequence
  Description of Artificial Sequence: Synthetic polypeptide
MAADGYLPDWLEDNLSEGIREWWDLKPGAPKPKANQQKQDDGRGLVLPGYKYLGPFNGLDKGEPVNAADAAALEHDKAYDQQLKAGDNPYLRYNHADAEFQERLQEDTSFGGNLGRAVFQAKKRVLEPLGLVEEAAKTAPGKKRPVEPSPQRSPDSSTGIGKKGQQPARKRLNFGQTGDSESVPDPQPIGEPPAGPSGLGSGTMAAGGGAPMADNNKGADGVGNASGNWHCDSTWLGDRVITTSTRTWALPTYNNHLYKQISSQSAGSTNDNVYFGYSTPWGYFDFNRFHCHFSPRDWQRLINNNWGFRPKKLNFKLFNIQVKEVTTNDGVTTIANNLTSTVQVFSDSEYQLPYVLGSAHQGCLPPFPADVFMIPQYGYLTLNNGSQSVGRSSFYCLEYFPSQMLRTGNNFTFSYTFEDVPFHSSYAHSQSLDRLMNPLIDQYLYYLARTQSNAGGTAGNRELQFYQGGPTTMAEQAKNWLPGPCFRQQRVSKTLDQNNNSNFAWTGATKYHLNGRNSLVNPGVAMATHKDDEERFFPSSGVLIFGKTGAANKTTLENVLMTNEEEIRPTNPVATEEYGTVSSNLQAANTAAQTQVVNNQGALPGMVWQNRDVYLQGPIWAKIPHTDGNFHPSPLMGGFGLKHPPPQILIKNTPVPANPPEVFTPAKFASFITQYSTGQVSVEIEWELQKENSKRWNPEIQYTSNFDKQTGVDFAVDSQGVYSEPRPIGTRYLTRNL

SEQ ID NO: 464 - DNA, 2214 bp, Artificial Sequence
  Description of Artificial Sequence: Synthetic polynucleotide
atggctgctgacggttatcttccagattggctcgaggacaacctctctgagggcattcgcgagtggtgggacctgaaacctggagcccccaagcccaaggccaaccagcagaagcaggacgacggccggggtctggtgcttcctggctacaagtacctcggacccttcaacggactcgacaagggggagcccgtcaacgcggcggacgcagcggccctcgagcacgacaaggcctacgaccagcagctcaaagcgggtgacaatccgtacctgcggtataaccacgccgacgccgagtttcaggagcgtctgcaagaagatacgtcttttgggggcaacctcgggcgagcagtcttccaggccaagaagcgggttctcgaacctctcggtctggttgaggaagctgctaagacggctcctggaaagaagagaccggtagaaccgtcacctcagcgttcccccgactcctccacgggcatcggcaagaaaggccagcagcccgctagaaagagactgaactttgggcagactggcgactcagagtcagtccccgaccctcaaccaatcggagaaccaccagcaggcccctctggtctgggatctggtacaatggctgcaggcggtggcgcaccaatggctgacaataacaagggcgccgacggagtgggtaatgcctcaggaaattggcattgcgattccacatggctgggcgacagagtcatcaccaccagcacccgaacctgggctttgcccacctacaacaaccacctctacaagcaaatctccagtcagtcagcaggtagcaccaacgacaacgtctacttcggctacagcaccccctgggggtattttgacttcaacagattccactgtcacttctcaccacgtgactggcagcggctcatcaacagcaactggggattccggcccaagaagctcaacttcaagctgttcaacatccaggtcaaggaggtcacaacgaatgacggcgtcacgaccatcgccaataaccttaccagcacggttcaggtcttttcggactcggaataccagctgccctacgtcctcggctccgcacaccagggctgcctgcctccgttcccggcggacgtcttcatgattccccagtacggctacctgactctgaacaatggcagccaatcggtgggtcgttcctctttctactgcctggaatatttcccttctcaaatgctgagaacgggcaacaacttcaccttcagctacaccttcgaggacgttcccttccacagcagctacgcacacagccagagcctggaccggctgatgaatcctcttatcgaccagtacctgtattacctggccagaacacagagcaacgcaggaggcacagctggcaatcgggaactgcagttttatcagggcgggcctaccaccatggccgaacaagccaaaaactggctgcctggaccttgcttccggcaacaaagagtctccaagacgctggatcaaaacaacaacagcaactttgcttggactggtgccaccaaataccatctaaatggaagaaattcattggttaatcccggtgtcgccatggcaacccacaaggacgacgaggaacgcttcttcccttcgagcggagtcctgatttttggaaaaactggagcagctaataagactacactggaaaatgtgttaatgacaaatgaagaggaaattcgtcctaccaacccggtagccaccgaggaatacgggactgttagcagcaacctgcaggcggctaacactgcagcccagacacaagttgtcaacaaccagggagccttacctggtatggtctggcagaaccgggacgtgtacctgcagggtcccatctgggccaagattcctcacacggacggcaactttcacccgtctccgctgatgggcggctttggactgaagcatccgcctcctcagatcctgatcaaaaacactcctgttcctgctaatcccccggaggtgtttacgcctgccaagtttgcttctttcatcacacagtacagcaccggccaggtcagcgtggagatcgagtgggagctgcagaaggagaacagcaagcgctggaacccagagattcagtatacctccaattttgacaaacagactggtgtggactttgccgttgacagccagggtgtttattctgagcctcgccccattggtactcgttacctcacccgtaatctgtaa

SEQ ID NO: 465 - DNA, 2217 bp, Artificial Sequence
  Description of Artificial Sequence: Synthetic polynucleotide
atggctgccgatggttatcttccagattggctcgaggacaacctctctgagggcattcgcgagtggtgggacctgaaacctggagccccgaaacccaaagccaaccagcaaaagcaggacgacggccggggtctggtgcttcctggctacaagtacctcggacccttcaacggactcgacaagggggagcccgtcaacgcggcggacgcagcggccctcgagcacgacaaggcctacgaccagcagctcaaagcgggtgacaatccgcacctgcggtataatcacgccgacgccgagtttcaggagcgtctgcaagaagatacgtcttttgggggcaacctcgggcgagcagtcttccaggccaagaagcgggttctcgaacctctcggtctggttgaggaaggcgctaagacggctcctggaaagaagagaccggtagagccgtcaccacagcgttcccccgactcctccacgggcatcggcaagaaaggccagcagcccgccagaaagagactcaatttcggtcagactggcgactcagagtcagtccccgaccctcaacttatcggagaacctccagcagcgccctctagtgtgggatctggtacaatggctgcaggcggtggcgcaccaatggcagacaataacgaaggtgccgacggagtgggtagttcctcgggaaattggcattgcgattccacatggctgggcgacagagtcatcaccaccagcacccgaacctgggccctgcccacctacaacaaccacctctacaagcaaatctccaacgggacctcgggaggcagcaccaacgacaacacctactttggctacagcaccccctgggggtattttgactttaacagattccactgccacttctcaccacgtgactggcagcgactcatcaacaacaactggggattccggcccaagagactcagcttcaagctcttcaacatccaggtcaaagaggtcacgcagaatgaaggcaccaagaccatcgccaataacctcaccagcaccatccaggtgtttacggactcggagtaccagctgccgtacgtcctcggctctgcccaccagggctgcctgcctccgttcccggcggacgtcttcatgattcctcagtacggcaacctgactctcaacaacggtagtcaggccgtgggacgttcctccttctactgcctggagtacttcccctctcagatgctgagaacgggcaacaacttttccttcagctacactttcgaggacgtgcctttccacagcagctacgcgcacagccagagtttggacaggctgatgaatcctctcatcgaccagtacctgtactacctgtcaagaacccagtctacgggaggcacagcgggaacccagcagttgctgttttctcaggccgggcctagcaacatgtcggctcaggccagaaactggctgcctggaccctgctacagacagcagcgcgtctccacgacactgtcgcaaaacaacaacagcaactttgcctggactggtgccaccaagtatcatctgaacggcagagactctctggtgaatccgggcgtcgccatggcaaccaacaaggacgacgaggaccgcttcttcccatccagcggcatcctcatgtttggcaagcagggagctggaaaagacaacatgggctatagcaacgtgatgctaaccagcgaggaagaaatcaagaccaccaaccccgtggccacagaacagtatggcgtggtggctgataacctacagcagcaaaacaccgctcctattgtgggggccgtcaacagccagggagccttacctggcatggtctggcagaaccgggacgtgtacctgcagggtcctatttgggccaagattcctcacacagatggcaactttcacccgtctcctttaatgggcggctttggacttaaacatccgcctcctcagatcctcatcaaaaacactcctgttcctgcggatcctccaacagcgttcaaccaggccaagctgaattctttcatcacgcagtacggcaccggacaagtcagcgtggagatcgagtgggagctgcagaaggagaacagcaagcgctggaacccagagattcagtatacttccaactactacaaatctacaaatgtggactttgctgttaatactgagggtgtttactctgagcctcgccccattggcactcgttacctcacccgtaatctgtaa

SEQ ID NO: 466 - protein, 738 aa, Artificial Sequence
  Description of Artificial Sequence: Synthetic polypeptide
MAADGYLPDWLEDNLSEGIREWWDLKPGAPKPKANQQKQDDGRGLVLPGYKYLGPFNGLDKGEPVNAADAAALEHDKAYDQQLKAGDNPHLRYNHADAEFQERLQEDTSFGGNLGRAVFQAKKRVLEPLGLVEEGAKTAPGKKRPVEPSPQRSPDSSTGIGKKGQQPARKRLNFGQTGDSESVPDPQLIGEPPAAPSSVGSGTMAAGGGAPMADNNEGADGVGSSSGNWHCDSTWLGDRVITTSTRTWALPTYNNHLYKQISNGTSGGSTNDNTYFGYSTPWGYFDFNRFHCHFSPRDWQRLINNNWGFRPKRLSFKLFNIQVKEVTQNEGTKTIANNLTSTIQVFTDSEYQLPYVLGSAHQGCLPPFPADVFMIPQYGNLTLNNGSQAVGRSSFYCLEYFPSQMLRTGNNFSFSYTFEDVPFHSSYAHSQSLDRLMNPLIDQYLYYLSRTQSTGGTAGTQQLLFSQAGPSNMSAQARNWLPGPCYRQQRVSTTLSQNNNSNFAWTGATKYHLNGRDSLVNPGVAMATNKDDEDRFFPSSGILMFGKQGAGKDNMGYSNVMLTSEEEIKTTNPVATEQYGVVADNLQQQNTAPIVGAVNSQGALPGMVWQNRDVYLQGPIWAKIPHTDGNFHPSPLMGGFGLKHPPPQILIKNTPVPADPPTAFNQAKLNSFITQYGTGQVSVEIEWELQKENSKRWNPEIQYTSNYYKSTNVDFAVNTEGVYSEPRPIGTRYLTRNL

SEQ ID NO: 467 - DNA, 2217 bp, Artificial Sequence
  Description of Artificial Sequence: Synthetic polynucleotide
atggctgccgatggttatcttccagattggctcgaggacaacctctctgagggcattcgcgagtggtgggacctgaaacctggagccccgaaacccaaagccaaccagcaaaagcaggacgacggccggggtctggtgcttcctggctacaagtacctcggacccttcaacggactcgacaagggggagcccgtcaacgcggcggacgcagcggccctcgagcacgacaaggcctacgaccagcagctcaaagcgggtgacaatccgtacctgcggtataatcacgccgacgccgagtttcaggagcgtctgcaagaagatacgtcttttgggggcaacctcgggcgagcagtcttccaggccaagaagcgggttctcgaacctctcggtctggttgaggaaggcgctaagacggctcctggaaagaagagaccggtagagccgtcaccacagcgttcccccgactcctccacgggcatcggcaagaaaggccagcagcccgccggaaagagactcaatttcggtcagactggcgactcagagtcagtccccgaccctcaacctatcggagaacctccagcagcgccctctagtgtgggatctggtacaatggctgcaggcggtggcgcaccaatggcagacaataacgaaggtgccgacggagtgggtagttcctcgggaaattggcattgcgattccacatggctgggcgacagagtcatcaccaccagcacccgaacctgggccctgcccacctacaacaaccacctctacaagcaaatctccaacgggacctcgggaggcagcaccaacgacaacacctactttggctacagcaccccctgggggtattttgactttaacagattccactgccacttctcaccacgtgactggcagcgactcatcaacaacaactggggattccggcccaagagactcagcttcaagctcttcaacatccaggtcaaagaggtcacgcagaatgaaggcaccaagaccatcgccaataacctcaccagcaccatccaggtgtttacggactcggaataccagctgccgtacgtcctcggctctgcccaccagggctgcctgcctccgttcccggcggacgtcttcatgattcctcagtacggctacctgactctcaacaacggtagtcaggccgtgggacgttcctccttctactgcctggagtacttcccctctcagatgctgagaacgggcaacaacttttccttcagctacactttcgaggacgtgcctttccacagcagctacgcgcacagccagagtttggacaggctgatgaatcctctcgtcgaccagtacctgtactacctgtcaagaacccagtctacgggaggcacagcgggaacccagcagttgctgttttctcaggccgggcctagcaacatgtcggctcaggccagaaactggctgcctggaccctgctacagacagcagcgcgtctccacgacactgtcgcaaaacaacaacagcaactttgcctggactggtgccaccaagtatcatctgaacggcagagactctctggtgaatccgggcgtcgccatggcaaccaacaaggacgacgaggaccgcttcttcccatccagcggcatcctcatgtttggcaagcagggagctggaaaagacaacgtggactatagcaacgtgatgctaaccagcgaggaagaaatcaagaccaccaaccccgtggccacagaacagtatggcgtggtggctgataacctacagcagcaaaacaccgctcctattgtgggggccgtcaacagccagggagccttacctggcatggtctggcagaaccgggacgtgtacctgcagggtcctatttgggccaagattcctcacacagatggcaactttcacccgtctcctttaatgggcggctttggacttaaacatccgcctcctcagatcctcatcaaaaacactcctgttcctgcggatcctccaacagcgttcaaccaggccaagctgaattctttcatcacgcagtacagcaccggacaagtcagcgtggagatcgagtgggagctgcagaaggagaacagcaagcgctggagcccagagattcagtatacttccaactactacaaatctacaaatgtggactttgctgttaatactgagggtgtttactctgagcctcgccccattggcactcgttacctcacccgtaatctgtaa

SEQ ID NO: 468 - protein, 738 aa, Artificial Sequence
  Description of Artificial Sequence: Synthetic polypeptide
MAADGYLPDWLEDNLSEGIREWWDLKPGAPKPKANQQKQDDGRGLVLPGYKYLGPFNGLDKGEPVNAADAAALEHDKAYDQQLKAGDNPYLRYNHADAEFQERLQEDTSFGGNLGRAVFQAKKRVLEPLGLVEEGAKTAPGKKRPVEPSPQRSPDSSTGIGKKGQQPAGKRLNFGQTGDSESVPDPQPIGEPPAAPSSVGSGTMAAGGGAPMADNNEGADGVGSSSGNWHCDSTWLGDRVITTSTRTWALPTYNNHLYKQISNGTSGGSTNDNTYFGYSTPWGYFDFNRFHCHFSPRDWQRLINNNWGFRPKRLSFKLFNIQVKEVTQNEGTKTIANNLTSTIQVFTDSEYQLPYVLGSAHQGCLPPFPADVFMIPQYGYLTLNNGSQAVGRSSFYCLEYFPSQMLRTGNNFSFSYTFEDVPFHSSYAHSQSLDRLMNPLVDQYLYYLSRTQSTGGTAGTQQLLFSQAGPSNMSAQARNWLPGPCYRQQRVSTTLSQNNNSNFAWTGATKYHLNGRDSLVNPGVAMATNKDDEDRFFPSSGILMFGKQGAGKDNVDYSNVMLTSEEEIKTTNPVATEQYGVVADNLQQQNTAPIVGAVNSQGALPGMVWQNRDVYLQGPIWAKIPHTDGNFHPSPLMGGFGLKHPPPQILIKNTPVPADPPTAFNQAKLNSFITQYSTGQVSVEIEWELQKENSKRWSPEIQYTSNYYKSTNVDFAVNTEGVYSEPRPIGTRYLTRNL

SEQ ID NO: 469 - DNA, 2217 bp, Artificial Sequence
  Description of Artificial Sequence: Synthetic polynucleotide
atggttgccgatggttatcttccagattggctcgaggacaacctctctgagggcattcgcgagtggtgggacctgaaacctggagccccgaaacccaaagccaaccagcaaaagcagggcgacggccggggtctggtgcttcctggctacaagtacctcggacccttcaacggactcgacaagggggagcccgtcaacgcggcggacgcagcggccctcgagcacgacaaggcctacgaccagcagcttaaagcgggtgacaatccgtacctgcggtataatcacgccgacgccgagcttcaggagcgtctgcaagaagatacgtcttttgggggcaacctcgggcgagcagtcttccaggccaagaagcgggttctcgaacctctcggtctggttgaggaaggcgctaagacggctcctggaaagaagagaccggtagagccgtcaccacagcgttcccccgactcctccacgggcatcggcaagaaaggccagcagcccgccagaaagagactcaatttcggtcagactggcgactcagagtcagtccccgaccctcaacctatcggagaacctccagcagcgccctctagtgtgggatctggtacaatggctgcaggcggtggcgcgccaatggcagacaataacgaaggtgccgacggagtgggtagttcctcgggaaattggcattgcgattccacatggctgggcgacagagtcatcaccaccagcacccgaacctgggccctgcccacctacaacaaccacctctacaagcaaatctccaacgggacctcgggaggcagcaccaacgacaacacctactttggctacagcaccccctgggggtattttgactttaacagattccactgccacttctcaccacgtgactggcagcgactcatcaacaacaactggggattccggcccaagagactcagcttcaagctcttcaacatccaggtcaaagaggtcacgcagaatgaaggcaccaagaccatcgccaataacctcaccagcaccatccaggtgtttacggactcggaataccagctgccgtacgtcctcggctctgcccaccagggctgccagcctccgttcccggcggacgtcttcatgattcctcagtacggctacctgactctcaacaacggtagtcaggccgtgggacgttcctccttctactgcctggagtacttcccctctcagatgctgagaacgggcaacaacttttccttcagctacactttcgaggacgtgcctttccacagcagctacgcgcacagccagagtttggacaggctgatgaatcctctcatcgaccagtacctgtactacctgtcaagaacccagtctacgggaggcacagcgggaacccagcagttgctgttttctcaggccgggcctagcaacatgtcggctcaggccagaaactggctgcctggaccctgctacagacagcagcgcgtctccacgacactgtcgcaaaacaacaacagcaactttgcctggactggtgccaccaagtatcatctgaacggcagagactctctggtgaatccgggcgtcgccatggcaaccaacaaggacgacgaggaccgcttcttcccatccagcggcatcctcatgtttggcaagcagggagctggaaaagacaacgtggactatagcaacgtgatgctaaccagcgaggaagaaatcaagaccaccaaccccgtggccacagaacagtatggcgtggtggctgataacctacagcagcaaaacaccgctcctattgtgggggccgtcaacagccagggagccttacctggcatggtctggcagaaccgggacgtgtacctgcagggtcctatttgggccaagattcctcacacagatggcaactttcacccgtctcctttaatgggcggctttggacttaaacatccgcctcctcagatcctcatcaaaaacactcctgttcctgcggatcctccaacagcgttcaaccaggccaagctgaattctttcatcacgcagtacagcaccggacaagtcagcgtggagatcgagtgggagccgcagaaggagaacagcaagcgctggaacccagagattcagtatacttccaactactacaaatctacaaatgtggactttgctgttaatactgagggtgtttactctgagcctcgccccattggcactcgttacctcacccgtaatctgtaa

SEQ ID NO: 470 - protein, 738 aa, Artificial Sequence
  Description of Artificial Sequence: Synthetic polypeptide
MVADGYLPDWLEDNLSEGIREWWDLKPGAPKPKANQQKQGDGRGLVLPGYKYLGPFNGLDKGEPVNAADAAALEHDKAYDQQLKAGDNPYLRYNHADAELQERLQEDTSFGGNLGRAVFQAKKRVLEPLGLVEEGAKTAPGKKRPVEPSPQRSPDSSTGIGKKGQQPARKRLNFGQTGDSESVPDPQPIGEPPAAPSSVGSGTMAAGGGAPMADNNEGADGVGSSSGNWHCDSTWLGDRVITTSTRTWALPTYNNHLYKQISNGTSGGSTNDNTYFGYSTPWGYFDFNRFHCHFSPRDWQRLINNNWGFRPKRLSFKLFNIQVKEVTQNEGTKTIANNLTSTIQVFTDSEYQLPYVLGSAHQGCQPPFPADVFMIPQYGYLTLNNGSQAVGRSSFYCLEYFPSQMLRTGNNFSFSYTFEDVPFHSSYAHSQSLDRLMNPLIDQYLYYLSRTQSTGGTAGTQQLLFSQAGPSNMSAQARNWLPGPCYRQQRVSTTLSQNNNSNFAWTGATKYHLNGRDSLVNPGVAMATNKDDEDRFFPSSGILMFGKQGAGKDNVDYSNVMLTSEEEIKTTNPVATEQYGVVADNLQQQNTAPIVGAVNSQGALPGMVWQNRDVYLQGPIWAKIPHTDGNFHPSPLMGGFGLKHPPPQILIKNTPVPADPPTAFNQAKLNSFITQYSTGQVSVEIEWEPQKENSKRWNPEIQYTSNYYKSTNVDFAVNTEGVYSEPRPIGTRYLTRNL

SEQ ID NO: 471 - DNA, 2217 bp, Artificial Sequence
  Description of Artificial Sequence: Synthetic polynucleotide
atggctgccgatggttatcttccagattggctcgaggacaacctctctgagggcattcgcgagtggtgggacctgaaacctggagccccgaaacccaaagccaaccagcaaaagcaggacgacggccggggtctggtgcttcctggctacaagtacctcggacccttcaacggactcgacaagggggagcccgtcaacgcggcggacgcagcggccctcgagcacgacaaggcctacgaccagcagctcaaagcgggtgacaatccgtacctgcggtataatcacgccgacgccgagtttcaggagcgtctgcaagaagatacgtcttttgggggcaacctcgggcgagcagtcttccaggccaagaagcgggttctcgaacctctcggtctggttgaggaaggcgctaagacggctcctggaaagaagagaccggtagagccgtcaccacagcgttcccccgactcctccacgggcatcggcaagaaaggccagcagcccgccagaaagagactcaatttcggtcagactggcgactcagagtcagtccccgaccctcaacctatcggagaacctccagcagcgccctctagtgtgggatctggtacaatggctgcaggcggtggcgcaccaatggcagacaataacgaaggtgccgacggagtgggtagttcctcgggaaattggcattgcgattccacatggctgggcgacagagtcatcaccaccagcacccgaacctgggccctgcccacctacaacaaccacctctacaagcaaatctccaacgggacctcgggaggcagcaccaacgacaacacctactttggctacagcaccccctgggggtattttgactttaacagattccactgccacttctcaccacgtgactggcagcgactcatcaacaacaactggggattccggcccaagagactcagcttcaagctcttcaacatccaggtcaaagaggtcacgcagaatgaaggcaccaagaccatcgccaatagcctcaccagcaccatccaggtgtttacggactcggaataccagctgccgtacgtcctcggctctgcccaccagggctgcctgcctccgttcccggcggacgtcttcatgattcctcagtacggctacctgactcccaacaacggtagtcaggccgtgggacgttcctccttctactgcctggagtacttcccctctcagatgctgagaacgggcaacaacttttccttcagctacactttcgaggacgtgcctttccacagcagctacgcgcacagccagagtttggacaggctgatgaatcctctcatcgaccagtacctgtactacctgtcaagaacccagtctacgggaggcacagcgggaacccagcagttgctgtcttctcaggccgggcctagcaacatgtcggctcaggccagaaactggctgcctggaccctgctacagacagcagcgcgtctccacgacactgtcgcaaaacaacaacagcaactttgcctggactggtgccaccaagtatcatctgaacggcagagactctctggtgaatccgggcgtcgccatggcaaccaacaaggacgacgaggaccgcttcttcccatccagcggcatcctcatgtttggcaagcagggagctggaaaagacaacgtggactatagcaacgtgatgctaaccagcgaggaagaaatcaagaccaccaaccccgtggccacagaacagtatggcgtggtggctgataacctacagcagcaaaacaccgctcctattgtgggggccgtcaacagccagggagccttacctggcatggtctggcagaaccgggacgtgtacttgcagggtcctatttgggccaagattcctcacacagatggcaactttcacccgtctcctttaatgggcggctttggacttaaacatccgcctcctcagatcctcatcaaaaacactcctgttcctgcggatcctccaacagcgttcaaccaggccaagctgaattctttcatcacgcagtacagcaccggacaagtcagcgtggagatcgagtgggagctgcagaaggagaacagcaagcgctggaacccagagattcagtatacttccaactactacaaatctacaaatgtggactttgctgttaatactgagggtgtttactctgagcctcgccccattggcactcgttacctcacccgtaatctgtaa

SEQ ID NO: 472 - protein, 738 aa, Artificial Sequence
  Description of Artificial Sequence: Synthetic polypeptide
MAADGYLPDWLEDNLSEGIREWWDLKPGAPKPKANQQKQDDGRGLVLPGYKYLGPFNGLDKGEPVNAADAAALEHDKAYDQQLKAGDNPYLRYNHADAEFQERLQEDTSFGGNLGRAVFQAKKRVLEPLGLVEEGAKTAPGKKRPVEPSPQRSPDSSTGIGKKGQQPARKRLNFGQTGDSESVPDPQPIGEPPAAPSSVGSGTMAAGGGAPMADNNEGADGVGSSSGNWHCDSTWLGDRVITTSTRTWALPTYNNHLYKQISNGTSGGSTNDNTYFGYSTPWGYFDFNRFHCHFSPRDWQRLINNNWGFRPKRLSFKLFNIQVKEVTQNEGTKTIANSLTSTIQVFTDSEYQLPYVLGSAHQGCLPPFPADVFMIPQYGYLTPNNGSQAVGRSSFYCLEYFPSQMLRTGNNFSFSYTFEDVPFHSSYAHSQSLDRLMNPLIDQYLYYLSRTQSTGGTAGTQQLLSSQAGPSNMSAQARNWLPGPCYRQQRVSTTLSQNNNSNFAWTGATKYHLNGRDSLVNPGVAMATNKDDEDRFFPSSGILMFGKQGAGKDNVDYSNVMLTSEEEIKTTNPVATEQYGVVADNLQQQNTAPIVGAVNSQGALPGMVWQNRDVYLQGPIWAKIPHTDGNFHPSPLMGGFGLKHPPPQILIKNTPVPADPPTAFNQAKLNSFITQYSTGQVSVEIEWELQKENSKRWNPEIQYTSNYYKSTNVDFAVNTEGVYSEPRPIGTRYLTRNL

SEQ ID NO: 473 - protein, 738 aa, Artificial Sequence
  Description of Artificial Sequence: Synthetic polypeptide
MAADGYLPDWLEDNLSEGIREWWDLKPGAPKPKANQQKQDDGRGLVLPGYKYLGPFNGLDKGEPVNAADAAALEHDKAYDQQLKAGDNPYLRYNHADAEFQERLQEDTSFGGNLGRAVFQAKKRVLEPLGLVEEGAKTAPGKKRPVEPSPQRSPDSSTGIGKKGQQPARKRLNFGQTGDSESVPDPQPIGEPPAAPSSVGSGTMAAGGGAPMADNNEGADGVGSSSGNWHCDSTWLGDRVITTSTRTWALPTYNNHLYKQISNGTSGGSTNDNTYFGYSTPWGYFDFNRFHCHFSPRDWQRLINNNWGFRPKRLSFKLFNIQVKEVTQNEGTKTIANNLTSTIQVFTDSEYQLPYVLGSAHQGCLPPFPADVFMIPQYGYLTLNNGSQAVGRSSFYCLEYFPSQMLRTGNNFSFSYTFEDVPFHSSYVHSQSLDRLMNPLIDQYLYYLSRTQSTGGTAGTQQLLFSQAGPSNMSAQARNWLPGPCYRQQRVSTTLSQNNNSNFAWTGATKYHLNGRDSLVNSGVAMATNKDDEDRFFPSSGILMFGKQGAGKDNVDYSNVMLTSEEEIKTTNPVATEQYGVVADNLQQQNTAPIVGAVNSQGALPGMVWQNRDVYLQGPIWAKIPHTDGNFHPSPLMGGFGLKHPPPQILIKNTPVPADPPTAFNQAKLNSFITQYSTGQVSVEIEWELQKENSKRWNPEIQYTSNYYKSTNVDFAVNTEGVYSEPRPIGTRYPTRNL

SEQ ID NO: 474 - DNA, 2217 bp, Artificial Sequence
  Description of Artificial Sequence: Synthetic polynucleotide
atggctgccgatggttatcttccagattggctcgaggacaacctctctgagggcattcgcgagtggtgggacctgaaacctggagccccgaaacccaaagccaaccagcaaaagcaggacgacggccggggtctggtgcttcctggctacaagtacctcggacccttcaacggactcgacaagggggagcccgtcaacgcggcggacgcagcggccctcgagcacgacaaggcctacgaccagcagctcaaagcgggtgacaatccgtacctgcggtataatcacgccgacgccgagtttcaggagcgtctgcaagaagatacgtcttttgggggcaacctcgggcgagcagtcttccaggccaagaagcgggttctcgaacctctcggtctggttgaggaaggcgctaagacggctcctggaaagaagagaccggtagagccgtcaccacagcgttcccccgactcctccacgggcatcggcaagaaaggccagcagcccgccagaaagagactcaatttcggtcagactggcgactcagagtcagtccccgaccctcaacctatcggagaacctccagcagcgccctctagtgtgggatctggtacaatggctgcaggcggtggcgcaccaatggcagacaataacgaaggtgccgacggagtgggtagttcctcgggaaattggcattgcgattccacatggctgggcgacagagtcatcaccaccagcacccgaacctgggccctgcccacctacaacaaccacctctacaagcaaatctccaacgggacctcgggaggcagcaccaacgacaacacctactttggctacagcaccccctgggggtattttgactttaacagattccactgccacttctcaccacgtgactggcagcgactcatcaacaacaactggggattccggcccaagagactcagcttcaagctcttcaacatccaggtcaaagaggtcacgcagaatgaaggcaccaagaccatcgccaataacctcaccagcaccatccaggtgtttacggactcggaataccagctgccgtacgtcctcggctctgcccaccagggctgcctgcctccgttcccggcggacgtcttcatgattcctcagtacggctacctgactctcaacaacggtagtcaggccgtgggacgttcctccttctactgcctggagtacttcccctctcagatgctgagaacgggcaacaacttttccttcagctacactttcgaggacgtgcctttccacagcagctacgtgcacagccagagtttggacaggctgatgaatcctctcatcgaccagtacctgtactacctgtcaagaacccagtctacgggaggcacagcgggaacccagcagttgctgttttctcaggccgggcctagcaacatgtcggctcaggccagaaactggctgcctggaccctgctacagacagcagcgcgtctccacgacactgtcgcaaaacaacaacagcaactttgcctggactggtgccaccaagtatcatctgaacggcagagactctctggtgaattcgggcgtcgccatggcaaccaacaaggacgacgaggaccgcttcttcccatccagcggcatcctcatgtttggcaagcagggagctggaaaagacaacgtggactatagcaacgtgatgctaaccagcgaggaagaaatcaagaccaccaaccccgtggccacagaacagtatggcgtggtggctgataacctacagcagcaaaacaccgctcctattgtgggggccgtcaacagccagggagccttacctggcatggtctggcagaaccgggacgtgtacctgcagggtcctatttgggccaagattcctcacacagatggcaactttcacccgtctcctttaatgggcggctttggacttaaacatccgcctcctcagatcctcatcaaaaacactcctgttcctgcggatcctccaacagcgttcaaccaggccaagctgaattctttcatcacgcagtacagcaccggacaagtcagcgtggagatcgagtgggagctgcagaaggagaacagcaagcgctggaacccagagattcagtatacttccaactactacaaatctacaaatgtggactttgctgttaatactgagggtgtttactctgagcctcgccccattggcactcgttaccccacccgtaatctgtaa

SEQ ID NO: 475 - protein, 734 aa, Artificial Sequence; identical to SEQ ID NO: 300
  Description of Artificial Sequence: Synthetic polypeptide

SEQ ID NO: 476 - DNA, 2214 bp, Artificial Sequence
  Description of Artificial Sequence: Synthetic polynucleotide
atggctgctgacggttatcttccagattggctcgaggacaacctctctgagggcattcgcgagtggtgggacctgaaacctggagccccgaaacccaaagccaaccagcagaagcaggacgacggccggggtctggtgcttcctggctacaagtacctcggacccttcaacggactcgacaagggggagcccgtcaacgcggcggacgcagcggccctcgagcacgacaaggcctacgaccagcagctcaaagcgggtgacaatccgtacctgcggtataaccacgccgacgccgagtttcaggagcgtctgcaagaagatacgtcttttgggggcaacctcgggcgagcagtcttccaggccaagaagcgggttctcgaacctctcggtctggttgaggaagctgctaagacggctcctggaaagaagagaccggtagaaccgtcacctcagcgttcccccgactcctccacgggcatcggcaagaaaggccagcagcccgctagaaagagactgaactttgggcagactggcgactcagagtcagtccccgaccctcaacctctcggagaaccaccagcaggcccctctggtctgggatctggtacaatggctgcaggcggtggcgctccaatggcagacaataacgaaggcgccgacggagtgggtaatgcctcaggaaattggcattgcgattccacatggctgggcgacagagtcatcaccaccagcacccgaacctgggctttgcccacctacaacaaccacctctacaagcaaatctccagtcagtcagcaggtagcaccaacgacaacgtctacttcggctacagcaccccctgggggtattttgacttcaacagattccactgtcacttctcaccacgtgactggcagcgactcatcaacaacaactggggattccggcccaagaagctcaacttcaagctcttcaacatccaagtcaaggaggtcacgacgaatgacggcgtcacgaccatcgctaataaccttaccagcacggttcaggtcttttcggactcggagtaccagctgccgtacgtcctcggctctgcccaccagggctgcctgcctccgttcccggcggacgtcttcatgattcctcagtacggctacctgactctgaacaatggcagccaatcggtgggacgttcatccttctactgcctggaatacttcccttctcaggtgctgagaacgggtaacaacttcaccttcagttacaccttcgaggacgtgcctttccacagcagctacgcgcacagccagagcctagaccggctgatgaatcccctcatcgaccagtacctgtattacctggctagaacacagagtaacccaggaggcacatctggcaatcgggaactgcagttttaccagggcgggccttccaccatggccgaacaagccaagaactggttacctggaccttgcttccggcaacaaagagtttccaaaacactggatcaaaacaacaacagcaactttgcttggactggtgccaccaaatatcacctgaacggcagaaactcattggtgaatcctggtgtcgccatggcaactcacaaggacgacgaggaccgctttttcccatccagcggagtcctgatttttggaaaaactggagcaaccaacaagactacattggaaaacgtgttaatgacaaatgaagaagaaattcgtcctactaatcctgtggccacagaagaatacgggatagtcagcagcaatttacaagcggccaatactgcagcccagacacaagttgtcaacaaccagggagccttacctggcatggtctggcagaaccgggacgtgtacctgcagggtcccatctgggccaaaattcctcacacagacggcaactttcacccgtctccgctgatgggcggctttggactgaagcatccgcctcctcagatcctgatcaaaaacactcctgttcctgctaatcccccggaggtgtttacgcctgccaagtttgcttctttcatcacacagtacagcaccggccaggtcagcgtggagatcgagtgggagctgcagaaggagaacagcaagcgctggaacccagagattcagtatacctccaattttgacaaacagactggtgtggactttgccgttgacagccagggtgtttattctgagcctcgccccattggtactcgttacctcacccgtaatctgtaa

SEQ ID NO: 477 - protein, 737 aa, Artificial Sequence
  Description of Artificial Sequence: Synthetic polypeptide
MAADGYLPDWLEDNLSEGIREWWDLKPGAPKPKANQQKQDDGRGLVLPGYKYLGPFNGLDKGEPVNAADAAALEHDKAYDQQLKAGDNPYLRYNHADAEFQERLQEDTSFGGNLGRAVFQAKKRVLEPLGLVEEAAKTAPGKKRPVEPSPQRSPDSSTGIGKKGQQPARKRLNFGQTGDSESVPDPQPLGEPPAGPSGLGSGTMAAGGGAPMADNNEGADGVGNASGNWHCDSTWLGDRVITTSTRTWALPTYNNHLYKQISSQSAGSTNDNVYFGYSTPWGYFDFNRFHCHFSPRDWQRLINNNWGFRPKKLNFKLFNIQVKEVTTNDGVTTIANNLTSTVQVFSDSEYQLPYVLGSAHQGCLPPFPADVFMIPQYGYLTLNNGSQSVGRSSFYCLEYFPSQVLRTGNNFTFSYTFEDVPFHSSYAHSQSLDRLMNPLIDQYLYYLARTQSNPGGTSGNRELQFYQGGPSTMAEQAKNWLPGPCFRQQRVSKTLDQNNNSNFAWTGATKYHLNGRNSLVNPGVAMATHKDDEDRFFPSSGVLIFGKTGATNKTTLENVLMTNEEEIRPTNPVATEEYGIVSSNLQAANTAAQTQVVNNQGALPGMVWQNRDVYLQGPIWAKIPHTDGNFHPSPLMGGFGLKHPPPQILIKNTPVPANPPEVFTPAKFASFITQYSTGQVSVEIEWELQKENSKRWNPEIQYTSNFDKQTGVDFAVDSQGVYSEPRPIGTRYLTRNL

SEQ ID NO: 478 - DNA, 2214 bp, Artificial Sequence
  Description of Artificial Sequence: Synthetic polynucleotide
atggctgccgatggttatcttccagattggctcgaggacaacctctctgagggcattcgcgagtggtgggacctgaaacctggagccccgaaacccaaagccaaccagcaaaagcaggacgacggccggggtctggtgcttcctggctacaagtacctcggacccttcaacggactcgacaagggggagcccgtcaacgcggcggacgcagcggccctcgagcacgacaaggcctacgaccagcagctcaaagcgggtgacaatccgtacctgcggtataatcacgccgacgccgagtttcaggagcgtctgcaagaagatacgtcttttgggggcaacctcgggcgagcagtcttccaggccaagaagcgggttctcgaacctctcggtctggttgaggaaggcgctaagacggctcctggaaagaagagaccggtagagccgtcaccacagcgttcccccgactcctccacgggcatcggcaagaaaggccagcagcccgccagaaagagactcaatttcggtcagactggcgactcagagtcagtccccgaccctcaacctatcggagaacctccagcagcgccctctagtgtgggatctggtacaatggctgcaggcggtggcgcaccaatggcagacaataacgaaggtgccgacggagtgggtagttcctcgggaaattggcattgcgattccacacggctgggcgacagagtcatcaccaccagcacccggacctgggctttgcccacctacaacaaccacctctacaagcaaatctccagtcagtcagcaggtagcaccaacgacaacgtctacttcggctacagcaccccctgggggtattttgacttcaacagattccactgtcacttctcaccacgtgactggcagcggctcatcaacaacaactggggattccggcccaagaagctcaacttcaagctgttcaacatccaggtcaaggaggtcacaacgaatgacggcgtcacgaccatcgccaataaccttaccagcacggttcaggtcttttcggactcggaataccagctgccctacgtcctcggctccgcacaccagggctgcctgcctccgttcccggcggacgtcttcatgattccccagtacggctacctgactctgaacaatggcagccaatcggtgggtcgttcctctttctactgcctggaatatttcccttctcaaatgctgagaacgggcaacaacttcaccttcagctacaccttcgaggacgttcccttccacagcagctacgcacacagccagagcctggaccggctgatgaatcctcttatcgaccagtacctgtattacctggccagaacacagagcaacgcaggaggcacagctggcaatcgggaactgcagttttatcagggcgggcctaccaccatggccgaacaagccaaaaactggctgcctggaccttgcttccggcaacgaagagtctccaagacgctggatcaaaacaacaacagcaactttgcttggactggtgccaccaaataccatctaaatggaagaaattcattggttaatcccggtgtcgccatggcaacccacaaggacgacgaggaacgcttcttcccttcgagcggagtcctgatttttggaaaaactggagcagctaataagactacactggaaaatgtgttaatgacaaatgaagaggaaattcgtcctaccaacccggtagccaccgaggaatacgggactgttagcagcaacctgcaggcggctaacactgcagcccagacacaagttgtcaacaaccagggagccttacctggtatggtctggcagaaccgggacgtgtacctgcagggtcccatctgggccaagattcctcacacggacggcaactttcacccgtctccgctgatgggcggctttggactgaagcatccgcctcctcagatcctgatcaaaaacactcctgttcctgctaatcccccggaggtgtttacgcctgccaagtttgcttctttcatcacacagtacagcaccggccaggtcagcgtggagatcgagtgggagctgcagaaggagaacagcaagcgctggaacccagagattcagtatacctccaattttgacaaacagactggtgtggactttgccgttgacagccagggtgtttattctgagcctcgccccattggtactcgttacctcacccgtaatctgtaa

SEQ ID NO: 479 - protein, 737 aa, Artificial Sequence
  Description of Artificial Sequence: Synthetic polypeptide
MAADGYLPDWLEDNLSEGIREWWDLKPGAPKPKANQQKQDDGRGLVLPGYKYLGPFNGLDKGEPVNAADAAALEHDKAYDQQLKAGDNPYLRYNHADAEFQERLQEDTSFGGNLGRAVFQAKKRVLEPLGLVEEGAKTAPGKKRPVEPSPQRSPDSSTGIGKKGQQPARKRLNFGQTGDSESVPDPQPIGEPPAAPSSVGSGTMAAGGGAPMADNNEGADGVGSSSGNWHCDSTRLGDRVITTSTRTWALPTYNNHLYKQISSQSAGSTNDNVYFGYSTPWGYFDFNRFHCHFSPRDWQRLINNNWGFRPKKLNFKLFNIQVKEVTTNDGVTTIANNLTSTVQVFSDSEYQLPYVLGSAHQGCLPPFPADVFMIPQYGYLTLNNGSQSVGRSSFYCLEYFPSQMLRTGNNFTFSYTFEDVPFHSSYAHSQSLDRLMNPLIDQYLYYLARTQSNAGGTAGNRELQFYQGGPTTMAEQAKNWLPGPCFRQRRVSKTLDQNNNSNFAWTGATKYHLNGRNSLVNPGVAMATHKDDEERFFPSSGVLIFGKTGAANKTTLENVLMTNEEEIRPTNPVATEEYGTVSSNLQAANTAAQTQVVNNQGALPGMVWQNRDVYLQGPIWAKIPHTDGNFHPSPLMGGFGLKHPPPQILIKNTPVPANPPEVFTPAKFASFITQYSTGQVSVEIEWELQKENSKRWNPEIQYTSNFDKQTGVDFAVDSQGVYSEPRPIGTRYLTRNL

SEQ ID NO: 480 - DNA, 2208 bp, Artificial Sequence
  Description of Artificial Sequence: Synthetic polynucleotide
atggctgccgatggttatcttccagattggctcgaggacactctctctgaaggaataagacagtggtggaagctcaaacctggcccaccaccaccaaagcccgcagagcggcataaggacgacagcaggggtcttgtgcttcctgggtacaagtacctcggacccttcaacggactcgacaagggggagccggtcaacgaggcagacgccgcggccctcgagcacgacaaggcctacgaccggcagctcgacagcggagacaacccgtacctcaagtacaaccacgccgacgcggagtttcaggagcgtcttaaagaagatacgtcttttgggggcaacctcggacgagcagtcttccaggcgaaaaagagggttcttgaacctctgggcctggttgaggaacctgttaagacggctccgggaaaaaagaggccggtagagcactctcctgcggagccagactcctcctcgggaaccggaaaagcgggccagcagcctgcaagaaaaagattgaattttggtcagactggagacgcagactccgtacctgacccccagcctctcggacagccaccagcagccccctctggtttgggatctactacaatggctacaggcagtggcgcaccaatggcagacaataacgagggtgccgatggagtgggtaattcttcaggaaattggcattgcgattcccaatggctgggcgacagagtcatcaccaccagcacccgaacctgggcccagcccacctacaacaaccacctctacaagcaaatctcaagccaatcaggagcctcaaacgacaaccactactttggctacagcaccccttgggggtattttgacttcaacagattccactgccacttttcaccacgtgactggcaaagactcatcaacaacaactggggattccgacccaagagactcaacttcaagctctttaacattcaagtcaaagaggtcacgcagaatgacggtacgacgacgattgccaataaccttaccagcacggttcaggtgtttactgactcggagtaccagctcccgtacgtcctcgggtcggcgcatcaaggatgcctcccgccgtttccagcggacgtcttcatggtcccacagtatggatacctcaccctgaacaacgggagtcaggcggtaggacgctcttccttttactgcctggagtactttccttctcagatgcttcgtactggaaacaactttcagttcagctacacctttgaagacgttcctttccacagcagctacgctcacagccagagtctggatcggctgatgaatcctctgatcgaccagtacctgtattatctgaacaaaacacaatcaaatagtggagctcttcagcagtctcggctactgtttagtcaagctggacccaccagcatgtctcttcaagctaaaaactggctacctggaccttgctacagacagcagcgtctgtcaaagcaggcaaacgacaacaacaacagcaactttccctggactgcggctacaaagtaccacctaaatggccgggactcgttggttaatccaggaccagctatggccagtcacaaagacgatgaagaaaagtttttccccatgcatggaaccctgatatttggtaaacaaggaacaaatgctaacgacgcggatttggacaatgtcatgattacagatgaagaagaaatccgcaccaccaatcccgtggctacggagcagtacggatatgtgtcaaataatttgcaaaactcaaatactggtccaactactggaactgtcaatcaccgaggagcgttacctggcatggtgtggcaggatcgagacgtgtacctgcagggacccatttgggccaagattcctcacaccgatggacactttcatccttctccactgatgggaggttttgggctcaaacacccgcctcctcagatcatgatcaaaaacactcccgttccagccaatcctcccacaaacttcagttctgccaagtttgcttctttcatcacacagtattccacggggcaggtcagcgtggagatcgagtgggagctgcagaaagagaacagcaaacgctggaatcccgaaattcagtacacttccaactacaacaaatctgttaatgtggactttactgtggacactaatggcgtgtattcagagcctcgccccattggcaccagatacctgactcgtaatctgtaa

SEQ ID NO: 481 - protein, 735 aa, Artificial Sequence
  Description of Artificial Sequence: Synthetic polypeptide
MAADGYLPDWLEDTLSEGIRQWWKLKPGPPPPKPAERHKDDSRGLVLPGYKYLGPFNGLDKGEPVNEADAAALEHDKAYDRQLDSGDNPYLKYNHADAEFQERLKEDTSFGGNLGRAVFQAKKRVLEPLGLVEEPVKTAPGKKRPVEHSPAEPDSSSGTGKAGQQPARKRLNFGQTGDADSVPDPQPLGQPPAAPSGLGSTTMATGSGAPMADNNEGADGVGNSSGNWHCDSQWLGDRVITTSTRTWAQPTYNNHLYKQISSQSGASNDNHYFGYSTPWGYFDFNRFHCHFSPRDWQRLINNNWGFRPKRLNFKLFNIQVKEVTQNDGTTTIANNLTSTVQVFTDSEYQLPYVLGSAHQGCLPPFPADVFMVPQYGYLTLNNGSQAVGRSSFYCLEYFPSQMLRTGNNFQFSYTFEDVPFHSSYAHSQSLDRLMNPLIDQYLYYLNKTQSNSGALQQSRLLFSQAGPTSMSLQAKNWLPGPCYRQQRLSKQANDNNNSNFPWTAATKYHLNGRDSLVNPGPAMASHKDDEEKFFPMHGTLIFGKQGTNANDADLDNVMITDEEEIRTTNPVATEQYGYVSNNLQNSNTGPTTGTVNHRGALPGMVWQDRDVYLQGPIWAKIPHTDGHFHPSPLMGGFGLKHPPPQIMIKNTPVPANPPTNFSSAKFASFITQYSTGQVSVEIEWELQKENSKRWNPEIQYTSNYNKSVNVDFTVDTNGVYSEPRPIGTRYLTRNL

SEQ ID NO: 482 - DNA, 2217 bp, Artificial Sequence
  Description of Artificial Sequence: Synthetic polynucleotide
atggctgccgatggttatcttccagattggctcgaggacaacctctctgagggcattcgcgagtggtgggcgctgaaacctggagccccgaagcccaaagccaaccagcaaaagcaggacgacggccggggtctggtgcttcctggctacaagtacctcggacccttcaacggactcgacaagggggagcccgtcaacgcggcggacgcagcggccctcgagcacgacaaggcctacgaccagcagctgcaggcgggtgacaatccgtacctgcggtataatcacgccgacgccgagtttcaggagcgtctgcaagaagatacgtcttttgggggcaacctcgggcgagcagtcttccaggccaagaagcgggttctcgaacctctcggtctggttgaggaaggcgctaagacggctcctggaaagaagagaccggtagagccgtcaccacagcgttcccccgactcctccacgggcatcggcaagaaaggccagcagcccgccagaaagagactcaatttcggtcagactggcgactcagagtcagtccccgaccctcaacctatcggagaacctccagcagcgccctctagtgtgggatctggtacaatggctgcaggcggtggcgcgccaatggcagacaataacgaaggtgccgacggagtgggtagttcctcgggaaattggcattgcgattccacatggctgggcgacagagtcatcaccaccagcacccgaacctgggccctgcccacctacaacaaccacctctacaagcaaacctccaacgggacctcgggaggcagcaccaacgacaacacctactttggctacagcaccccctgggggtattttgactttaacagattccactgccacttctcaccacgtgactggcagcgactcatcaacaacaactggggattccggcccaagagactcagcttcaagctcttcaacatccaggtcaaagaggtcacgcagaatgaaggcaccaagaccatcgccaataacctcaccagcaccatccaggtgtttacggactcggaataccagctgccgtacgtcctcggctctgcccaccagggctgcctgcctccgttcccggcggacgtcttcatgattcctcagtacggctacctgactctcaacaacggtagtcaggccgtgggacgttcctccttctactgcctggagtacttcccctctcagatgctgagaacgggcaacaacttttccttcagctacactttcgaggacgtgcctttccacagcagctacgcgcacagccagagtttggacaggctgatgaatcctctcatcgaccagtacctgtactacctgtcaagaacccagtctacgggaggcacagcgggaacccagcagttgctgttttctcaggccgggcctagcaacatgtcggctcaggccagaaactggctgcctggaccctgctacagacagcagcgcgtctccacgacactgtcgcaaaacaacaacagcaactttgcctggactggtgccaccaagtatcatctgaacggcagagactctctggtgaatccgggcgtcgccatggcaaccaacaaggacgacgaggaccgcttcttcccatccagcggcatcctcatgtttggcaagcagggagctggaaaagacaacgtggactatagcaacgtgatgctaaccagcgaggaagaaatcaagaccaccaaccccgtggccacagaacagtatggcgtggtggctgataacctacagcagcaaaacaccgctcctattgtgggggccgtcaacagccagggagccttacctggcatggtctggcagaaccgggacgtgtacctgcagggtcctatttgggccaagattcctcacacagatggcaactttcacccgtctcctttaatgggcggctttggacttaaacatccgcctcctcagatcctcatcaaaaacactcctgttcctgcggatcctccaacagcgttcaaccaggccaagctgaattctttcatcacgcagtacagcaccggacaagtcagcgcggagatcgagtgggagctgcagaaggagaacagcaagcgctggaacccagagattcagtatacttccaactactacaaatctacaaatgtggactttgctgttaatactgagggtgtttactctgagcctcgccccattggcactcgttacctcacccgtaatctgtaa

SEQ ID NO: 483 - protein, 738 aa, Artificial Sequence
  Description of Artificial Sequence: Synthetic polypeptide
MAADGYLPDWLEDNLSEGIREWWALKPGAPKPKANQQKQDDGRGLVLPGYKYLGPFNGLDKGEPVNAADAAALEHDKAYDQQLQAGDNPYLRYNHADAEFQERLQEDTSFGGNLGRAVFQAKKRVLEPLGLVEEGAKTAPGKKRPVEPSPQRSPDSSTGIGKKGQQPARKRLNFGQTGDSESVPDPQPIGEPPAAPSSVGSGTMAAGGGAPMADNNEGADGVGSSSGNWHCDSTWLGDRVITTSTRTWALPTYNNHLYKQTSNGTSGGSTNDNTYFGYSTPWGYFDFNRFHCHFSPRDWQRLINNNWGFRPKRLSFKLFNIQVKEVTQNEGTKTIANNLTSTIQVFTDSEYQLPYVLGSAHQGCLPPFPADVFMIPQYGYLTLNNGSQAVGRSSFYCLEYFPSQMLRTGNNFSFSYTFEDVPFHSSYAHSQSLDRLMNPLIDQYLYYLSRTQSTGGTAGTQQLLFSQAGPSNMSAQARNWLPGPCYRQQRVSTTLSQNNNSNFAWTGATKYHLNGRDSLVNPGVAMATNKDDEDRFFPSSGILMFGKQGAGKDNVDYSNVMLTSEEEIKTTNPVATEQYGVVADNLQQQNTAPIVGAVNSQGALPGMVWQNRDVYLQGPIWAKIPHTDGNFHPSPLMGGFGLKHPPPQILIKNTPVPADPPTAFNQAKLNSFITQYSTGQVSAEIEWELQKENSKRWNPEIQYTSNYYKSTNVDFAVNTEGVYSEPRPIGTRYLTRNL

SEQ ID NO: 484 - DNA, 2217 bp, Artificial Sequence
  Description of Artificial Sequence: Synthetic polynucleotide
atggctgctgacggttatcttccagattggctcgaggacaacctctctgagggcattcgcgagtggtgggacctgaaacctggagcccccaagcccaaggccaaccagcagaagcaggacgacggccggggtctggtgcttcctggctacaagtacctcggacccttcaacggactcgacaagggggagcccgtcaacgcggcggacgcagcggccctcgagcacgacaaggcctacgaccagcagctcaaagcgggtgacaatccgtacctgcggtataatcacgccgacgccgagtttcaggagcgtctgcaagaagatacgtcttttgggggcaacctcgggcgagcagtcttccaggccaagaagcgggttctcgaacctctcggtctggttgaggaagctgctaagacggctcctggaaagaagagaccggtagaaccgtcacctcagcgttcccccgactcctccacgggcatcggcaagaaaggccagcagcccgctagaaagagactgaactttgggcagactggcgactcagagtcagtccccgaccctcaaccaatcggagaacctccagcagcgccctctagtgtgggatctggtacaatggccgcaggcggtggcgcaccaatggcagacaataacgaaggtgccgacggagtgggtagttcctcgggaaattggcattgcgattccacatggctgggcgacagagtcatcaccaccagcacccgaacctgggccctgcccacctacaacaaccacctctacaagcaaatctccaacgggacctcgggaggcagcaccaacgacaacacctactttggctacagcaccccctgggggtattttgactttaacagattccactgccacttctcaccacgtgactggcagcgactcatcaacaacaactggggattccggcccaagagactcagcttcaagctcttcaacatccaggtcaaagaggtcacgcagaatgaaggcaccaagaccatcgccaataacctcaccagcaccatccaggtgtttacggactcggaataccagctgccgtacgtcctcggctctgcccaccagggctgcctgcctccgttcccggcggacgtcttcatgattcctcagtacggctacctgactctcaacaacggtagtcaggccgtgggacgttcctccttctactgcctggagtacttcccctctcagatgctgagaacgggcaacaacttttccttcagctacactttcgaggacgtgcctttccacagcagctacgcgcacagccagagtttggacaggctgatgaatcctctcatcgaccagtacctgtactacctgtcaagaacccagtctacgggaggcacagcgggaacccagcagctgctgttttctcaggccgggcctagcaacatgtcggctcaggccagaaactggctgcctggaccctgctacagacagcagcgcgtctccacgacactgtcgcaaaacaacaacagcaactttgcctggactggtgccaccaagtatcatctgaacggcagagactctctggtgaatccgggcgtcgccatggcaaccaacaaggacgacgaggaccgcttcttcccatccagcggcatcctcatgtttggcaagcagggagctggaaaagacaacgtggactatagcaacgtgatgctaaccagcgaggaagaaatcaagaccaccaaccccgtggccacagaacagtatggcgtggtggctgataacctacagcagcaaaacaccgctcctattgtgggggccgtcaacagccagggagccttacctggcatggtctggcagaaccgggacgtgtacctgcagggtcctatttgggccaagattcctcacacagatggcaactttcacccgtctcctttaatgggcggctttggacttaaacatccgcctcctcagatcctcatcaaaagcactcctgttcctgcggatcctccaacagcgttcaaccaggccaagctgaattctttcatcacgcagtacagcaccggacaagtcagcgtggagatcgagtgggagctgcagaaggagaacagcaagtgctggaacccagagattcagtatacttccaactactacaaatctacaaatgtggactttgctgttaatactgagggtgtttactctgagcctcgccccattggcactcgttacctcacccgtaatctgtaa

SEQ ID NO: 485 - protein, 738 aa, Artificial Sequence
  Description of Artificial Sequence: Synthetic polypeptide
MAADGYLPDWLEDNLSEGIREWWDLKPGAPKPKANQQKQDDGRGLVLPGYKYLGPFNGLDKGEPVNAADAAALEHDKAYDQQLKAGDNPYLRYNHADAEFQERLQEDTSFGGNLGRAVFQAKKRVLEPLGLVEEAAKTAPGKKRPVEPSPQRSPDSSTGIGKKGQQPARKRLNFGQTGDSESVPDPQPIGEPPAAPSSVGSGTMAAGGGAPMADNNEGADGVGSSSGNWHCDSTWLGDRVITTSTRTWALPTYNNHLYKQISNGTSGGSTNDNTYFGYSTPWGYFDFNRFHCHFSPRDWQRLINNNWGFRPKRLSFKLFNIQVKEVTQNEGTKTIANNLTSTIQVFTDSEYQLPYVLGSAHQGCLPPFPADVFMIPQYGYLTLNNGSQAVGRSSFYCLEYFPSQMLRTGNNFSFSYTFEDVPFHSSYAHSQSLDRLMNPLIDQYLYYLSRTQSTGGTAGTQQLLFSQAGPSNMSAQARNWLPGPCYRQQRVSTTLSQNNNSNFAWTGATKYHLNGRDSLVNPGVAMATNKDDEDRFFPSSGILMFGKQGAGKDNVDYSNVMLTSEEEIKTTNPVATEQYGVVADNLQQQNTAPIVGAVNSQGALPGMVWQNRDVYLQGPIWAKIPHTDGNFHPSPLMGGFGLKHPPPQILIKSTPVPADPPTAFNQAKLNSFITQYSTGQVSVEIEWELQKENSKCWNPEIQYTSNYYKSTNVDFAVNTEGVYSEPRPIGTRYLTRNL

SEQ ID NO: 486 - protein, 738 aa, Artificial Sequence
  Description of Artificial Sequence: Synthetic polypeptide
MAADGYLPDWLEDNLSEGIREWWDLKPGAPKPKANQQKQDDGRGLVLPGYKYLGPFNGLDKGEPVNAADAAALEHDKAYDQQLKAGDNPYLRYNHADAEFQERLQEDTSFGGNLGRAVFQAKKRVLEPLGLVEEAAKTAPGKKRPVEPSPQRSPDSSTGIGKKGQQPARKRLNFGQTGDSESVPDPQPIGEPPAAPSSVGSGTMAAGGGAPMADNNEGADGVGSSSGNWHCDSTWLGDRVITTSTRTWALPTYNNHLYKQISNGTSGGSTNDNTYFGYSTPWGYFDFNRFHCHFSPRDWQRLINNNWGFRPKRLSFKLFNIQVKEVTQNEGTKTIANNLTSTIQVFTDSEYQLPYVLGSAHQGCLPPFPADVFMIPQYGYLTLNNGSQAVGRSSFYCLEYFPSQMLRTGNNFSFSYTFEDVPFHSSYAHSQSLDRLMNPLIDQYLYYLSRTQSTGGTAGTQQLLFSQAGPSNMSAQARNWLPGPCYRQQRVSTTLSQNNNSNFAWTGATKYHLNGRDSLVNPGVAMATNKDDEDRFFPSSGILMFGKQGAGKDNVDYSNVMLTSEEEIKTTNPVATEQYGVVADNLQQQNTAPIVGAVNSQGALPGMVWQNRDVYLQGPIWAKIPHTDGNFHPSPLMGGFGLKHPPPQILIKSTPVPADPPTAFNQAKLNSFITQYSTGQVSVEIEWELQKENSKRWNPEIQYTSNYYKSTNVDFAVNTEGVYSEPRPIGTRYLTRNL

SEQ ID NO: 487 - DNA, 2217 bp, Artificial Sequence
  Description of Artificial Sequence: Synthetic polynucleotide
atggctgctgacggttatcttccagattggctcgaggacaacctctctgagggcattcgcgagtggtgggacctgaaacctggagcccccaagcccaaggccaaccagcagaagcaggacgacggccggggtctggtgcttcctggctacaagtacctcggacccttcaacggactcgacaagggggagcccgtcaacgcggcggacgcagcggccctcgagcacgacaaggcctacgaccagcagctcaaagcgggtgacaatccgtacctgcggtataaccacgccgacgccgagtttcaggagcgtctgcaagaagatacgtcttttgggggcaacctcgggcgagcagtcttccaggccaagaagcgggttctcgaacctctcggtctggttgaggaagctgctaagacggctcctggaaagaagagaccggtagaaccgtcacctcagcgttcccccgactcctccacgggcatcggcaagaaaggccagcagcccgctagaaagagactgaactttgggcagactggcgactcagagtcagtccccgaccctcaaccaatcggagaaccaccagcaggcccctctggtctgggatctggtacaatggctgcaggcggtggcgcaccaatggctgacaataacgagggcgccgacggagtgggtaatgcctcaggaaattggcattgcgattccacatggctgggcgacagagtcatcaccaccagcacccgaacctgggctttgcccacctacaacaaccacctctacaagcaaatctccagtcagtcagcaggtagcaccaacgacaacgtctacttcggctacagcaccccctgggggtattttgacttcaacagattccactgtcacttctcaccacgtgactggcagcggctcatcaacaacaactggggattccggcccaagaagctcaacttcaagctgttcaacatccaggtcaaggaggtcacaacgaatgacggcgtcacgaccatcgccaataaccctaccagcacggttcaggtcttttcggactcggaataccagctgccctacgtcctcggctccgcacaccagggctgcctgcctccgttcccggcggacgtcttcatgattccccagtacggctacctgactctgaacaatggcagccaatcggtgggtcgttcctctttctactgcctggaatatttcccttctcaaatgctgagaacgggcaacaacttcaccttcagctacaccttcgaggacgttcccttccacagcagctacgcacacagccagagcctggaccggctgatgaatcctcttatcgaccagtacctgtattacctggccagaacacagagcaacgcaggaggcacagctggcaatcgggaactgcagttttatcagggcgggcctaccaccatggccgaacaagccaaaaactggctgcctggaccctgctacagacagcagcgcgtctccacgacactgtcgcaaaacaacaacagcaactttgcctggactggtgccaccaagtatcatctgaacggcagagactctctggtgaatccgggcgtcgccatggcaaccaacaaggacgacgaggaccgcttcttcccatccagcggcatcctcatgtttggcaagcagggagctggaaaagacaacgtggactatagcaacgtgatgctaaccagcgaggaagaaatcaagaccaccaaccccgtggccacagaacagtatggcgtggtggctgataacctacagcagcaaaacaccgctcctattgtgggggccgtcaacagccagggagccttacctggcatggtctggcagaaccgggacgtgtacctgcagggtcctatttgggccaagattcctcacacagatggcaactttcacccgtctcctttaatgggcggctttggacttaaacatccgcctcctcagatcctcatcaaaaacactcctgttcctgcggatcctccaacagcgttcaaccaggccaagctgaattctttcatcacgcagtacagcaccggacaagtcagcgtggagatcgagtgggagctgcagaaggagaacagcaagcgctggaacccagagattcagtatacttccaactactacaaatctacaaatgtggactttgctgttaatactgagggtgtttactctgagcctcgccccattggcactcgttacctcacccgtaatctgtaa

SEQ ID NO: 488 - protein, 738 aa, Artificial Sequence
  Description of Artificial Sequence: Synthetic polypeptide
MAADGYLPDWLEDNLSEGIREWWDLKPGAPKPKANQQKQDDGRGLVLPGYKYLGPFNGLDKGEPVNAADAAALEHDKAYDQQLKAGDNPYLRYNHADAEFQERLQEDTSFGGNLGRAVFQAKKRVLEPLGLVEEAAKTAPGKKRPVEPSPQRSPDSSTGIGKKGQQPARKRLNFGQTGDSESVPDPQPIGEPPAGPSGLGSGTMAAGGGAPMADNNEGADGVGNASGNWHCDSTWLGDRVITTSTRTWALPTYNNHLYKQISSQSAGSTNDNVYFGYSTPWGYFDFNRFHCHFSPRDWQRLINNNWGFRPKKLNFKLFNIQVKEVTTNDGVTTIANNPTSTVQVFSDSEYQLPYVLGSAHQGCLPPFPADVFMIPQYGYLTLNNGSQSVGRSSFYCLEYFPSQMLRTGNNFTFSYTFEDVPFHSSYAHSQSLDRLMNPLIDQYLYYLARTQSNAGGTAGNRELQFYQGGPTTMAEQAKNWLPGPCYRQQRVSTTLSQNNNSNFAWTGATKYHLNGRDSLVNPGVAMATNKDDEDRFFPSSGILMFGKQGAGKDNVDYSNVMLTSEEEIKTTNPVATEQYGVVADNLQQQNTAPIVGAVNSQGALPGMVWQNRDVYLQGPIWAKIPHTDGNFHPSPLMGGFGLKHPPPQILIKNTPVPADPPTAFNQAKLNSFITQYSTGQVSVEIEWELQKENSKRWNPEIQYTSNYYKSTNVDFAVNTEGVYSEPRPIGTRYLTRNL

SEQ ID NO: 489 - DNA, 2208 bp, Artificial Sequence
  Description of Artificial Sequence: Synthetic polynucleotide
atggctgccgatggttatcttccagattggctcgaggacaacctctctgagggcattcacgagtggtgggacccgaaacctggagccccgaaacccaaagccaaccagcaaaagcaggacgacggccggggtctggtgcttcctggctacaagtacctcggacccttcaacggactcgacaagggggagcccgtcaacgcggcggacgcagcggccctcgagcacgacaaggcctacgaccagcagctcaaagcgggtgacaatccgtacctgcggtataatcacgccgacgccgagtttcaggagcgtctgcaagaagatacgtcttttgggggcaacctcgggcgagcagtcttccaggccaagaagcgggttctcgaacctctcggtctggttgaggaaggcgctaagacggctcctggaaagaagagaccggtagagccgtcaccacagcgttcccccgactcctccacgggcatcggcaagaaaggccagcagcccgccagaaagagactcaatttcggtcagactggcgactcagagtcagtccccgaccctcaacctatcggagaacctccagcagcgccctctagtgtgggatctggtacaatggctgcaggcggtggcgcaccaatggcagacaataacgaaggtgccgacggagtgggtagttcctcgggaaattggcattgcgattccacatggctgggcgacagagtcatcaccaccagcacccgaacctgggccctgcccacccacaacaaccacctctacaagcaaatctccaacgggacctcgggaggcagcaccaacgacaacgtctacttcggctacagcaccccctgggggtattttgacttcaacagattccactgtcacttctcaccacgtgaccggcagcgactcatcaacaacaactggggattccggcccaagagactcagcttcaagctcttcaacatccaggtcaaagaggtcacgcagaatgaaggcaccaagaccatcgccaataacctcaccagcaccatccaggtgtttacggactcggaataccagctgccgtacgtcctcggctctgcccaccagggctgcctgcctccgttcccggcggacgtcttcatgattcctcagtacggctacctgactctcaacaacggtagtcaggccgtgggacgttcctccttctactgcctggagtacttcccctctcagatgctgagaacgggcaacaacttttccttcagctacactttcgaggacgtgcctttccacagcagctacgcgcacagccagagtttggacaggctgatgaatcctctcatcgaccagtacctgtactacctgtcaagaacccagtctacggaaggcacagcgggaacccagcagttgctgttttctcaggccgggcctagcaacatgtcggctcaggccagaaactggctgcctggaccctgctacagacagcagcgcgtctccacgacactgtcgcaaaacaacaacagcaactttgcctggactggtgccaccaagtatcatctgaacggcagagactctctggtgaatccgggcgtcgccatggcaacccacaaggacgacgaggaacgcttcttcccttcgagcggagtcctgatttttggaaaaactggagcagctaataagactacactggaaaatgtgttaatgacaaatgaagaggaaattcgtcctaccaacccggtagccaccgaggaatacgggactgttagcagcaacctgcaggcggctaacactgcagcccagacacaagttgtcaacaaccagggagccttacctggtatggtctggcagaaccgggacgtgtacctgcagggtcccatctgggccaagattcctcacacggacggcaactttcacccgtctccgctgatgggcggctttggactgaagcatcctcagatcctgatcaaaaacactcctgttcctgctaatcccccggaggtgtttacgcctgccaagtttgcttctttcatcacacagtacagcaccggccaggtcagcgtggagatcgagtgggagctgcagaaggagaacagcaagcgctggaacccagagattcagtatacctccaattttgacaaacagactggtgtggactttgccgttgacagccagggtgtttattctgagcctcgccccattggtactcgttacctcacccgtaatctgtaa

SEQ ID NO: 490 - protein, 735 aa, Artificial Sequence
  Description of Artificial Sequence: Synthetic polypeptide
MAADGYLPDWLEDNLSEGIHEWWDPKPGAPKPKANQQKQDDGRGLVLPGYKYLGPFNGLDKGEPVNAADAAALEHDKAYDQQLKAGDNPYLRYNHADAEFQERLQEDTSFGGNLGRAVFQAKKRVLEPLGLVEEGAKTAPGKKRPVEPSPQRSPDSSTGIGKKGQQPARKRLNFGQTGDSESVPDPQPIGEPPAAPSSVGSGTMAAGGGAPMADNNEGADGVGSSSGNWHCDSTWLGDRVITTSTRTWALPTHNNHLYKQISNGTSGGSTNDNVYFGYSTPWGYFDFNRFHCHFSPRDRQRLINNNWGFRPKRLSFKLFNIQVKEVTQNEGTKTIANNLTSTIQVFTDSEYQLPYVLGSAHQGCLPPFPADVFMIPQYGYLTLNNGSQAVGRSSFYCLEYFPSQMLRTGNNFSFSYTFEDVPFHSSYAHSQSLDRLMNPLIDQYLYYLSRTQSTEGTAGTQQLLFSQAGPSNMSAQARNWLPGPCYRQQRVSTTLSQNNNSNFAWTGATKYHLNGRDSLVNPGVAMATHKDDEERFFPSSGVLIFGKTGAANKTTLENVLMTNEEEIRPTNPVATEEYGTVSSNLQAANTAAQTQVVNNQGALPGMVWQNRDVYLQGPIWAKIPHTDGNFHPSPLMGGFGLKHPQILIKNTPVPANPPEVFTPAKFASFITQYSTGQVSVEIEWELQKENSKRWNPEIQYTSNFDKQTGVDFAVDSQGVYSEPRPIGTRYLTRNL

SEQ ID NO: 491 - protein, 738 aa, Artificial Sequence
  Description of Artificial Sequence: Synthetic polypeptide
MAADGYLPDWLEDNLSEGIREWWDLKPGAPKPKANQQKQDDGRGLVLPGYKYLGPFNGLDKGEPVNAADAAALEHDKAYDQQLKAGDNPYLRYNHADAEFQERLQEDTSFGGNLGRAVFQAKKRVLEPLGLVEEGAKTAPGKKRPVEPSPQRSPDSSTGIGKKGQQPARKRLNFGQTGDSESVPDPQPIGEPPAAPSSVGSGTMAAGGGAPMADNNEGADGVGSSSGNWHCDSTWLGDRVITTSTRTWALPTYNNHLYKQISNGTSGGSTNDNTYFGYSTPWGYFDFNRFHCHFSPRDWQRPINNNWGFRPKRLSFKLFNIQVKEVTQNEGTKTIANNLTSTIQVFTDSEYQLPYVLGSAHQGCLPPFPADVFMIPQYGYLTLNNGSQAVGRSSFYCLEYFPSQMLRTGNNFSFSYPFEDVPFHSSYAHSQSLDRLMNPLIDQYLYYLSRTQSTGGTAGTQQLLFSQAGPSNMSAQARNWLPGPCYRQQRVSTTLSQNNNSNFAWTGATKYHLNGRDSLVNPGVAMATNKDDEDRFFPSSGILMFGKQGAGKDNVDYSNVMLTSEEEIKTTNPVATEQYGVVADNLQQQDTAPIVGAVNSQGALPGMVWQNRDVYLQGPIWAKIPHTDGNFHPSPLMGGFGLKHPPPQVLIKNTPVPADPPTAFNQAKLNSFITQYSTGQVSVEIEWELQKENSKRWNPEIQYTSNYYKSTNVDFAVNTEGVYSEPRPIGTRYLTRNL

SEQ ID NO: 492 - DNA, 2217 bp, Artificial Sequence
  Description of Artificial Sequence: Synthetic polynucleotide
atggctgccgatggttatcttccagattggctcgaggacaacctctctgagggcattcgcgagtggtgggacctgaaacctggagccccgaaacccaaggccaaccagcaaaagcaggacgacggccggggtctggtgcttcctggctacaagtacctcggacccttcaacggactcgacaagggggagcccgtcaacgcggcggacgcagcggccctcgagcacgacaaggcctacgaccagcagctcaaagcgggtgacaatccgtacctgcggtataatcacgccgacgccgagtttcaggagcgtctgcaagaagatacgtcttttgggggcaacctcgggcgagcagtcttccaggccaagaagcgggttctcgaacctctcggtctggttgaggaaggcgctaagacggctcctggaaagaagagaccggtagagccgtcaccacagcgttcccccgactcctccacgggcatcggcaagaaaggccagcagcccgccagaaagagactcaatttcggtcagactggcgactcagagtcagtccccgaccctcaacctatcggagaacctccagcagcgccctctagtgtgggatctggtacaatggctgcaggcggtggcgcaccaatggcagacaataacgaaggtgccgacggagtgggtagttcctcgggaaattggcattgcgattccacatggctgggcgacagagtcatcaccaccagcacccgaacctgggccctgcccacctacaacaaccacctctacaagcaaatctccaacgggacctcgggaggcagcaccaacgacaacacctactttggctacagcaccccctgggggtattttgactttaacagattccactgccacttctcaccacgtgactggcagcgacccatcaacaacaactggggattccggcccaagagactcagcttcaagctcttcaacatccaggtcaaagaggtcacgcagaatgaaggcaccaagaccatcgccaataacctcaccagcaccatccaggtgtttacggactcggaataccagctgccgtacgtcctcggctctgcccaccagggctgcctgcctccgttcccggcggacgtcttcatgattcctcagtacggctacctgactctcaacaacggtagtcaggccgtgggacgttcctccttctactgcctggagtacttcccctctcagatgctgagaacgggcaacaacttttccttcagctaccctttcgaggacgtgcctttccacagcagctacgcgcacagccagagtttggacaggctgatgaatcctctcatcgaccagtacctgtactacctgtcaagaacccagtctacgggaggcacagcgggaacccagcagttgctgttttctcaggccgggcctagcaacatgtcggctcaggccagaaactggctgcctggaccctgctacagacagcagcgcgtctccacgacactgtcgcaaaacaacaacagcaactttgcctggactggtgccaccaagtatcatctgaacggcagagactctctggtgaatccgggcgtcgccatggcaaccaacaaggacgacgaggaccgcttcttcccatccagcggcatcctcatgtttggcaagcagggagctggaaaagacaacgtggactatagcaacgtgatgctaaccagcgaggaagaaatcaagaccaccaaccccgtggccacagaacagtatggcgtggtggctgataacctacagcagcaagacaccgctcctattgtgggggccgtcaacagccagggagccttacctggcatggtctggcagaaccgggacgtgtacctgcagggtcctatttgggccaagattcctcacacagatggcaactttcacccgtctcctttaatgggcggctttggacttaaacatccgcctcctcaggtcctcatcaaaaacactcctgttcctgcggatcctccaacagcgttcaaccaggccaagctgaattctttcatcacgcagtacagcaccggacaagtcagcgtggagatcgagtgggagctgcagaaggagaacagcaagcgctggaacccagagattcagtatacttccaactactacaaatctacaaatgtggactttgctgttaatactgagggtgtttactctgagcctcgccccattggcactcgttacctcacccgtaatctgtaa

SEQ ID NO: 493 - DNA, 2214 bp, Artificial Sequence
  Description of Artificial Sequence: Synthetic polynucleotide
atggctgctgacggttatcttccagattggctcgaggacaacctctctgagggcattcgcgagtggtgggacctgaaacctggagcccccaagcccaaggccaaccagcagaagcaggacgacggccggggtctggtgcttcctggctacaagtacctcggacccttcaacggactcgacaagggggagcccgtcaacgcggcggacgcagcggccctcgagcacgacaaggcctacgaccagcagctcaaagcgggtgacaatccgtacctgcggtataaccacgccgacgccgagttccaggagcgtctgcaagaagatacgtcttttgggggcaacctcgggcgagcagtcttccaggccaagaagcgggttctcgaacctctcggtctggctgaggaagctgctaagacggctcctggaaagaagagaccggtagaaccgtcacctcagcgttcccccgactcctccacgggcatcggcaagaaaggccagcagcccgctagaaagagactgaactttgggcagactggcgactcagagtcagtccccgaccctcaaccaatcggagagccaccagcaggcccctctggtctgggatctggtacaatggctgcaggcggtggcgcaccaatggctgacaataacaagggcgccgacggagtgggtaatgcctcaggaaattggcattgcgattccacatggctgggcgacagagtcatcaccaccagcacccgaacctgggctttgcccacctacaacaaccacctctacaagcaaatctccagtcagtcagcaggtagcaccaacgacaacgtctacttcggctacagcaccccctgggggtattttgacttcaacagattccactgtcacttctcaccacgtgactggcagcggctcatcaacaacaactggggattccggcccaagaagctcaacttcaagctgttcaacatccaggtcaaggaggtcacaacgggtgacggcgtcacgaccatcgccaataaccttaccagcacggttcaggtcttttcggactcggaataccagctgccctacgtcctcggctccgcacaccagggctgcctgcctccgttcccggcggacgtcttcatgattccccagtacggctacctgactctgaacaatgacagccaatcggtgggtcgttcctctttctactgcctggaatatttcccttctcaaatgctgagaacgggcaacaacttcaccttcagctacaccttcgaggacgttcccttccacagcagctacgcacacagccagagcctggaccggctgatgaatcctcttatcgaccagtacctgtattacctggccagaacacagagcaacgcaggaggcacagctggcaatcgggaactgcagttttatcagggcgggcctaccaccatggccgaacaagccaaaaactggctgcctggaccttgcttccggcaacaaagagtctccaagacgctggatcaaaacaacaacagcaactttgcttggactggtgccaccaaataccatctaaatggaagaaattcattggttaatcccggtgtcgccatggcaacccacaaggacgacgaggaacgcttcttcccttcgagcggagtcctgatttttggaaaaactggagcagctaataagactacactggaaaatgtgttaatgacaaatgaagaggaaattcgtcctaccaacccggtagccaccgaggaatacgggactgttagcagcaacctgcaggcggctaacactgcagcccagacacaagttgtcaacaaccagggagccttacctggtatggtctggcagaaccgggacgtgtacctgcagggtcccatctgggccaagattcctcacacggacggcaactttcacccgtctccgctgatgggcggctttggactgaagcatccgcctcctcagatcctgatcaaaaacactcctgttcctgctaatcccccggaggtgtttacgcctgccaagtttgcttctttcatcacacagtacagcaccggccaggtcagcgtggagatcgagtgggagctgcagaaggagaacagcaagcgctggaacccagagattcagtatacctccaattttgacaaacagactggtgtggactttgccgttgacagccagggtgtttattctgagcctcgccccattggtactcgttacctcacccgtaatctgtaa

SEQ ID NO: 494 - protein, 737 aa, Artificial Sequence
  Description of Artificial Sequence: Synthetic polypeptide
MAADGYLPDWLEDNLSEGIREWWDLKPGAPKPKANQQKQDDGRGLVLPGYKYLGPFNGLDKGEPVNAADAAALEHDKAYDQQLKAGDNPYLRYNHADAEFQERLQEDTSFGGNLGRAVFQAKKRVLEPLGLAEEAAKTAPGKKRPVEPSPQRSPDSSTGIGKKGQQPARKRLNFGQTGDSESVPDPQPIGEPPAGPSGLGSGTMAAGGGAPMADNNKGADGVGNASGNWHCDSTWLGDRVITTSTRTWALPTYNNHLYKQISSQSAGSTNDNVYFGYSTPWGYFDFNRFHCHFSPRDWQRLINNNWGFRPKKLNFKLFNIQVKEVTTGDGVTTIANNLTSTVQVFSDSEYQLPYVLGSAHQGCLPPFPADVFMIPQYGYLTLNNDSQSVGRSSFYCLEYFPSQMLRTGNNFTFSYTFEDVPFHSSYAHSQSLDRLMNPLIDQYLYYLARTQSNAGGTAGNRELQFYQGGPTTMAEQAKNWLPGPCFRQQRVSKTLDQNNNSNFAWTGATKYHLNGRNSLVNPGVAMATHKDDEERFFPSSGVLIFGKTGAANKTTLENVLMTNEEEIRPTNPVATEEYGTVSSNLQAANTAAQTQVVNNQGALPGMVWQNRDVYLQGPIWAKIPHTDGNFHPSPLMGGFGLKHPPPQILIKNTPVPANPPEVFTPAKFASFITQYSTGQVSVEIEWELQKENSKRWNPEIQYTSNFDKQTGVDFAVDSQGVYSEPRPIGTRYLTRNL

SEQ ID NO: 495 - DNA, 2217 bp, Artificial Sequence
  Description of Artificial Sequence: Synthetic polynucleotide
atggctgccgatggttatcttccagattggctcgaggacaacctctctgagggcattcgcgagtggtgggacctgaaacctggagccccgaaacccaaagccaaccagcaaaagcaggacgacggccggggtctggtgcttcctggctacaagtacctcggacccttcaacggactcgacaagggggagcccgtcaacgcggcggacgcagcggccctcgagcacgacaaggcctacgaccagcagctcaaagcgggtgacaatccgtacctgcggtataatcacgccgacgccgagtttcaggagcgtctgcaagaagatacgtcttttgggggcaacctcgggcgagcagtcttccaggccaagaagcgggttctcgaacctctcggtctggttgaggaaggcgctaagacggctcctggaaagaagagaccggtagagccgtcaccacagcgttcccccgactcctccacgggcatcggcaagaaaggccagcagcccgccagaaagagactcaatttcggtcagactggcgactcagagtcagtccccgaccctcaacctatcggagaacctccagcagcgccctctagtgtgggatctggtacaatggctgcaggcggtggcgcaccaatggcagacaataacgaaggtgccgacggagtgggtagttcctcgggaaattggcattgcgattccacatggctgggcgacagagtcatcaccaccagcacccgaacctgggccctgcccacctacaacaaccacctctacaagcaaatctccaacgggacctcgggaggcagcaccaacgacaacacctactttggctacagcaccccctgggggtattttgactttaacagattccactgccacttctcaccacgtgactggcagcgactcatcaacaacaactggggattccggcccaagagactcagcttcaagctcttcaacatccaggtcaaagaggtcacgcagaatgaaggcaccaagaccatcgccaataacctcaccagcaccatccaggtgtttacggactcggaataccagctgccgtacgtcctcggctctgcccaccagggctgcctgcctccgttcccggcggacgtcttcatgattcctcagtacggctacctgactctcaacaacggtagtcaggccgtgggacgttcctccttctactgcctggagtacttcccctctcagatgctgagaacgggcaacaacttttccttcagctacactttcgaggacgtgcctttccacagcagctacgcgcacagccagagtttggacaggctgatgaatcctctcatcgaccagtacctgtactacctgtcaagaacccagtctacgggaggcacagcgggaacccagcagttgctgttttctcaggccgggcctagcaacatgtcggctcaggccagaaactggctgcctggaccctgctacagacagcagcgcgtctccacgacactgtcgcaaaacaacaacagcaactttgcctggactggtgccaccaagtatcatctgaacggcagagactctctggtgaatccgggcgtcgccatggcaaccaacaaggacgacgaggaccgcttcttcccatccagcggcatcctcatgtttggcaagcagggagctggaaaagacaacgtggactatagcaacgtgatgctaaccagcgaggaagaaatcaagaccaccaaccccgtggccacagaacagtatggcgtggtggctgataacctacagcagcaaaacaccgctcctattgtgggggccgtcaacagccagggagccttacctggcatggtctggcagaaccgggacgtgtacctgcagggtcctatttgggccaagattcctcacacagatggcaactttcacccgtctcctttaatgggcggctttggacttaaacatccgcctcctcagatcctcatcaaaaacactcctgttcctgcggatcctccaacagcgttcaaccaggccaagctgaattctttcatcacgcagtacagcaccggacaagtcagcgtggagatcgtgtgggagctgcagaaggagaacagcaagcgcaggaacccagagattcagtatacttccaactactacaaatctacaaatgtggactttgctgttaatactgagggtgtttactctgagcctcgccccattggcactcgttacctcacccgtaatctgtaa

SEQ ID NO: 496 - protein, 738 aa, Artificial Sequence
  Description of Artificial Sequence: Synthetic polypeptide
MAADGYLPDWLEDNLSEGIREWWDLKPGAPKPKANQQKQDDGRGLVLPGYKYLGPFNGLDKGEPVNAADAAALEHDKAYDQQLKAGDNPYLRYNHADAEFQERLQEDTSFGGNLGRAVFQAKKRVLEPLGLVEEGAKTAPGKKRPVEPSPQRSPDSSTGIGKKGQQPARKRLNFGQTGDSESVPDPQPIGEPPAAPSSVGSGTMAAGGGAPMADNNEGADGVGSSSGNWHCDSTWLGDRVITTSTRTWALPTYNNHLYKQISNGTSGGSTNDNTYFGYSTPWGYFDFNRFHCHFSPRDWQRLINNNWGFRPKRLSFKLFNIQVKEVTQNEGTKTIANNLTSTIQVFTDSEYQLPYVLGSAHQGCLPPFPADVFMIPQYGYLTLNNGSQAVGRSSFYCLEYFPSQMLRTGNNFSFSYTFEDVPFHSSYAHSQSLDRLMNPLIDQYLYYLSRTQSTGGTAGTQQLLFSQAGPSNMSAQARNWLPGPCYRQQRVSTTLSQNNNSNFAWTGATKYHLNGRDSLVNPGVAMATNKDDEDRFFPSSGILMFGKQGAGKDNVDYSNVMLTSEEEIKTTNPVATEQYGVVADNLQQQNTAPIVGAVNSQGALPGMVWQNRDVYLQGPIWAKIPHTDGNFHPSPLMGGFGLKHPPPQILIKNTPVPADPPTAFNQAKLNSFITQYSTGQVSVEIVWELQKENSKRRNPEIQYTSNYYKSTNVDFAVNTEGVYSEPRPIGTRYLTRNL

SEQ ID NO: 497 - protein, 738 aa, Artificial Sequence
  Description of Artificial Sequence: Synthetic polypeptide
MAADGYLPDWLEDNLSEGIREWWDLKPGAPKPKANQQKQDDGRGLVLPGYKYLGPFNGLDKGEPVNAADAAALEHDKAYDQQLKAGDNPYLRYNHADAEFQERLQEDTSFGGNLGRAVFQAKKRVLEPLGLVEEGAKTAPGKKRPVEPSPQRSPDSSTGIGKKGQQPARKRLNFGQTGDSESVPDPQPIGEPPAAPSSVGSGTMAAGGGAPMADNNEGADGVGSSSGNWHCDSTWLGDRVITTSTRTWALPTYNNHLYKQISNGTSGGSTNDNTYFGYSTPWGYFDFNRFHCHFSPRDWQRLINNNWGFRPKRLSFKLFNIQVKEVTQNEGTKTIANNLTSTIQVFTDSEYQLPYVLGSAHQGCLPPFPADVFMIPQYGYLTLNNGSQAVGRSSFYCLEYFPSQMLRTGNNFSFSYTFEDVPFHSSYAHSQSLDRLMNPLIDQYLYYLSRTQSTGGTAGTQQLLFSQAGPSNMSAQARNWLPGPCYRQQRVSTTLSQNNNSNFAWTGATKYHLNGRDSLVNPGVAMATNKDDEDRFFPSSGILMFGKQGAGKDNVDYSNVMLTSEEEIKTTNPVATEQYGVVADNLQQQNTAPIVGAVNSQGALPGMVWQNRDVYLQGPIWAKIPHTDGNFHPSPLMGGFGLKHPPPQILIKNTPVPADPPTAFNQAKLNSFITQYSTGQVSVEIEWELQKENSKRWNPEIQYTSNYYKSTNVDFAVNTEGVYSEPRPIGTRYLTRNL

SEQ ID NO: 498 - protein, 738 aa, Artificial Sequence
  Description of Artificial Sequence: Synthetic polypeptide
MAADGYLPDWLEDNLSEGIREWWDLKPGAPKPKANQQKQDDGRGLVLPGYKYLGPFNGLDKGEPVNAADAAALEHDKAYDQQLKAGDNPYLRYNHADAEFQERLQEDTSFGGNLGRAVFQAKKRVLEPLGLVEEGAKTAPGKKRPVEPSPQRSPDSSTGIGKKGQQPARKRLNFGQTGDSESVPDPQPIGEPPAAPSSVGSGTMAAGGGAPMADNNEGADGVGSSSGNWHCDSTWLGDRVITTSTRTWALPTYNNHLYKQISNGTSGGSTNDNTYFGYSTPWGYFDFNRFHCHFSPRDWQRLINNNWGFRPKRLSFKLFNIQVKEVTQNEGTKTIANNLTSTIQVFTDSEYQLPYVLGSAHQGCLPPFPADVFMIPQYGYLTLNNGSQAVGRSSFYCLEYFPSQMLRTGNNFSFSYTFEDVPFHSSYAHSQSLDRLMNPLIDQYLYYLSRTQSTGGTAGTQQLLFSQAGPSNMSAQARNWLPGPCYRQQRVSTTLSQNNNSNFAWTGATKYHLNGRDSLVNPGVAMATNKDDEDRFFPSSGILMFGKQGAGKDNVDYSNVMLTSEEEIKTTNPVATEQYGVVADNLQQQNTAPIVGAVNSQGALPGMVWQNRDVYLQGPIWAKIPHTDGNFHPSPLMGGFGLKHPPPQILIKNTPVPADPPTAFNQAKLNSFITQYSTGQVSVEIVWELQKENSKRWNPEIQYTSNYYKSTNVDFAVNTEGVYSEPRPIGTRYLTRNL

SEQ ID NO: 499 - protein, 738 aa, Artificial Sequence; identical to SEQ ID NO: 497
  Description of Artificial Sequence: Synthetic polypeptide

SEQ ID NO: 500 - DNA, 2214 bp, Artificial Sequence
  Description of Artificial Sequence: Synthetic polynucleotide
atggctgctgacggttatcttccagattggctcgaggacaacctctctgagggcattcgcgagtggtgggacctgaaacctggagcccccaagcccaaggccaaccagcagaagcaggacgacggccggggtctggtgcttcctggctacaagtacctcggacccttcaacggactcgacaagggggagcccgtcaacgcggcggacgcagcggccctcgagcacgacaaggcctacgaccagcagctcaaagcgggtgacaatccgtacctgcggtataaccacgccgacgccgagtttcaggagcgtctgcaagaagatacgtcttttgggggcaacctcgggcgagcagtcttccaggccaagaagcgggttctcgaacctctcggtctggttgaggaagctgctaagacggctcctggaaagaagagaccggtagaaccgtcacctcagcgttcccccgactcctccacgggcatcggcaagaaaggccagcagcccgctagaaagagactgaactttgggcagactggcgactcagagtcagtccccgaccctcaaccaatcggagaaccaccagcaggcccctctggtctgggatctggtacaatggctgcaggcggtggcgctccaatggcagacaataacgaaggcgccgacggagtgggtaatgcctcaggaaattggcattgcgattccacatggctgggcgacagagtcatcaccaccagcacccgaacctgggctttgcccacctacaacaaccacctctacaagcaaatctccagtcagtcagcaggtagcaccaacgacaacgtctacttcggctacagcaccccctgggggtattttgacttcaacagattccactgtcacttctcaccacgtgactggcagcggctcatcaacaacaactggggattccggcccaagaagctcaacttcaagctgttcaacatccaggtcaaggaggtcacaacgaatgacggcgtcacgaccatcgccaataaccttaccagcacggttcaggtcttttcggactcggaataccagctgccctacgtcctcggctccgcacaccagggctgcctgcctccgttcccggcggacgtcttcatgattccccagtacggctacctgactctgaacaatggcagccaatcggtgggtcgttcctctttctactgcctggaatatttcccttctcaaatgctgagaacgggcaacaacttcaccttcagctacaccttcgaggacgttcccttccacagcagctacgcacacagccagagcctggaccggctgatgaatcctcttatcgaccagtacctgtattacctggccagaacacagagcaacgcaggaggcacagctggcaatcgggaactgcagttttatcagggcgggcctaccaccatggccgaacaagccaaaaactggctgcctagaccttgcttccggcaacaaagagtctccaagacgctggatcaaaacaacaacagcaactttgcttggactggtgccaccaaataccatctaaatggaagaaattcattggttaatcccggtgtcgccatggcaacccacaaggacgacgaggaacgcttcttcccttcgagcggagtcctgatttttggaaaaactggagcagctaataagactacactggaaaatgtgttaatgacaaatgaagaggaaattcgtcctaccaacccggtagccaccgaggaatacgggactgttagcagcaacctgcaggcggctaacactgcagcccagacacaagttgtcaacaaccagggagccttacctggtatggtctggcagaaccgggacgtgtacctgcagggtcccatctgggccaagattcctcacacggacggcaactttcacccgtctccgctgatgggcggctttggactgaagcatccgcctcctcagatcctgatcaaaaacactcctgttcctgctaatcccccggaggtgtttacgcctgccaagtttgcttctttcatcacacagtacagcaccggccaggtcagcgtggagatcgagtgggagctgcagaaggagaacagcaagcgctggaacccagagattcagtatacctccaattttgacaaacagactggtgtggactttgccgttgacagccagggtgtttattctgagcctcgccccattggtactcgttacctcacccgtaatctgtaa

SEQ ID NO: 501 - protein, 737 aa, Artificial Sequence
  Description of Artificial Sequence: Synthetic polypeptide
MAADGYLPDWLEDNLSEGIREWWDLKPGAPKPKANQQKQDDGRGLVLPGYKYLGPFNGLDKGEPVNAADAAALEHDKAYDQQLKAGDNPYLRYNHADAEFQERLQEDTSFGGNLGRAVFQAKKRVLEPLGLVEEAAKTAPGKKRPVEPSPQRSPDSSTGIGKKGQQPARKRLNFGQTGDSESVPDPQPIGEPPAGPSGLGSGTMAAGGGAPMADNNEGADGVGNASGNWHCDSTWLGDRVITTSTRTWALPTYNNHLYKQISSQSAGSTNDNVYFGYSTPWGYFDFNRFHCHFSPRDWQRLINNNWGFRPKKLNFKLFNIQVKEVTTNDGVTTIANNLTSTVQVFSDSEYQLPYVLGSAHQGCLPPFPADVFMIPQYGYLTLNNGSQSVGRSSFYCLEYFPSQMLRTGNNFTFSYTFEDVPFHSSYAHSQSLDRLMNPLIDQYLYYLARTQSNAGGTAGNRELQFYQGGPTTMAEQAKNWLPRPCFRQQRVSKTLDQNNNSNFAWTGATKYHLNGRNSLVNPGVAMATHKDDEERFFPSSGVLIFGKTGAANKTTLENVLMTNEEEIRPTNPVATEEYGTVSSNLQAANTAAQTQVVNNQGALPGMVWQNRDVYLQGPIWAKIPHTDGNFHPSPLMGGFGLKHPPPQILIKNTPVPANPPEVFTPAKFASFITQYSTGQVSVEIEWELQKENSKRWNPEIQYTSNFDKQTGVDFAVDSQGVYSEPRPIGTRYLTRNL

SEQ ID NO: 502 - DNA, 2214 bp, Artificial Sequence
  Description of Artificial Sequence: Synthetic polynucleotide
atggctgctgacggttatcttccagattggctcgaggacaacctctctgagggcattcgcgagtggtgggacctgaaacctggagcccccaagcccaaggccaaccagcagaagcaggacgacggccggggtctggtgcttcctggctacaagtacctcggacccttcaacggactcgacaagggggagcccgtcaacgcggcggacgcagcggccctcgagcacgacaaggcctacgaccagcagctcaaagcgggtgacaatccgtacctgcggtataaccatgccgacgccgagtttcaggagcgtctgcaagaagatacgtcttttgggggcaacctcgggcgagcagtcctccaggccaagaagcgggttctcgaacctctcggtctggttgaggaagctgctaagacggctcctggaaagaagagaccggtagaaccgtcacctcagcgttcccccgactcctccacgggcatcggcaagaaaggccagcagcccgctagaaagagactgaactttgggcagactggcgactcagagtcagtccccgaccctcaaccaatcggagaaccaccagcaggcccctctggtctgggatctggtacaatggctgcaggcggtggcgctccaatggcagacaataacgaaggcgccgacggagtgggtaatgcctcaggaaattggcattgcgattccacatggctgggcgacagagtcatcaccaccagcacccgaacctgggctttgcccacctacaacaaccacctctacaagcaaatctccagtcagtcagcaggtagcaccaacgacaacgtctacttcggctacagcaccccctgggggtattttgacttcaacagattccactgtcacttctcaccacgtgactggcagcggctcatcaacaacaactggggattccggcccaagaagctcaacttcaagctgttcaacatccaggtcaaggaggtcacaacgaatgacggcgtcacgaccatcgccaataaccttaccagcacggttcaggtcttttcggactcggaataccagctgccctacgtcctcggctccgcacaccagggctgcctgcctccgttcccggcggacgtcttcatgattccccagtacggctacctgactctgaacaatggcagccaatcggtgggtcgttcctctttctactgcctggaatatttcccttctcaaatgctgagaacgggcaacaacttcaccttcagctacaccttcgaggacgttcccttccacagcagctacgcacacagccagagcctggaccggctgatgaatcctcttatcgaccagtacctgtattacctggccagaacacagagcaacgcaggaggcacagctggcaatcgggaactgcagttttatcagggcgggcctaccaccatggccgaacaagccaaaaactggctgcctggaccttgcttccggcaacaaagagtctccaagacgctggatcaaaacaacaacagcaactttgcttggactggtgccaccaaataccatctaaatggaagaaattcattggttaatcccggtgtcgccatggcaacccacaaggacgacgaggaacgcttcttcccttcgagcggagtcctgatttttggaaaaactggagcagctaataagactacactggaaaatgtgttaatgacaaatgaagaggaaattcgtcctaccaacccggtagccaccgaggaatacgggactgttagcagcaacctgcaggcggctaacactgcagcccagacacaagttgtcaacaaccagggagccttacctggtatggtctggcagaaccgggacgtgtacctgcagggtcccatctgggccaagattcctcacacggacggcaactttcacccgtctccgctgatgggcggctttggactgaagcatccgcctcctcagatcctgatcaaaaacactcctgttcctgctaatcccccggaggtgtttacgcctgccaagtttgcttctttcatcacacagtacagcaccggccaggtcagcgtggagatcgagtgggagctgcagaaggagaacagcaagcgctggaacccagagattcagtatacctccaattttgacaaacagactggtgtggactttgccgttgacagccagggtgtttattctgagcctcgccccattggtactcgttacctcacccgtaatctgtaa

SEQ ID NO: 503 - protein, 737 aa, Artificial Sequence; identical to SEQ ID NO: 462
  Description of Artificial Sequence: Synthetic polypeptide

SEQ ID NO: 504 - protein, 737 aa, Artificial Sequence
  Description of Artificial Sequence: Synthetic polypeptide
MAADGYLPDWLEDNLSEGIREWWDLKPGAPKPKANQQKQDDGRGLVLPGYKYLGPFNGLDKGEPVNAADAAALEHDKAYDQQLKAGDNPYLRYNHADAEFQERLQEDTSFGGNLGRAVLQAKKRVLEPLGLVEEAAKTAPGKKRPVEPSPQRSPDSSTGIGKKGQQPARKRLNFGQTGDSESVPDPQPIGEPPAGPSGLGSGTMAAGGGAPMADNNEGADGVGNASGNWHCDSTWLGDRVITTSTRTWALPTYNNHLYKQISSQSAGSTNDNVYFGYSTPWGYFDFNRFHCHFSPRDWQRLINNNWGFRPKKLNFKLFNIQVKEVTTNDGVTTIANNLTSTVQVFSDSEYQLPYVLGSAHQGCLPPFPADVFMIPQYGYLTLNNGSQSVGRSSFYCLEYFPSQMLRTGNNFTFSYTFEDVPFHSSYAHSQSLDRLMNPLIDQYLYYLARTQSNAGGTAGNRELQFYQGGPTTMAEQAKNWLPGPCFRQQRVSKTLDQNNNSNFAWTGATKYHLNGRNSLVNPGVAMATHKDDEERFFPSSGVLIFGKTGAANKTTLENVLMTNEEEIRPTNPVATEEYGTVSSNLQAANTAAQTQVVNNQGALPGMVWQNRDVYLQGPIWAKIPHTDGNFHPSPLMGGFGLKHPPPQILIKNTPVPANPPEVFTPAKFASFITQYSTGQVSVEIEWELQKENSKRWNPEIQYTSNFDKQTGVDFAVDSQGVYSEPRPIGTRYLTRNL

SEQ ID NO: 505 - DNA, 2217 bp, Artificial Sequence
  Description of Artificial Sequence: Synthetic polynucleotide
atggctgccgatggttatcttccagattggctcgaggacaacctctctgagggcattcgcgagtggtgggacctgaaacctggagccccgaaacccaaagccaaccagcaaaagcaggacgacggccggggtctggtgcttcctggctacaagtacctcggacccttcaacggactcgacaagggggagcccgtcaacgcggcggacgcagcggccctcgagcacgacaaggcctacgaccagcagctcaaagcgggtgacaatccgtacctgcggtataatcacgccgacgccgagtttcaggagcgtctgcaagaagatacgtcttttgggggcaacctcgggcgagcagtcttccaggccaagaagcgggttctcgaacctctcggtctggttgaggaaggcgctaagacggctcctggaaagaagagaccggtagagccgtcaccacagcgttcccccgactcctccacgggcatcggcaagaaaggccagcagcccgccagaaagagactcaatttcggtcagactggcgactcagagtcagtccccgaccctcaacctatcggagaacctccagcagcgccctctagtgtgggatctggtacaatggctgcaggcggtggcgcaccaatggcagacaataacgaaggtgccgacggagtgggtagttcctcgggaaattggcattgcgattccacatggctgggcgacagagtcatcaccaccagcacccgaacctgggccctgcccacctacaacaaccacctctacaagcaaatctccaacgggacctcgggaggcagcaccaacgacaacacctactttggctacagcaccccctgggggtattttgactttaacagattccactgccacttctcaccacgtgactggcagcgactcatcaacaacaactggggattccggcccaagagactcagcttcaagctcttcaacatccaggtcaaagaggtcacgcagaatgaaggcaccaagaccatcgccaataacctcaccagcaccatccaggtgtttacggactcggaataccagctgccgtacgtcctcggctctgcccaccagggctgcctgcctccgttcccggcggacgtcttcatgattcctcagtacggctacctgactctcaacaacggtagtcaggccgtgggacgttcctccttctactgcctggagtacttcccctctcagatgctgagaacgggcaacaacttttccttcagctacactttcgaggacgtgcctttccacagcagctacgcgcacagccagagtttggacaggctgatgaatcctctcatcgaccagtacctgtactacctgtcaagaacccagtctacgggaggcacagcgggaacccagcagttgctgttttctcaggccgggcctagcaacatgtcggctcaggccagaaactggctgcctggaccctgctacagacagcagcgcgtctccacgacactgtcgcaaaacaacaacagcaactttgcctggactggtgccaccaagtatcatctgaacggcagagactctctggtgaatccgggcgtcgccatggcaaccaacaaggacgacgaggaccgcttcttcccacccagcggcatcctcatgtttggcaagcagggagctggaaaagacaacgtggactatagcaacgtgatgctaaccagcgaggaagaaatcaagaccaccaaccccgtggccacagaacagtatggcgtggtggctgataacctacagcagcaaaacaccgctcctattgtgggggccgtcaacagccagggagccttacctggcatggtctggcagaaccgggacgtgtacctgcagggtcctatttgggccaagattcctcacacagatggcaactttcacccgtctcctttaatgggcggctttggacttaaacatccgcctcctcagatcctcatcaaaaacactcctgttcctgcggatcctccaacagcgttcaaccaggccaagctgaattctttcatcacgcagtacagcaccggacaagtcagcgtggtgatcgagtgggagctgcagaaggagaacagcaagcgctggaacccagagattcagtatacttccaactactacaaatctacaaatgtggactttgctgttaatactgagggtgtttactctgagcttcgccccattggcactcgttacctcacccgtaatctgtaa

SEQ ID NO: 506 - protein, 738 aa, Artificial Sequence
  Description of Artificial Sequence: Synthetic polypeptide
MAADGYLPDWLEDNLSEGIREWWDLKPGAPKPKANQQKQDDGRGLVLPGYKYLGPFNGLDKGEPVNAADAAALEHDKAYDQQLKAGDNPYLRYNHADAEFQERLQEDTSFGGNLGRAVFQAKKRVLEPLGLVEEGAKTAPGKKRPVEPSPQRSPDSSTGIGKKGQQPARKRLNFGQTGDSESVPDPQPIGEPPAAPSSVGSGTMAAGGGAPMADNNEGADGVGSSSGNWHCDSTWLGDRVITTSTRTWALPTYNNHLYKQISNGTSGGSTNDNTYFGYSTPWGYFDFNRFHCHFSPRDWQRLINNNWGFRPKRLSFKLFNIQVKEVTQNEGTKTIANNLTSTIQVFTDSEYQLPYVLGSAHQGCLPPFPADVFMIPQYGYLTLNNGSQAVGRSSFYCLEYFPSQMLRTGNNFSFSYTFEDVPFHSSYAHSQSLDRLMNPLIDQYLYYLSRTQSTGGTAGTQQLLFSQAGPSNMSAQARNWLPGPCYRQQRVSTTLSQNNNSNFAWTGATKYHLNGRDSLVNPGVAMATNKDDEDRFFPPSGILMFGKQGAGKDNVDYSNVMLTSEEEIKTTNPVATEQYGVVADNLQQQNTAPIVGAVNSQGALPGMVWQNRDVYLQGPIWAKIPHTDGNFHPSPLMGGFGLKHPPPQILIKNTPVPADPPTAFNQAKLNSFITQYSTGQVSVVIEWELQKENSKRWNPEIQYTSNYYKSTNVDFAVNTEGVYSELRPIGTRYLTRNL

SEQ ID NO: 507 - DNA, 2214 bp, Artificial Sequence
  Description of Artificial Sequence: Synthetic polynucleotide
atggctgctgacggttatcttccagattggctcgaggacaacctctctgagggcattcgcgagtggtgggacctgaaacctggagcccccaagcccaaggccaaccagcagaagcaggacgacggccggggtctggtgcttcctggctacaagtacctcggacccttcaacggactcgacaagggggagcccgtcaacgcggcggacgcagcggccctcgagcacgacaaggcctacgaccagcagctcaaagcgggtgacaatccgtacctgcggtataaccacgccgacgccgagtttcaggagcgtctgcaagaagatacgtcttttgggggcaacctcgggcgagcagtcttccaggccaagaagcgggttctcgaacctctcggtctggttgaggaagctgctaagacggctcctggaaagaagagaccggtagaaccgtcacctcagcgttcccccgactcctccacgggcatcggcaagaaaggccagcagcccgctagaaagagactgaactttgggcagactggcgactcagagtcagtccccgaccctcaaccaatcggagaaccaccagcaggcccctctggtctgggatctggtacaatggctgcaggcggtggcgccccaatggcagacaataacgaaggcgccgacggagtgggtaatgcctcaggaaattggcattgcgattccacatggctgggcgacagagtcatcaccaccagcacccgaacctgggctttgcccacctacaacaaccacctctacaagcaaatctccagtcagtcagcaggtagcaccaacgacaacgtctacttcggctacagcaccccctgggggtattttgacttcaacagattccactgtcacttctcaccacgtgactggcagcggctcatcaacaacaactggggattccggcccaagaagctcaacttcaagctgttcaacatccaggtcaaggaggtcacaacgaatgacggcgtcacgaccatcgccaataaccttaccagcacggttcaggtcttttcggactcggaataccagctgccctacgtcctcggctccgcacaccagggctgcctgcctccgttcccggcggacgtcttcatgattccccagtacggctacctgactctgaacaatggcagccaatcggtgggtcgttcctctttctactgcctggaatatttcccttctcaaatgctgagaacgggcaacaacttcaccatcagctacaccttcgaggacgttcccttccacagcagctacgcacacagccagagcctggaccggctgatgaatcctcttatcgaccagtacctgtattacctggccagaacacagagcaacgcaggaggcacagctggcaatcaggaactgcagttttatcagggcgggcctaccaccatggccgaacaagccaaaaactggctgcctggaccttgcttccggcaacaaagagtctccaagacgctggatcaaaacaacaacagcaactttgcttggactggtgccaccaaataccatctaaatggaagaaattcattggttaatcccggtgtcgccatggcaacccacaaggacgacgaggaacgcttcttcccttcgagcggagtcctgatttttggaaaaactggagcagctaataagactacactggaaaatgtgttaatgacaaatgaagaggaaattcgtcctaccaacccggtagccaccgaggaatacgggactgttagcagcaacctgcaggcggctaacactgcagcccagacacaagttgtcaacaaccagggagccttacctggtatggtctggcagaaccgggacgtgtacctgcagggtcccatctgggccaagattcctcacacagatggcaactttcacccgtctcctttaatgggcggctttggacttaaacatccgcctcctcagatcctcatcaaaaacactcctgttcctgcggatcctccaacagcgttcaaccaggccaagctgaattctttcatcacgcagtacagcaccggacaagtcagcgtggagatcgagtgggagctgcagaaggagaacagcaagcgctggaacccagagattcagtatacttccaactactacaaatctacaaatgtggactttgctgttaatactgagggtgtttactctgagcctcgccccattggcactcgttacctcacccgtaatctgtaa

SEQ ID NO: 508 - protein, 737 aa, Artificial Sequence
  Description of Artificial Sequence: Synthetic polypeptide
MAADGYLPDWLEDNLSEGIREWWDLKPGAPKPKANQQKQDDGRGLVLPGYKYLGPFNGLDKGEPVNAADAAALEHDKAYDQQLKAGDNPYLRYNHADAEFQERLQEDTSFGGNLGRAVFQAKKRVLEPLGLVEEAAKTAPGKKRPVEPSPQRSPDSSTGIGKKGQQPARKRLNFGQTGDSESVPDPQPIGEPPAGPSGLGSGTMAAGGGAPMADNNEGADGVGNASGNWHCDSTWLGDRVITTSTRTWALPTYNNHLYKQISSQSAGSTNDNVYFGYSTPWGYFDFNRFHCHFSPRDWQRLINNNWGFRPKKLNFKLFNIQVKEVTTNDGVTTIANNLTSTVQVFSDSEYQLPYVLGSAHQGCLPPFPADVFMIPQYGYLTLNNGSQSVGRSSFYCLEYFPSQMLRTGNNFTISYTFEDVPFHSSYAHSQSLDRLMNPLIDQYLYYLARTQSNAGGTAGNQELQFYQGGPTTMAEQAKNWLPGPCFRQQRVSKTLDQNNNSNFAWTGATKYHLNGRNSLVNPGVAMATHKDDEERFFPSSGVLIFGKTGAANKTTLENVLMTNEEEIRPTNPVATEEYGTVSSNLQAANTAAQTQVVNNQGALPGMVWQNRDVYLQGPIWAKIPHTDGNFHPSPLMGGFGLKHPPPQILIKNTPVPADPPTAFNQAKLNSFITQYSTGQVSVEIEWELQKENSKRWNPEIQYTSNYYKSTNVDFAVNTEGVYSEPRPIGTRYLTRNL

SEQ ID NO: 509 - DNA, 2217 bp, Artificial Sequence
  Description of Artificial Sequence: Synthetic polynucleotide
atggctgccgatggttatcttccagattggctcgaggacaacctctctgagggcattcgcgagtggtgggacctgaaacctggagccccgaaacccaaagccaaccagcaaaagcaggacgacggccggggtctggtgcttcctggctacaagtacctcggacccttcaacggactcgacaagggggagcccgtcaacgcggcggacgcagcggccctcgagcacgacaaggcctacgaccagcagctcaaagcgggtgacaatccgtacctgcggtataatcacgccgacgccgagtttcaggagcgtctgcaagaagatacgtcttttgggggcaacctcgggcgagcagtcttccaggccaagaagcgggttctcgaacctctcggtctggttgaggaaggcgctaagacggctcctggaaagaagagaccggtagagccgtcaccacagcgttcccccgactcctccacgggcatcggcaagaaaggccagcagcccgccagaaagagactcaatttcggtcagactggcgactcagagtcagtccccgaccctcaacctatcggagaacctccagcagcgccctctagtgtgggatctggtacaatggctgcaggcggtggcgcaccaatggcagacaataacgaaggtgccgacggagtgggtagttcctcgggaaattggcattgcgattccacatggctgggcgacagagtcatcaccaccagcacccgaacctgggccctgcccgcctacaacaaccacctctacaagcaaatctccaacgggacctcgggaggcagcaccaacgacaacacctactttggctacagcaccccctgggggtattttgactttaacagattccactgccacttctcaccacgtgactggcagcgactcatcaacaacaactggggattccggcccaagagactcagcttcaagctcttcaacatccaggtcaaagaggtcacgcagaatgaaggcaccaagaccatcgccaataacctcaccagcaccatccaggtgtttacggactcggaataccagctgccgtacgtcctcggctctgcccaccagggctgcctgcctccgttcccggcggatgtcttcatgattcctcagtacggctacctgactctcaacaacggtagtcaggccgtgggacgttcctccttctactgcctggagtacttcccctctcagatgctgagaacgggcaacaacttttccttcagctacactttcgaggacgtgcctttccacagcagctacgcgcacagccagagtttggacaggctgatgaatcctctcatcgaccagtacctgtactacctgtcaagaacccagtctacgggaggcacagcgggaacccagcagttgctgttttctcaggccgggcctagcaacatgtcggctcaggccagaaactggctgcctggaccctgctacagacagcagcgcgtctccacgacactgtcgcaaaacaacaacagcaactttgcctggactggtgccaccaagtatcatctgagcggcagagactctctggtgaatccgggcgtcgccatggcaaccaacaaggacgacgaggaccgcttcttcccatccagcggcatcctcatgtttggcaagcagggagctggaaaagacaacgtggactatagcaacgtgatgctaaccagcgaggaagaaatcaagaccaccaaccccgtggccacagaacagtatggcgtggtggctgataacctacagcagcaaaacaccgctcctattgtgggggccgtcaacagccagggagccttacctggcatggtctggcagaaccgggacgtgtacctgcagggtcctatttgggccaagattcctcacacagatggcaactttcacccgtctcctttaatgggcggctttggacttaaacatccgcctcctcagatcctcatcaaaaacactcctgttcctgcggatcctccaacagcgttcaaccaggccaagctgaattcttccatcacgcagtacagcaccggacaagtcagcgtggagatcgagtgggagctgcagaaggagaacagcaagcgctggaacccagagattcagtatacttccaactactacaaatctacaaatgtggactttgctgttaatactgagggtgtttactctgagcctcgccccattggcactcgttacctcacccgtaatttgtaa

SEQ ID NO: 510 - protein, 738 aa, Artificial Sequence
  Description of Artificial Sequence: Synthetic polypeptide
MAADGYLPDWLEDNLSEGIREWWDLKPGAPKPKANQQKQDDGRGLVLPGYKYLGPFNGLDKGEPVNAADAAALEHDKAYDQQLKAGDNPYLRYNHADAEFQERLQEDTSFGGNLGRAVFQAKKRVLEPLGLVEEGAKTAPGKKRPVEPSPQRSPDSSTGIGKKGQQPARKRLNFGQTGDSESVPDPQPIGEPPAAPSSVGSGTMAAGGGAPMADNNEGADGVGSSSGNWHCDSTWLGDRVITTSTRTWALPAYNNHLYKQISNGTSGGSTNDNTYFGYSTPWGYFDFNRFHCHFSPRDWQRLINNNWGFRPKRLSFKLFNIQVKEVTQNEGTKTIANNLTSTIQVFTDSEYQLPYVLGSAHQGCLPPFPADVFMIPQYGYLTLNNGSQAVGRSSFYCLEYFPSQMLRTGNNFSFSYTFEDVPFHSSYAHSQSLDRLMNPLIDQYLYYLSRTQSTGGTAGTQQLLFSQAGPSNMSAQARNWLPGPCYRQQRVSTTLSQNNNSNFAWTGATKYHLSGRDSLVNPGVAMATNKDDEDRFFPSSGILMFGKQGAGKDNVDYSNVMLTSEEEIKTTNPVATEQYGVVADNLQQQNTAPIVGAVNSQGALPGMVWQNRDVYLQGPIWAKIPHTDGNFHPSPLMGGFGLKHPPPQILIKNTPVPADPPTAFNQAKLNSSITQYSTGQVSVEIEWELQKENSKRWNPEIQYTSNYYKSTNVDFAVNTEGVYSEPRPIGTRYLTRNL

SEQ ID NO: 511 - protein, 736 aa, Artificial Sequence; identical to SEQ ID NO: 11
  Description of Artificial Sequence: Synthetic polypeptide

SEQ ID NO: 512 - DNA, 2217 bp, Artificial Sequence
  Description of Artificial Sequence: Synthetic polynucleotide
atggctgctgacggttatcttccagattggctcgaggacaacctctctgagggcattcgcgagtggtgggacctgaaacctggagcccccaagcccaaggccaaccagcagaagcaggacgacggccggggtctggtgcttcctggctacaagtacctcggacccttcaacggactcgacaagggggagcccgtcaacgcggcggacgcagcggccctcgagcacgacaaggcctacgaccagcagctcaaagcgggtgacaatccgtacctgcggtataaccacgccgacgccgagtttcaggagcgtctgcaagaagatacgtcttttgggggcaacctcgggcgagcagtcttccaggccaagaagcgggttctcgaacctctcggtctggttgaggaagctgctaagacggctcctggaaagaagagaccggtagaaccgtcacctcagcgttcccccgactcctccacgggcatcggcaagaaaggccagcagcccgctaaaaagagactgaactttggtcagactggcgactcagagtcagtccccgaccctcaaccaatcggagaaccaccagcaggcccctctggtctgggatctggtacaatggctgcaggcggtggcgctccaatggcagacaataacgaaggcgccgacggagtgggtagttcctcaggaaattggcattgcgattccacatggctgggcgacagagtcatcaccaccagcacccgaacctgggccctgcccacctacaacaaccacctctacaagcaaatatccaatgggacatcgggaggaagcaccaacgacaacacctacttcggctacagcaccccctgggggtattttgacttcaacagattccactgccacttctcaccacgtgactggcagcgactcatcaacaacaactggggattccggccaaaaagactcagcttcaagctcttcaacatccaggtcaaggaggtcacgcagaatgaaggcaccaagaccatcgccaataaccttaccagcacgattcaggtatttacggactcggaataccagctgccgtacgtcctcggctccgcgcaccagggctgcctgcctccgttcccggcggacgtcttcatgattccccagtacggctaccttacactgaacaatggaagtcaagccgtaggccgttcctccttctactgcctggaatattttccatctcaaatgctgcgaactggaaacaattttgaattcagctacaccttcgaggacgtgcctttccacagcagctacgcacacagccagagcttggaccgactgatgaatcctctcatcgaccagtacctgtactacttatccagaactcagtccacaggaggaactcaaggtacccagcaattgttattttctcaagctgggcctgcaaacatgtcggctcaggctaagaactggctacctggaccttgctaccggcagcagcgagtctctacgacactgtcgcaaaacaacaacagcaactttgcttggactggtgccaccaaatatcacctgaacggaagagactctttggtaaatcccggtgtcgccatggcaacccacaaggacgacgaggaacgcttcttcccgtcgagtggagtcctgatgtttggaaaacagggtgctggaagagacaatgtggactacagcagcgttatgctaaccagcgaagaagaaattaaaaccactaaccctgtagccacagaacaatacggtgtggtggctgacaacttgcagcaaaccaatacagggcctattgtgggaaatgtcaacagccaaggagccttacctggcatggtctggcagaaccgagacgtgtacctgcagggtcccatctgggccaagattcctcacacggacggcaacttccacccttcaccgctaatgggaggatttggactgaagcacccacctcctcagatcctgatcaagaacacgccggtacctgcggatcctccaacaacgttcagccaggcgaaattggcttccttcattacgcagtacagcaccggacaggtcagcgtggaaatcgagtgggagctgcagaaggagaacagcaaacgctggaacccagagattcagtacacttcaaactactacaaatctacaaatgtggactttgctgtcaatacagagggaacttattctgagcctcgccccattggtactcgttacctcacccgtaatctgtaa

SEQ ID NO: 513 - protein, 738 aa, Artificial Sequence
  Description of Artificial Sequence: Synthetic polypeptide
MAADGYLPDWLEDNLSEGIREWWDLKPGAPKPKANQQKQDDGRGLVLPGYKYLGPFNGLDKGEPVNAADAAALEHDKAYDQQLKAGDNPYLRYNHADAEFQERLQEDTSFGGNLGRAVFQAKKRVLEPLGLVEEGAKTAPGKKRPVEPSPQRSPDSSTGIGKKGQQPARKRLNFGQTGDSESVPDPQPLGEPPAAPSSVGSGTMAAGGGAPMADNNEGADGVGSSSGNWHCDSTWLGDRVITTSTRTWALPTYNNHLYKQISNGTSGGSTNDNTYFGYSTPWGYFDFNRFHCHFSPRDWQRLINNNWGFRPKRLSFKLFNIQVKEVTQNEGTKTIANNLTSTIQVFTDSEYQLPYVLGSAHQGCLPPFPADVFMIPQYGYLTLNNGSQAVGRSSFYCLEYFPSQMLRTGNNFSFSYTFEDVPFHSSYAHSQSLDRLMNPLIDQYLYYLSRTQSTGGTAGTQQLLFSQAGPSNMSAQARNWLPGPCYRQQRVSTTLSQNNNSNFAWTGATKYHLNGRDSLVNPGVAMATNKDDEDRFFPSSGILMFGKQGAGKDNVDYSNVMLTSEEEIKTTNPVATEQYGVVADNLQRQNTAPIVGAVNSQGALPGMVWQNRDVYLQGPIWAKIPHTDGNFHPSPLMGGFGLKHPPPQILIKNTPVPADPPTAFNQAKLNSFITQYSTGQVSVEIEWELQKENSKRWNPEIQYTSNYYKSTNVDFAVNTEGVYSEPRPIGTRYLTRNL

SEQ ID NO: 514 - protein, 736 aa, Artificial Sequence
  Description of Artificial Sequence: Synthetic polypeptide
MAADGYLPDWLEDNLSEGIREWLNLKPGAPQPKANQQKQDNARGLVLPGYKYLGPFNGLDKGDPVNEADAAALEHDKAYGQQLKAGDNPYLKYNHADAEFQERLQKDTSFGGNLGKAVFQAKKRILEPLGLVETPAKTAPGKKRPVDPSPQRSPDSSSGIGKKSPHPARKRLNFGQTGEAESVPDPQPIGEPPSDPSSVGSGTMAAGGGAPMADNNEGADGVGNSSGNWHCDSTWLGDRVITTSTRTWALPTYNNHLYKQISSQSGATNDNHYFGYSTPWGYFDFNRFHCHFSPRDWQRLINNNWGFRPKRLSFKLFNIQVKEVTQNDGTTTIANNLTSTVQVFTDSEYQLPYVLGSAHQGCLPPFPADVFMIPQYGYLTLNNGSQAVGRSSFYCLEYFPSQMLRTGNNFQFSYTFEDVPFHSSYAHSQSLDRLMNPLIDQYLYYLSKTQGTNATVQGAKLQFSQAGPSNMRDQARNWLPGPCYRQQRVSKTANDNNNSEYAWTGATKYHLNGRDSLVNPGPAMASHKDDEEKFFPMNGTLVFGKNGAGNSNVDIENVMITDEEEIRTTNPVATEQYGVVSDNLQSSNTRPITGDVDSQGVLPGMVWQDRDVYLQGPIWAKIPHTDGHFHPSPLMGGFGLKHPPPQILIKNTPVPANPATTFTPGKFASFITQYSTGQVSVQIEWELQKENSKRWNPEIQYTSNYNKSVNVDFTVDTNGVYSEPRPIGTRYLTRNL

SEQ ID NO: 515 - protein, 736 aa, Artificial Sequence; identical to SEQ ID NO: 90
  Description of Artificial Sequence: Synthetic polypeptide

SEQ ID NO: 516 - protein, 736 aa, Artificial Sequence
  Description of Artificial Sequence: Synthetic polypeptide
MAADGYLPDWLEDNLSEGIREWWDLKPGAPKPKANQQKQDDGRGLVLPGYKYLGPFNGLDKGEPVNAADAAALEHDKAYDQQLKAGDNPYLRYNHADAEFQERLQEDTSFGGNLGRAVFQAKKRVLEPLGLVEEGAKTAPGKKRPVEQSPQEPDSSSGIGKTGQQPAKKRLNFGQTGDSESVPDPQPLGEPPAAPSGLGPNTMASGGGAPMADNNEGADGVGNSSGNWHCDSTWLGDRVITTSTRTWALPTYNNHLYKQISNGTSGGSTNDNTYFGYSTPWGYFDFNRFHCHFSPRDWQRLINNNWGFRPKRLNFKLFNIQVKEVTTNEGTKTIANNLTSTVQVFTDSEYQLPYVLGSAHQGCLPPFPADVFMVPQYGYLTLNNGSQALGRSSFYCLEYFPSQMLRTGNNFQFSYTFEDVPFHSSYAHSQSLDRLMNPLIDQYLYYLVRTQTTGTGGTQTLAFSQAGPSSMANQARNWVPGPCYRQQRVSTTTNQNNNSNFAWTGAAKFKLNGRDSLMNPGVAMASHKDDEDRFFPSSGVLIFGKQGAGNDGVDYSQVLITDEEEIKATNPVATEEYGAVAINNQAANTQAQTGLVHNQGVIPGMVWQNRDVYLQGPIWAKIPHTDGNFHPSPLMGGFGLKHPPPQILIKNTPVPADPPLTFNQAKLNSFITQYSTGQVSVEIEWELQKENSKRWNPEIQYTSNYYKSTNVDFAVNTEGVYSEPRPIGTRYLTRNL

SEQ ID NO: 517 - protein, 736 aa, Artificial Sequence; identical to SEQ ID NO: 516
  Description of Artificial Sequence: Synthetic polypeptide

SEQ ID NO: 518 - protein, 736 aa, Artificial Sequence
  Description of Artificial Sequence: Synthetic polypeptide
MAADGYLPDWLEDNLSEGIREWWDLKPGAPKPKANQQKQDDGRGLVLPGYKYLGPFNGLDKGEPVNAADAAALEHDKAYDQQLKAGDNPYLRYNHADAEFQERLQEDTSFGGNLGRAVFQAKKRVLEPLGLVEEGAKTAPGKKRPVEQSPQEPDSSSGIGKTGQQPAKKRLNFGQTGDSESVPDPQPLGEPPAAPSGLGPNTMASGGGAPMADNNEGADGVGNSSGNWHCDSTWLGDRVITTSTRTWALPTYNNHLYKQISNGTSGGSTNDNTYFGYSTPWGYFDFNRFHCHFSPRDWQRLINNNWGFRPKRLNFKLFNIQVKEVTTNEGTKTIANNLTSTVQVFTDSEYQLPYVLGSAHQGCLPPFPADVFMVPQYGYLTLNNGSQALGRSSFYCLEYFPSQMLRTGNNFQFSYTFEDVPFHSSYAHSQSLDRLMNPLIDQYLYYLVRTQTTGTGGTQTLAFSQAGPSSMANQARNWVPGPCYRQQRVSTTTNQNNNSNFAWTGAAKFKLNGRDSLMNPGVAMASHKDDEDRFFPSSGVLIFGKQGAGNDGVDYSQVLITDEEEIKATNPVATEEYGAVAINNQRANTQAQTGLVHNQGVIPGMVWQNRDVYLQGPIWAKIPHTDGNFHPSPLMGGFGLKHPPPQILIKNTPVPADPPLTFNQAKLNSFITQYSTGQVSVEIEWELQKENSKRWNPEIQYTSNYYKSTNVDFAVNTEGVYSEPRPIGTRYLTRNL

SEQ ID NO: 519 - protein, 736 aa, Artificial Sequence
  Description of Artificial Sequence: Synthetic polypeptide
MAADGYLPDWLEDNLSEGIREWWDLKPGAPKPKANQQKQDDGRGLVLPGYKYLGPFNGLDKGEPVNAADAAALEHDKAYDQQLKAGDNPYLRYNHADAEFQERLQEDTSFGGNLGRAVFQAKKRVLEPLGLVEEGAKTAPGKKRPVEQSPQEPDSSSGIGKTGQQPAKKRLNFGQTGDSESVPDPQPLGEPPAAPSGLGPNTMASGGGAPMADNNEGADGVGNSSGNWHCDSTWLGDRVITTSTRTWALPTYNNHLYKQISNGTSGGSTNDNTYFGYSTPWGYFDFNRFHCHFSPRDWQRLINNNWGFRPKRLNFKLFNIQVKEVTTNEGTKTIANNLTSTVQVFTDSEYQLPYVLGSAHQGCLPPFPADVFMVPQYGYLTLNNGSQALGRSSFYCLEYFPSQMLRTGNNFQFSYTFEDVPFHSSYAHSQSLDRLMNPLIDQYLYYLVRTQTTGTGGTQTLAFSQAGPSSMANQARNWVPGPCYRQQRVSTTTNQNNNSNFAWTGAAKFKLNGRDSLMNPGVAMASHKDDEDAFFPSSGVLIFGKQGAGNDGVDYSQVLITDEEEIKATNPVATEEYGAVAINNQAANTQAQTGLVHNQGVIPGMVWQNRDVYLQGPIWAKIPHTDGNFHPSPLMGGFGLKHPPPQILIKNTPVPADPPLTFNQAKLNSFITQYSTGQVSVEIEWELQKENSKRWNPEIQYTSNYYKSTNVDFAVNTEGVYSEPRPIGTRYLTRNL

SEQ ID NO: 520 - DNA, 1803 bp, Bovine adeno-associated virus
acggcgcctgcggcaaaaaagaggcctctagagcagagtcctcaagagccagactcctcgagcggagttggcaagaaaggcaaacagcctgccagaaagagactcaactttgacgacgaacctggagccggagacgggcctcccccagaaggaccatcttccggagctatgtctactgagactgaaatgcgtgcagcagctggcggaaatggtggcgatgcgggacaaggtgccgagggagtgggtaatgcctccggtgattggcattgcgattccacttggtcagagagccacgtcaccaccacctcaacccgcacctgggtcctgccgacctacaacaaccacctgtacctgcggctcggctcgagcaacgccagcgacaccttcaacggattctccaccccctggggatactttgactttaaccgcttccactgccacttctcgccaagagactggcaaaggctcatcaacaaccactggggactgcgccccaaaagcatgcaagtccgcatcttcaacatccaagttaaggaggtcacgacgtctaacggggagacgaccgtatccaacaacctcaccagcacggtccagatctttgcggacagcacgtacgagctcccgtacgtgatggatgcaggtcaggagggcagcttgcctcctttccccaacgacgtgttcatggtgcctcagtacgggtactgcggactggtaaccggaggcagctctcaaaaccagacagacagaaatgccttctactgtctggagtactttcccagccagatgctgagaaccggaaacaactttgagatggtgtacaagtttgaaaacgtgcccttccactccatgtacgctcacagccagagcctggataggctgatgaacccgctgctggaccagtacctgtgggagctccagtctaccacctctggaggaactctcaaccagggcaattcagccaccaactttgccaagctgaccaaaacaaacttttctggctaccgcaaaaactggctcccggggcccatgatgaagcagcagagattctccaagactgccagtcaaaactacaagattccccagggaagaaacaacagtctgctccattatgagaccagaactaccctcgacggaagatggagcaattttgccccgggaacggccatggcaaccgcagccaacgacgccaccgacttctctcaggcccagctcatctttgcggggcccaacatcaccggcaacaccaccacagatgccaataacctgatgttcacttcagaagatgaacttagggccaccaacccccgggacactgacctgtttggccacctggcaaccaaccagcaaaacgccaccaccgttcctaccgtagacgacgtggacggagtcggcgtgtacccgggaatggtgtggcaggacagagacatttactaccaagggcccatttgggccaaaattccacacacggatggacactttcacccgtctcctctcattggcggatttggactgaaaagcccgcctccacaaatattcatcaaaaacactcctgtacccgccaatcccgcaacgaccttctctccggccagaatcaacagcttcatcacccagtacagcaccggacaggtggctgtcaaaatagaatgggaaatccagaaggagcggtccaagagatggaacccagaggtccagttcacgtccaactacggagcacaggactcgcttctctgggctcccgacaacgccggagcctacaaagagcccagggccattggatcccgatacctcaccaaccacctctag

SEQ ID NO: 521 - DNA, 1617 bp, Bovine adeno-associated virus
atgcgtgcagcagctggcggaaatggtggcgatgcgggacaaggtgccgagggagtgggtaatgcctccggtgattggcattgcgattccacttggtcagagagccacgtcaccaccacctcaacccgcacctgggtcctgccgacctacaacaaccacctgtacctgcggctcggctcgagcaacgccagcgacaccttcaacggattctccaccccctggggatactttgactttaaccgcttccactgccacttctcgccaagagactggcaaaggctcatcaacaaccactggggactgcgccccaaaagcatgcaagtccgcatcttcaacatccaagttaaggaggtcacgacgtctaacggggagacgaccgtatccaacaacctcaccagcacggtccagatctttgcggacagcacgtacgagctcccgtacgtgatggatgcaggtcaggagggcagcttgcctcctttccccaacgacgtgttcatggtgcctcagtacgggtactgcggactggtaaccggaggcagctctcaaaaccagacagacagaaatgccttctactgtctggagtactttcccagccagatgctgagaaccggaaacaactttgagatggtgtacaagtttgaaaacgtgcccttccactccatgtacgctcacagccagagcctggataggctgatgaacccgctgctggaccagtacctgtgggagctccagtctaccacctctggaggaactctcaaccagggcaattcagccaccaactttgccaagctgaccaaaacaaacttttctggctaccgcaaaaactggctcccggggcccatgatgaagcagcagagattctccaagactgccagtcaaaactacaagattccccagggaagaaacaacagtctgctccattatgagaccagaactaccctcgacggaagatggagcaattttgccccgggaacggccatggcaaccgcagccaacgacgccaccgacttctctcaggcccagctcatctttgcggggcccaacatcaccggcaacaccaccacagatgccaataacctgatgttcacttcagaagatgaacttagggccaccaacccccgggacactgacctgtttggccacctggcaaccaaccagcaaaacgccaccaccgttcctaccgtagacgacgtggacggagtcggcgtgtacccgggaatggtgtggcaggacagagacatttactaccaagggcccatttgggccaaaattccacacacggatggacactttcacccgtctcctctcattggcggatttggactgaaaagcccgcctccacaaatattcatcaaaaacactcctgtacccgccaatcccgcaacgaccttctctccggccagaatcaacagcttcatcacccagtacagcaccggacaggtggctgtcaaaatagaatgggaaatccagaaggagcggtccaagagatggaacccagaggtccagttcacgtccaactacggagcacaggactcgcttctctgggctcccgacaacgccggagcctacaaagagcccagggccattggatcccgatacctcaccaaccacctctag

SEQ ID NO: 522 - DNA, 1173 bp, Bovine adeno-associated virus
atggcgctggtaagctggctggtggaacatggcatcacttccgagaagcagtggattcaggagaatcaggagagctacctgtccttcaactccacgggaaactctcggagccagattaaagccgcgcttgacaacgcgtcaaaaattatgagtctgaccaaatctgcctcagactatctcgtgggacagactgttccagaggacatttctgaaaacagaatctggcagatttttgatctcaacggctacgacccggcatacgcgggctctgttctctacggctggtgcactcgcgcctttggaaagaggaacaccgtctggctgtatggacccgcgaccaccggaaagaccaacatcgcggaagccatctctcacaccgtgcccttttatggctgtgtgaactggactaatgagaactttccctttaatgactgtgtggaaaaaatgttgatctggtgggaggagggaaagatgaccagcaaggtggtggaacccgccaaggccatcttgggggggtctagagtacgagtggatcaaaaatgtaaatcctctgtacaagtagactctaccccggtgattatcacctccaatactaacatgtgtgtggtggtggatgggaactccacgacctttgaacaccagcagccgctggaagaccgcatgttcagatttgaactcatgcggcggctcccgccagattttggcaagattaccaagcaggaagtcaaagacttttttgcttgggcaaaggtcaaccaggtgccggtgactcacgagtttatggttcccaagaaagtggcgggaactgagagggcggagacttctagaaaacgcccactggatgacgtcaccaataccaactataaaagtccggagaagcgggcccggctctcagttgttcctgagacgcctcgcagttcagacgtgcctgtagagcccgctcctctgcgacctctcaactggtcttccaggtatgaatgcagatgtgactatcatgctaaatttgactctgtaacgggggaatgtgacgagtgtgaatatttgaatcggggcaaaaatggctgtatctttcataatgctacacattgtcaaatttgtcacgctgttcctccatgggaaaaggaaaatgtgtcagattttaatgattttgatgactgtaataaagagcagtaa

SEQ ID NO: 523 - DNA, 1833 bp, Bovine adeno-associated virus
atggctaccttctatgaagtcattgttcgcgttccatttgatgtggaagagcacctgcctggaatttctgacaactttgtagactgggtaactggtcaaatttgggagctgcctcccgagtcagatttgaatttgactctgattgagcagcctcagctgacggtggctgacagaattcgccgcgtgttcctgtacgagtggaacaaattttccaagcaggagagcaaattctttgtgcagtttgaaaagggatctgaatattttcatctgcacacgctcgtggagacctccggcatctcttctatggtccttggccgctacgtgagtcagattcgcgcccagctggtgaaggtggtgttccagaacattgagccgcggattaacgactgggtcgccatcaccaaggtaaagaagggcggagccaataaggtggtggattctgggtatattcccgcctacctgctgccgaaggtccaaccagagcttcagtgggcgtggactaacctcgaagagtataaattggccgccctcaatctggaggagcgcaaacggctcgtcgctcagtttcagcttgagtcctcgcagcgctcgcaagaggcatcttcccagagggacgtttcggctgacccggtcatcaagagcaagacttcccagaaatacatggcgctggtaagctggctggtggaacatggcatcacttccgagaagcagtggattcaggagaatcaggagagctacctgtccttcaactccacgggaaactctcggagccagattaaagccgcgcttgacaacgcgtcaaaaattatgagtctgaccaaatctgcctcagactatctcgtgggacagactgttccagaggacatttctgaaaacagaatctggcagatttttgatctcaacggctacgacccggcatacgcgggctctgttctctacggctggtgcactcgcgcctttggaaagaggaacaccgtctggctgtatggacccgcgaccaccggaaagaccaacatcgcggaagccatctctcacaccgtgcccttttatggctgtgtgaactggactaatgagaactttccctttaatgactgtgtggaaaaaatgttgatctggtgggaggagggaaagatgaccagcaaggtggtggaacccgccaaggccatcttgggggggtctagagtacgagtggatcaaaaatgtaaatcctctgtacaagtagactctaccccggtgattatcacctccaatactaacatgtgtgtggtggtggatgggaactccacgacctttgaacaccagcagccgctggaagaccgcatgttcagatttgaactcatgcggcggctcccgccagattttggcaagattaccaagcaggaagtcaaagacttttttgcttgggcaaaggtcaaccaggtgccggtgactcacgagtttatggttcccaagaaagtggcgggaactgagagggcggagacttctagaaaacgcccactggatgacgtcaccaataccaactataaaagtccggagaagcgggcccggctctcagttgttcctgagacgcctcgcagttcagacgtgcctgtagagcccgctcctctgcgacctctcaactggtcttccaggtatgaatgcagatgtgactatcatgctaaatttgactctgtaacgggggaatgtgacgagtgtgaatatttgaatcggggcaaaaatggctgtatctttcataatgctacacattgtcaaatttgtcacgctgttcctccatgggaaaaggaaaatgtgtcagattttaatgattttgatgactgtaataaagagcagtaa

SEQ ID NO: 524 - DNA, 2211 bp, Bovine adeno-associated virus
atgtcttttgttgaccaccctccagattggttggaatcgatcggcgacggctttcgtgaatttctcggccttgaggcgggtcccccgaaacccaaggccaatcaacagaagcaagataacgctcgaggtcttgtgcttcctgggtacaagtatcttggtcctgggaacggccttgataagggcgatcctgtcaattttgctgacgaggttgcccgagagcacgacctctcctaccagaaacagcttgaggcgggcgataacccttacctcaagtacaaccacgcggacgcagagtttcaggagaaactcgcttctgacacttcttttgggggaaaccttgggaaggctgttttccaggctaaaaagaggattctcgaacctcttggcctggttgagacgccggataaaacggcgcctgcggcaaaaaagaggcctctagagcagagtcctcaagagccagactcctcgagcggagttggcaagaaaggcaaacagcctgccagaaagagactcaactttgacgacgaacctggagccggagacgggcctcccccagaaggaccatcttccggagctatgtctactgagactgaaatgcgtgcagcagctggcggaaatggtggcgatgcgggacaaggtgccgagggagtgggtaatgcctccggtgattggcattgcgattccacttggtcagagagccacgtcaccaccacctcaacccgcacctgggtcctgccgacctacaacaaccacctgtacctgcggctcggctcgagcaacgccagcgacaccttcaacggattctccaccccctggggatactttgactttaaccgcttccactgccacttctcgccaagagactggcaaaggctcatcaacaaccactggggactgcgccccaaaagcatgcaagtccgcatcttcaacatccaagttaaggaggtcacgacgtctaacggggagacgaccgtatccaacaacctcaccagcacggtccagatctttgcggacagcacgtacgagctcccgtacgtgatggatgcaggtcaggagggcagcttgcctcctttccccaacgacgtgttcatggtgcctcagtacgggtactgcggactggtaaccggaggcagctctcaaaaccagacagacagaaatgccttctactgtctggagtactttcccagccagatgctgagaaccggaaacaactttgagatggtgtacaagtttgaaaacgtgcccttccactccatgtacgctcacagccagagcctggataggctgatgaacccgctgctggaccagtacctgtgggagctccagtctaccacctctggaggaactctcaaccagggcaattcagccaccaactttgccaagctgaccaaaacaaacttttctggctaccgcaaaaactggctcccggggcccatgatgaagcagcagagattctccaagactgccagtcaaaactacaagattccccagggaagaaacaacagtctgctccattatgagaccagaactaccctcgacggaagatggagcaattttgccccgggaacggccatggcaaccgcagccaacgacgccaccgacttctctcaggcccagctcatctttgcggggcccaacatcaccggcaacaccaccacagatgccaataacctgatgttcacttcagaagatgaacttagggccaccaacccccgggacactgacctgtttggccacctggcaaccaaccagcaaaacgccaccaccgttcctaccgtagacgacgtggacggagtcggcgtgtacccgggaatggtgtggcaggacagagacatttactaccaagggcccatttgggccaaaattccacacacggatggacactttcacccgtctcctctcattggcggatttggactgaaaagcccgcctccacaaatattcatcaaaaacactcctgtacccgccaatcccgcaacgaccttctctccggccagaatcaacagcttcatcacccagtacagcaccggacaggtggctgtcaaaatagaatgggaaatccagaaggagcggtccaagagatggaacccagaggtccagttcacgtccaactacggagcacaggactcgcttctctgggctcccgacaacgccggagcctacaaagagcccagggccattggatcccgatacctcaccaaccacctctag

SEQ ID NO: 525 - DNA, 4694 bp, Bovine adeno-associated virus
gtggcactcccccccctgtcgcgttcgctcgttcgctggctcgattgggggggtggcagctcaaagagctgccagacgacggccctctgggccgtcgcccccccaatcgagccagcgaacgagcgaacgcgacaggggggggagtgccacactctctagcaagggggttttgtaggtggtgatgtcattgttgatgtcattatagttgtcacgcgatagttaatgattaacagtcatgtgatgtgtgttatccaataggatgaaagcgcgcgaatgagatctcgcgagacttccggggtataaaaggggtgagtgaacgagcccgccgccattctctgctctggactgctagaggaccctcgctgccatggctaccttctatgaagtcattgttcgcgttccatttgatgtggaagagcacctgcctggaatttctgacaactttgtagactgggtaactggtcaaatttgggagctgcctcccgagtcagatttgaatttgactctgattgagcagcctcagctgacggtggctgacagaattcgccgcgtgttcctgtacgagtggaacaaattttccaagcaggagagcaaattctttgtgcagtttgaaaagggatctgaatattttcatctgcacacgctcgtggagacctccggcatctcttctatggtccttggccgctacgtgagtcagattcgcgcccagctggtgaaggtggtgttccagaacattgagccgcggattaacgactgggtcgccatcaccaaggtaaagaagggcggagccaataaggtggtggattctgggtatattcccgcctacctgctgccgaaggtccaaccagagcttcagtgggcgtggactaacctcgaagagtataaattggccgccctcaatctggaggagcgcaaacggctcgtcgctcagtttcagcttgagtcctcgcagcgctcgcaagaggcatcttcccagagggacgtttcggctgacccggtcatcaagagcaagacttcccagaaatacatggcgctggtaagctggctggtggaacatggcatcacttccgagaagcagtggattcaggagaatcaggagagctacctgtccttcaactccacgggaaactctcggagccagattaaagccgcgcttgacaacgcgtcaaaaattatgagtctgaccaaatctgcctcagactatctcgtgggacagactgttccagaggacatttctgaaaacagaatctggcagatttttgatctcaacggctacgacccggcatacgcgggctctgttctctacggctggtgcactcgcgcctttggaaagaggaacaccgtctggctgtatggacccgcgaccaccggaaagaccaacatcgcggaagccatctctcacaccgtgcccttttatggctgtgtgaactggactaatgagaactttccctttaatgactgtgtggaaaaaatgttgatctggtgggaggagggaaagatgaccagcaaggtggtggaacccgccaaggccatcttgggggggtctagagtacgagtggatcaaaaatgtaaatcctctgtacaagtagactctaccccggtgattatcacctccaatactaacatgtgtgtggtggtggatgggaactccacgacctttgaacaccagcagccgctggaagaccgcatgttcagatttgaactcatgcggcggctcccgccagattttggcaagattaccaagcaggaagtcaaagacttttttgcttgggcaaaggtcaaccaggtgccggtgactcacgagtttatggttcccaagaaagtggcgggaactgagagggcggagacttctagaaaacgcccactggatgacgtcaccaataccaactataaaagtccggagaagcgggcccggctctcagttgttcctgagacgcctcgcagttcagacgtgcctgtagagcccgctcctctgcgacctctcaactggtcttccaggtatgaatgcagatgtgactatcatgctaaatttgactctgtaacgggggaatgtgacgagtgtgaatatttgaatcggggcaaaaatggctgtatctttcataatgctacacattgtcaaatttgtcacgctgttcctccatgggaaaaggaaaatgtgtcagattttaatgattttgatgactgtaataaagagcagtaaataaagtgagtagtcatgtcttttgttgaccaccctccagattggttggaatcgatcggcgacggctttcgtgaatttctcggccttgaggcgggtcccccgaaacccaaggccaatcaacagaagcaagataacgctcgaggtcttgtgcttcctgggtacaagtatcttggtcctgggaacggccttgataagggcgatcctgtcaattttgctgacgaggttgcccgagagcacgacctctcctaccagaaacagcttgaggcgggcgataacccttacctcaagtacaaccacgcggacgcagagtttcaggagaaactcgcttctgacacttcttttgggggaaaccttgggaaggctgttttccaggctaaaaagaggattctcgaacctcttggcctggttgagacgccggataaaacggcgcctgcggcaaaaaagaggcctctagagcagagtcctcaagagccagactcctcgagcggagttggcaagaaaggcaaacagcctgccagaaagagactcaactttgacgacgaacctggagccggagacgggcctcccccagaaggaccatcttccggagctatgtctactgagactgaaatgcgtgcagcagctggcggaaatggtggcgatgcgggacaaggtgccgagggagtgggtaatgcctccggtgattggcattgcgattccacttggtcagagagccacgtcaccaccacctcaacccgcacctgggtcctgccgacctacaacaaccacctgtacctgcggctcggctcgagcaacgccagcgacaccttcaacggattctccaccccctggggatactttgactttaaccgcttccactgccacttctcgccaagagactggcaaaggctcatcaacaaccactggggactgcgccccaaaagcatgcaagtccgcatcttcaacatccaagttaaggaggtcacgacgtctaacggggagacgaccgtatccaacaacctcaccagcacggtccagatctttgcggacagcacgtacgagctcccgtacgtgatggatgcaggtcaggagggcagcttgcctcctttccccaacgacgtgttcatggtgcctcagtacgggtactgcggactggtaaccggaggcagctctcaaaaccagacagacagaaatgccttctactgtctggagtactttcccagccagatgctgagaaccggaaacaactttgagatggtgtacaagtttgaaaacgtgcccttccactccatgtacgctcacagccagagcctggataggctgatgaacccgctgctggaccagtacctgtgggagctccagtctaccacctctggaggaactctcaaccagggcaattcagccaccaactttgccaagctgaccaaaacaaacttttctggctaccgcaaaaactggctcccggggcccatgatgaagcagcagagattctccaagactgccagtcaaaactacaagattccccagggaagaaacaacagtctgctccattatgagaccagaactaccctcgacggaagatggagcaattttgccccgggaacggccatggcaaccgcagccaacgacgccaccgacttctctcaggcccagctcatctttgcggggcccaacatcaccggcaacaccaccacagatgccaataacctgatgttcacttcagaagatgaacttagggccaccaacccccgggacactgacctgtttggccacctggcaaccaaccagcaaaacgccaccaccgttcctaccgtagacgacgtggacggagtcggcgtgtacccgggaatggtgtggcaggacagagacatttactaccaagggcccatttgggccaaaattccacacacggatggacactttcacccgtctcctctcattggcggatttggactgaaaagcccgcctccacaaatattcatcaaaaacactcctgtacccgccaatcccgcaacgaccttctctccggccagaatcaacagcttcatcacccagtacagcaccggacaggtggctgtcaaaatagaatgggaaatccagaaggagcggtccaagagatggaacccagaggtccagttcacgtccaactacggagcacaggactcgcttctctgggctcccgacaacgccggagcctacaaagagcccagggccattggatcccgatacctcaccaaccacctctagcccaattctgttgcataccctcaataaaccgtgtattcgtttcagtaaaatactgcctcttgtggtcattcggcgtacaacagcttacaacaacaacaaaacccccttgctagagagtgtggcactcccccccctgtcgcgttcgctcgttcgctggctcgattgggggggtggcagctcaaagagctgccagacgacggccctctgggccgtcgcccccccaatcgagccagcgaacgagcgaacgcgacaggggggggagtgccac

SEQ ID NO: 526 - protein, 390 aa, Bovine adeno-associated virus
MALVSWLVEHGITSEKQWIQENQESYLSFNSTGNSRSQIKAALDNASKIMSLTKSASDYLVGQTVPEDISENRIWQIFDLNGYDPAYAGSVLYGWCTRAFGKRNTVWLYGPATTGKTNIAEAISHTVPFYGCVNWTNENFPFNDCVEKMLIWWEEGKMTSKVVEPAKAILGGSRVRVDQKCKSSVQVDSTPVIITSNTNMCVVVDGNSTTFEHQQPLEDRMFRFELMRRLPPDFGKITKQEVKDFFAWAKVNQVPVTHEFMVPKKVAGTERAETSRKRPLDDVTNTNYKSPEKRARLSVVPETPRSSDVPVEPAPLRPLNWSSRYECRCDYHAKFDSVTGECDECEYLNRGKNGCIFHNATHCQICHAVPPWEKENVSDFNDFDDCNKEQ

SEQ ID NO: 527 - protein, 610 aa, Bovine adeno-associated virus
MATFYEVIVRVPFDVEEHLPGISDNFVDWVTGQIWELPPESDLNLTLIEQPQLTVADRIRRVFLYEWNKFSKQESKFFVQFEKGSEYFHLHTLVETSGISSMVLGRYVSQIRAQLVKVVFQNIEPRINDWVAITKVKKGGANKVVDSGYIPAYLLPKVQPELQWAWTNLEEYKLAALNLEERKRLVAQFQLESSQRSQEASSQRDVSADPVIKSKTSQKYMALVSWLVEHGITSEKQWIQENQESYLSFNSTGNSRSQIKAALDNASKIMSLTKSASDYLVGQTVPEDISENRIWQIFDLNGYDPAYAGSVLYGWCTRAFGKRNTVWLYGPATTGKTNIAEAISHTVPFYGCVNWTNENFPFNDCVEKMLIWWEEGKMTSKVVEPAKAILGGSRVRVDQKCKSSVQVDSTPVIITSNTNMCVVVDGNSTTFEHQQPLEDRMFRFELMRRLPPDFGKITKQEVKDFFAWAKVNQVPVTHEFMVPKKVAGTERAETSRKRPLDDVTNTNYKSPEKRARLSVVPETPRSSDVPVEPAPLRPLNWSSRYECRCDYHAKFDSVTGECDECEYLNRGKNGCIFHNATHCQICHAVPPWEKENVSDFNDFDDCNKEQ

SEQ ID NO: 528 - protein, 538 aa, Bovine adeno-associated virus
MRAAAGGNGGDAGQGAEGVGNASGDWHCDSTWSESHVTTTSTRTWVLPTYNNHLYLRLGSSNASDTFNGFSTPWGYFDFNRFHCHFSPRDWQRLINNHWGLRPKSMQVRIFNIQVKEVTTSNGETTVSNNLTSTVQIFADSTYELPYVMDAGQEGSLPPFPNDVFMVPQYGYCGLVTGGSSQNQTDRNAFYCLEYFPSQMLRTGNNFEMVYKFENVPFHSMYAHSQSLDRLMNPLLDQYLWELQSTTSGGTLNQGNSATNFAKLTKTNFSGYRKNWLPGPMMKQQRFSKTASQNYKIPQGRNNSLLHYETRTTLDGRWSNFAPGTAMATAANDATDFSQAQLIFAGPNITGNTTTDANNLMFTSEDELRATNPRDTDLFGHLATNQQNATTVPTVDDVDGVGVYPGMVWQDRDIYYQGPIWAKIPHTDGHFHPSPLIGGFGLKSPPPQIFIKNTPVPANPATTFSPARINSFITQYSTGQVAVKIEWEIQKERSKRWNPEVQFTSNYGAQDSLLWAPDNAGAYKEPRAIGSRYLTNHL

SEQ ID NO: 529 - protein, 736 aa, Artificial Sequence
  Description of Artificial Sequence: Synthetic polypeptide
MSFVDHPPDWLESIGDGFREFLGLEAGPPKPKANQQKQDNARGLVLPGYKYLGPGNGLDKGDPVNFADEVAREHDLSYQKQLEAGDNPYLKYNHADAEFQEKLASDTSFGGNLGKAVFQAKKRILEPLGLVETPDKTAPAAKKRPLEQSPQEPDSSSGVGKKGKQPARKRLNFDDEPGAGDGPPPEGPSSGAMSTETEMRAAAGGNGGDAGQGAEGVGNASGDWHCDSTWSESHVTTTSTRTWVLPTYNNHLYLRLGSSNASDTFNGFSTPWGYFDFNRFHCHFSPRDWQRLINNHWGLRPKSMQVRIFNIQVKEVTTSNGETTVSNNLTSTVHIFADSTYELPYVMDAGQEGSLPPFPNDVFMVPQYGYCGLVTGGSSQNQTDRNAFYCLEYFPSQMLRTGNNFEMVYKFENVPFHSMYAHSQSLDRLMNPLLDQYLWELQSTTSGGTLNQGNSATNFAKLTNKNFSGYRKNWLPGPMMKQQRFSKTASQNYKIPQGGNNSLLHYETRTTLDRRWSNFAPGTAMATAANDATDFSQAQLIFAGPNITGNTTTDANNLMFTSEDELRATNPRDTDLFGHLATNQQNATTVPTVDDVDGVGVYPGMVWQDRDIYYQGPIWAKIPHTDGHFHPSPLIGGFGLKSPPPQIFIKNTPVPANPATTFSPARINSFITQYSTGQVAVKIEWEIQKERSKRWNPEVQFTSNYGAQDSLLWAPDNAGAYKEPRAIGSRYLTNHL

SEQ ID NO: 530 - protein, 736 aa, Artificial Sequence
  Description of Artificial Sequence: Synthetic polypeptide
MSFVDHPPDWLESIGDGFREFLGLEAGPPKPKANQQKQDNARGLVLPGYKYLGPGNGLDKGDPVNFADEVAREHDLSYQKQLEAGDNPYLKYNHADAEFQEKLASDTSFGGNLGKAVFQAKKRILEPLGLVETPDKTAPAAKKRPLEQSPQEPDSSSGVGKKGKQPARKRLNFDDEPGAGDGPPPEGPSSGAMSTETEMRAAAGGNGGDAGQGAEGVGNASGDWHCDSTWSESHVTTTSTRTWVLPTYNNHLYLRLGSSNASDTFNGFSTPWGYFDFNRFHCHFSPRDWQRLINNHWGLRPKSMQVRIFNIQVKEVTTSNGETTVSNNLTSTVQIFADSTYELPYVMDAGQEGSLPPFPNDVFMVPQYGYCGLVTGGSSQNQTDRNAFYCLEYFPSQMLRTGNNFEMVYKFENVPFHSMYAHSQSLDRLMNPLLDQYLWELQSTTSGGTLNQGNSATNFAKLTKTNFSGYRKNWLPGPMMKQQRFSKTASQNYKIPQGRNNSLLHYETRTTLDGRWSNFAPGTAMATAANDATDFSQAQLIFAGPNITGNTTTDANNLMFTSEDELRATNPRDTDLFGHLATNQQNATTVPTVDDVDGVGVYPGMVWQDRDIYYQGPIWAKIPHTDGHFHPSPLIGGFGLKSPPPQIFIKNTPVPANPATTFSPARINSFITQYSTGQVAVKIEWEIQKERSKRWNPEVQFTSNYGAQDSLLWAPDNAGAYKEPRAIGSRYLTNHL

SEQ ID NO: 531 - protein, 736 aa, Bovine adeno-associated virus; identical to SEQ ID NO: 530

SEQ ID NO: 532 - protein, 600 aa, Bovine adeno-associated virus
TAPAAKKRPLEQSPQEPDSSSGVGKKGKQPARKRLNFDDEPGAGDGPPPEGPSSGAMSTETEMRAAAGGNGGDAGQGAEGVGNASGDWHCDSTWSESHVTTTSTRTWVLPTYNNHLYLRLGSSNASDTFNGFSTPWGYFDFNRFHCHFSPRDWQRLINNHWGLRPKSMQVRIFNIQVKEVTTSNGETTVSNNLTSTVQIFADSTYELPYVMDAGQEGSLPPFPNDVFMVPQYGYCGLVTGGSSQNQTDRNAFYCLEYFPSQMLRTGNNFEMVYKFENVPFHSMYAHSQSLDRLMNPLLDQYLWELQSTTSGGTLNQGNSATNFAKLTKTNFSGYRKNWLPGPMMKQQRFSKTASQNYKIPQGRNNSLLHYETRTTLDGRWSNFAPGTAMATAANDATDFSQAQLIFAGPNITGNTTTDANNLMFTSEDELRATNPRDTDLFGHLATNQQNATTVPTVDDVDGVGVYPGMVWQDRDIYYQGPIWAKIPHTDGHFHPSPLIGGFGLKSPPPQIFIKNTPVPANPATTFSPARINSFITQYSTGQVAVKIEWEIQKERSKRWNPEVQFTSNYGAQDSLLWAPDNAGAYKEPRAIGSRYLTNHL

SEQ ID NO: 533 - DNA, 2214 bp, Artificial Sequence
  Description of Artificial Sequence: Synthetic polynucleotide
atggctgccgatggttatcttccagattggctcgaggacactctctctgaaggaataagacagtggtggaagctcaaacctggcccaccaccaccaaagcccgcagagcggcataaggacgacagcaggggtcttgtgcttcctgggtacaagtacctcggacccttcaacggactcgacaagggagagccggtcaacgaggcagacgccgcggccctcgagcacgacaaagcctacgaccggcagctcgacagcggagacaacccgtacctcaagtacaaccacgccgacgcggagtttcaggagcgccttaaagaagatacgtcttttgggggcaacctcgggcgagcagtcttccaggccaaaaagaggcttcttgaacctcttggtctggttgaggaagcggctaagacggctcctggaaagaagaggcctgtagagcagtctcctcaggaaccggactcctcctcgggcatcggcaagacaggccagcagcccgctaaaaagagactcaatttcggtcagactggcgacacagagtcagtcccagaccctcaaccaatcggagaacctcccgcagccccctcaggtgtgggatctcttacaatggcttcaggtggtggcgcaccagtggcagacaataacgaaggtgccgatggagtgggtagttcctcgggaaattggcattgcgattcccaatggctgggggacagagtcatcaccaccagcacccgaacctgggccctgcccacctacaacaatcacctctacaagcaaatctccaacgggacatcgggaggagccaccaacgacaacacctacttcggctacagcaccccctgggggtattttgactttaacagattccactgccacttttcaccacgtgactggcagcgactcatcaacaacaactggggattccggcccaagagactcagcttcaagctcttcaacatccaggtcaaggaggtcacgcagaatgaaggcaccaagaccatcgccaataaccttaccagcacggtccaggtcttcacggactcggagtaccagctgccgtacgttctcggctctgcccaccagggctgcctgcctccgttcccggcggacgtgttcatgattccccagtacggctacctaacactcaacaacggtagtcaggccgtgggacgctcctccttctactgcctggaatactttccttcgcagatgctgagaaccggcaacaacttccagtttacttacaccttcgaggacgtgcctttccacagcagctacgcccacagccagagcttggaccggctgatgaatcctctgattgaccagtacctgtactacttgtctcggactcaaacaacaggaggcacggcaaatacgcagactctgggcttcagccaaggtgggcctaatacaatggccaatcaggcaaagaactggctgccaggaccctgttaccgccaacaacgcgtctcaacgacaaccgggcaaaacaacaatagcaactttgcctggactgctgggaccaaataccatctgaatggaagaaattcattggctaatcctggcatcgctatggcaacacacaaagacgacaaggagcgtttttttcccagtaacgggatcctgatttttggcaaacaaaatgctgccagagacaatgcggattacagcgatgtcatgctcaccagcgaggaagaaatcaaaaccactaaccctgtggctacagaggaatacggtatcgtggcagataacttgcagcagcaaaacacggctcctcaaattggaactgtcaacagccagggggccttacccggtatggtttggcagaaccgggacgtgtacctgcagggtcccatctgggccaagattcctcacacggacggcaacttccacccgtctccgctgatgggcggctttggcctgaaacatcctccgcctcagatcctgatcaagaacacgcctgtacctgcggatcctccgaccaccttcaaccagtcaaagctgaactctttcatcacgcaatacagcaccggacaggtcagcgtggaaattgaatgggagctgcagaaggaaaacagcaagcgctggaaccccgagatccagtacacctccaactactacaaatctacaagtgtggactttgctgttaatacagaaggcgtgtactctgaaccccaccccattggcacccgttacctcacccgtcccctgtaa

SEQ ID NO: 534 - protein, 737 aa, Artificial Sequence
  Description of Artificial Sequence: Synthetic polypeptide
MAADGYLPDWLEDTLSEGIRQWWKLKPGPPPPKPAERHKDDSRGLVLPGYKYLGPFNGLDKGEPVNEADAAALEHDKAYDRQLDSGDNPYLKYNHADAEFQERLKEDTSFGGNLGRAVFQAKKRLLEPLGLVEEAAKTAPGKKRPVEQSPQEPDSSSGIGKTGQQPAKKRLNFGQTGDTESVPDPQPIGEPPAAPSGVGSLTMASGGGAPVADNNEGADGVGSSSGNWHCDSQWLGDRVITTSTRTWALPTYNNHLYKQISNGTSGGATNDNTYFGYSTPWGYFDFNRFHCHFSPRDWQRLINNNWGFRPKRLSFKLFNIQVKEVTQNEGTKTIANNLTSTVQVFTDSEYQLPYVLGSAHQGCLPPFPADVFMIPQYGYLTLNNGSQAVGRSSFYCLEYFPSQMLRTGNNFQFTYTFEDVPFHSSYAHSQSLDRLMNPLIDQYLYYLSRTQTTGGTANTQTLGFSQGGPNTMANQAKNWLPGPCYRQQRVSTTTGQNNNSNFAWTAGTKYHLNGRNSLANPGIAMATHKDDKERFFPSNGILIFGKQNAARDNADYSDVMLTSEEEIKTTNPVATEEYGIVADNLQQQNTAPQIGTVNSQGALPGMVWQNRDVYLQGPIWAKIPHTDGNFHPSPLMGGFGLKHPPPQILIKNTPVPADPPTTFNQSKLNSFITQYSTGQVSVEIEWELQKENSKRWNPEIQYTSNYYKSTSVDFAVNTEGVYSEPHPIGTRYLTRPL

SEQ ID NO: 535 - protein, 736 aa, Artificial Sequence
  Description of Artificial Sequence: Synthetic polypeptide
MAADGYLPDWLEDNLSEGIREWWDLKPGAPKPKANQQKQDDGRGLVLPGYKYLGPFNGLDKGEPVNAADAAALEHDKAYDQQLKAGDNPYLRYNHADAEFQERLQEDTSFGGNLGRAVFQAKKRVLEPLGLVEEGAKTAPGKKRPVEQSPQEPDSSSGIGKTGQQPAKKRLNFGQTGDTESVPDPQPIGEPPAAPSGVGSLTMASGGGAPVADNNEGADGVGSSSGNWHCDSQWLGDRVITTSTRTWALPTYNNHLYKQISSASTGASNDNHYFGYSTPWGYFDFNRFHCHFSPRDWQRLINNNWGFRPKRLNFKLFNIQVKEVTDNNGVKTIANNLTSTVQVFTDSDYQLPYVLGSAHQGCLPPFPADVFMIPQYGYLTLNNGSQAVGRSSFYCLEYFPSQMLRTGNNFQFTYTFEDVPFHSSYAHSQSLDRLMNPLIDQYLYYLSRTQTTGGTANTQTLGFSQGGPNTMANQAKNWLPGPCYRQQRVSTTTGQNNNSNFAWTAGTKYHLNGRNSLANPGIAMATHKDDKERFFPSNGILIFGKQNAARDNADYSDVMLTSEEEIKTTNPVATEEYGIVADNLQQQNTAPQIGTVNSQGALPGMVWQNRDVYLQGPIWAKIPHTDGNFHPSPLMGGFGLKHPPPQILIKNTPVPADPPTTFNQSKLNSFITQYSTGQVSVEIEWELQKENSKRWNPEIQYTSNYYKSTSVDFAVNTEGVYSEPHPIGTRYLTRPL

SEQ ID NO: 536 - protein, 736 aa, Artificial Sequence
  Description of Artificial Sequence: Synthetic polypeptide
MAADGYLPDWLEDTLSEGIRQWWKLKPGPPPPKPAERHKDDSRGLVLPGYKYLGPFNGLDKGEPVNEADAAALEHDKAYDRQLDSGDNPYLKYNHADAEFQERLQGDTSFGGNLGRAVFQAKKRVLEPLGLVEEGAKTAPGKKRPVEQSPQEPDSSSGIGETGQQPAKKRLNFGQTGDSESVPDPQPLGEPPATPAAVGPTTMASGGGAPMADNNEGADGVGSSSGNWHCDSQWLGDRVITTSTRTWALPTYNNHLYKQISSASTGASNDNHYFGYSTPWGYFDFNRFHCHFSPRDWQRLINNNWGFRPKRLSFKLFNIQVKEVTDNNGVKTIANNLTSTVQVFTDSEYQLPYVLGSAHQGCLPPFPADVFMIPQYGYLTLNNGSQAVGRSSFYCLEYFPSQMLRTGNNFTFSYTFEDVPFHSSYAHSQSLDRLMNPLIDQYLYYLSRTQTTGGTANTQTLGFSQGGPNTMANQAKNWLPGPCYRQQRVSTTTGQNNNSNFAWTAGTKYHLNGRNSLANPGIAMATHKDDKERFFPSNGILIFGKQNAARDNADYSDVMLTSEEEIKTTNPVATEEYGIVADNLQQQNTAPQIGTVNSQGALPGMVWQNRDVYLQGPIWAKIPHTDGNFHPSPLMGGFGLKHPPPQILIKNTPVPADPPTTFNQSKLNSFITQYSTGQVSVEIEWELQKENSKRWNPEIQYTSNYYKSTSVDFAVNTEGVYSEPHPIGTRYLTRPL

SEQ ID NO: 537 - DNA, 2181 bp, Artificial Sequence
  Description of Artificial Sequence: Synthetic polynucleotide
atgtcttttgttgatcaccctccagattggttggaagaagttggtgaaggtcttcgcgagtttttgggccttgaagcgggcccaccgaaaccaaaacccaatcagcagcatcaagatcaagcccgtggtcttgtgctgcctggttataactatctcggacccggaaacggtctcgatcgaggagagcctgtcaacagggcagacgaggtcgcgcgagagcacgacatctcgtacaacgagcagcttgaggcgggagacaacccctacctcaagtacaaccacgcggacgccgagtttcaggagaagctcgccgacgacacatccttcgggggaaacctcggaaaggcagtctttcaggccaagaaaagggttctcgaaccttttggcctggttgaagagggtgctaagacggcccctaccggaaagcggatagacgaccactttccaaaaagaaagaaggctcggaccgaagaggactccaagccttccacctcgtcagacgccgaagctggacccagcggatcccagcagctgcaaatcccagcacaaccagcctcaagtttgggagctgatacaatgtctgcgggaggtggcggcccattgggcgacaataaccaaggtgccgatggagtgggcaatgcctcgggagattggcattgcgattccacgtggatgggggacagagtcgtcaccaagtccacccgcacctgggtgctgcccagctacaacaaccaccagtaccgagagatcaaaagcggctccgtcgacggaagcaacgccaacgcctactttggatacagcaccccctgggggtactttgactttaaccgcttccacagccactggagcccccgagactggcaaagactcatcaacaactattggggcttcagaccccggtctctcagagtcaaaatcttcaacatccaagtcaaagaggtcacggtgcaggactccaccaccaccatcgccaacaacctcacctccaccgtccaagtgtttacggacgacgactaccaactcccgtacgtcgtcggcaacgggaccgagggatgcctgccggccttccccccgcaggtctttacgctgccgcagtacggctacgcgacgctgaaccgagacaacggagacaacccgacagagcggagcagcttcttttgcctagagtactttcccagcaagatgctgaggacgggcaacaactttgagtttacctacagctttgaagaggtgcccttccactgcagcttcgccccgagccagaacctctttaagctggccaacccgctggtggaccagtacctgtaccgcttcgtgagcacctcggccacgggcgccatccagttccaaaagaacctggcgggcagatacgccaacacctacaaaaactggttcccggggcccatgggccgaacccagggctggaacacgagctctggggtcagcagcaccaacagagtcagcgtcaacaacttttccgtctcaaaccggatgaacctggagggggccagctaccaagtgaacccccagcccaacgggatgacaaacacgctccaaggcagcaaccgctacgcgctggaaaacaccatgatcttcaacgctcaaaacgccacgccgggaactacctcggtgtacccagaggacaatctactgctgaccagcgagagcgagactcagcccgtcaaccgggtggcttacaacacgggcggtcagatggccaccaacgcccagaacgccaccacggctcccacggtcgggacctacaacctccaggaagtgcttcctggcagcgtatggatggagagggacgtgtacctccaaggacccatctgggccaagatcccagagacgggggcgcactttcacccctctccggccatgggcggattcggactcaaacacccgccgcccatgatgctcatcaaaaacacgccggtgcccggcaacatcaccagcttctcggacgtgcccgtcagcagcttcatcacccagtacagcaccgggcaggtcaccgtggagatggaatgggagctcaaaaaggaaaactccaagaggtggaacccagagatccagtacaccaacaactacaacgacccccagtttgtggactttgctccagacggctccggcgaatacagaaccaccagagccatcggaacccgatacctcacccgacccctt

SEQ ID NO: 538 - protein, 726 aa, Artificial Sequence
  Description of Artificial Sequence: Synthetic polypeptide
MSFVDHPPDWLEEVGEGLREFLGLEAGPPKPKPNQQHQDQARGLVLPGYNYLGPGNGLDRGEPVNRADEVAREHDISYNEQLEAGDNPYLKYNHADAEFQEKLADDTSFGGNLGKAVFQAKKRVLEPFGLVEEGAKTAPTGKRIDDHFPKRKKARTEEDSKPSTSSDAEAGPSGSQQLQIPAQPASSLGADTMSAGGGGPLGDNNQGADGVGNASGDWHCDSTWMGDRVVTKSTRTWVLPSYNNHQYREIKSGSVDGSNANAYFGYSTPWGYFDFNRFHSHWSPRDWQRLINNYWGFRPRSLRVKIFNIQVKEVTVQDSTTTIANNLTSTVQVFTDDDYQLPYVVGNGTEGCLPAFPPQVFTLPQYGYATLNRDNGDNPTERSSFFCLEYFPSKMLRTGNNFEFTYSFEEVPFHCSFAPSQNLFKLANPLVDQYLYRFVSTSATGAIQFQKNLAGRYANTYKNWFPGPMGRTQGWNTSSGSSTNRVSVNNFSVSNRMNLEGASYQVNPQPNGMTNTLQGSNRYALENTMIFNAQNATPGTTSVYPEDNLLLTSESETQPVNRVAYNTGGQMATNAQNATTAPTVGTYNLQEVLPGSVWMERDVYLQGPIWAKIPETGAHFHPSPAMGGFGLKHPPPMMLIKNTPVPGNITSFSDVPVSSFITQYSTGQVTVEMEWELKKENSKRWNPEIQYTNNYNDPQFVDFAPDGSGEYRTTRAIGTRYLTRPL

SEQ ID NO: 539 - protein, 735 aa, Artificial Sequence
  Description of Artificial Sequence: Synthetic polypeptide
MAADGYLPDWLEDTLSEGIRQWWKLKPGPPPPKPAERHKDDSRGLVLPGYKYLGPFNGLDKGEPVNEADAAALEHDKAYDRQLDSGDNPYLKYNHADAEFQERLKEDTSFGGNLGRAVFQAKKRILEPLGLVEEPVKTAPGKKRPVEHSPAEPDSSSGTGKSGQQPARKRLNFGQTGDADSVPDPQPLGQPPAAPSGLGTNTMASGSGAPMADNNEGADGVGNSSGNWHCDSTWMGDRVITTSTRTWALPTYNNHLYKQISSQSGASNDNHYFGYSTPWGYFDFNRFHCHFSPRDWQRLINNNWGFRPKRLSFKLFNIQVKEVTQNDGTTTIANNLTSTVQVFTDSEYQLPYVLGSAHQGCLPPFPADVFMVPQYGYLTLNNGSQAVGRSSFYCLEYFPSQMLRTGNNFTFSYTFEDVPFHSSYAHSQSLDRLMNPLIDQYLYYLSRTNTPSGTTTMSRLQFSQAGASDIRDQSRNWLPGPCYRQQRVSKTAADNNNSDYSWTGATKYHLNGRDSLVNPGPAMASHKDDEEKYFPQSGVLIFGKQDSGKTNVDIEKVMITDEEEIRTTNPVATEQYGSVSTNLQSGNTQAATSDVNTQGVLPGMVWQDRDVYLQGPIWAKIPHTDGHFHPSPLMGGFGLKHPPPQILIKNTPVPANPSTTFSAAKFASFITQYSTGQVSVEIEWELQKENSKRWNPEIQYTSNYNKSVNVDFTVDTNGVYSEPRPIGTRYLTRNL

SEQ ID NO: 540 - DNA, 1797 bp, Artificial Sequence
  Description of Artificial Sequence: Synthetic polynucleotide
acggctccgaccggagacaagcggaaaggcgaagacgaacctcgtttgcccgacacttcttcacagactcccaagaaaaacaagaagcctcgcaaggaaagaccttccggcggggcagaagatccgggcgaaggcacctcttccaacgctggagcagcagcacccgcctctagtgtgggatcatctatcatggctgaaggaggtggcggcccagtgggcgatgcaggccagggtgccgatggagtgggcaattcctccggaaattggcattgcgattcccaatggctggaaaacggagtcgtcactcgaaccacccgaacctgggtcttgcccagctacaacaaccacctgtacaaacgaatccaaggacccagcggaggcgacaacaacaacaaattctttggattcagcaccccctggggatactttgactacaatcgattccactgccacttttccccgcgagactggcaacgactcatcaacaacaactggggcatccgtcccaaagcgatgcgctttagactctttaacatccaggttaaagaggtcacggtccaagacttcaacaccaccatcggcaacaacctcaccagtacggtccaggtctttgcggacaaggactaccaactgccgtacgtcctcggatcggctaccgaaggcaccttcccgccgttcccagcggatatctacacgatcccgcagtacgggtactgcacgctaaactacaacaacgaggcggtggatcgttcggccttctactgtctggactactttccctcagacatgctgcggacaggaaataactttgagtttacttacaccttcgaggacgttcctttccatagcatgtttgcccacaaccagacgctagaccggctgatgaatcccctcgtggatcagtacctctgggctttcagctccgtcagccaagcaggctcatctggacgagctcttcattactcgcgggcgactaaaaccaacatggcggctcaatataggaactggttacctgggcctttcttccgtgatcagcaaatctttacgggcgctagcaacatcactaaaaataacgtctttagcgtttgggaaaaaggcaagcaatgggaactcgacaatcggaccaacctaatgcagcccggtcctgcggcagcgaccacctttagcggagaacctgaccgtcaagccatgcaaaacacgctggcttttagcaggaccgtctacgatcaaacgaccgccacgaccgatcgtaaccagatactcatcaccaacgaagacgaaatcagacccaccaactcggtcggtatcgacgcgtggggagcagttcccaccaacaaccagtcgatcgtgacccccggcactcgcgcggccgtcaacaatcaaggggcgcttcccgggatggtgtggcaaaacagagacatttaccctacagggacccatttggccaaaattcccgacactgacaatcacttccatccgtccccgcttattgggcggtttggctgcaagcatccccctccccagattttcattaaaaacacacccgtccctgccaacccttcggaaacgttccagacggccaaagtggcctccttcatcaaccagtactcgaccggacagtgcaccgtcgaaatcttttgggaactcaagaaggaaacctccaagcgctggaaccccgaaatccagttcacctccaactttggcaacgcggccgacatccagtttgccgtctccgacacgggatcctattccgaacctcgtcccatcggtacccgttaccttaccaaacctctgtaa

SEQ ID NO: 541 - DNA, 1989 bp, Artificial Sequence
  Description of Artificial Sequence: Synthetic polynucleotide
atgaggtcgtactacgaggtcatcgttcagctgcccaacgacgtcgagagtcaggtacctggaatctccgattcgttcgtcaactggattacgtcgcgagaatggacgttgcctgaggacgccgattgggatttggaccaggtcgatcaagttcaactgacgctcggcgacaaaatccaacgggagattcgaactcattgggggacgatggccaaagaaccggactttcactattttatccaactggaacaaggtgaggtgttctttcatttacacgtcctgctggaaacgtgttccgtaaagccgatggtactcggaagatatatccgacatattcaacaaaaaattgtgagtaaagtctactgcgccacgagcctacgatggaaggatggatgcgtggtgaccaagaccaaaaatttcgggggcgcgaacaaggtccgggccgagtcgtatattcccgcctacctgatcccgaaacagcaaccggaagtgcagtgggcgtggactaacgtgcccgagtatataaaagcgtgcttgcaccgagaactgcgtgccagtctcgcgcgacttcacttcgaggaggcgggcgtctcgcaatccaaggaaaatctcgcgagaactgcagacggcgctcccgtgatgccgacccgcgtcagcaaacgctacatggagctcgtggattggctcgtggagaaggggatcaccaccgagaaggaatggctgctggaaaacagagaaagctttcggagctttcaggcctcgagcaactcggcgcgtcagatcaagacggccctgcaaggcgccattcaggagatgcttctgaccaagacggcggaggactacctcgtcggaaaggatcccgtctcggacgacgacatccgtcagaaccgcatctacaagattctggaactgaaccactacgacccagcgtacgtggggagtattttggtcgggtggtgccagaagaaatggggcaagcgaaacacgctgtggctgttcggacatgcgaccaccggcaagaccaacatcgcggaggctattgcccatgctgtgccgttctatggatgcgttaactggaccaacgagaactttccgttcaacgactgcgtcgaaaaaatgattatctggtgggaggagggcaaaatgaccgccaaagtggtggaaacagccaaggcgattctgggaggatctcgggtgagagtggaccaaaaatgcaaagcttcggttccgatcgaaccgacgccggtcattattaccagtaacaccaacatgtgttatgtcatcgacgggaacacgaccacgttcgagcataagcagccgttggaggacaggatgtttaagctcgaattgctgactcggttgcctgatgactttggtaaggtgaccaaacaggaggtgcgtcaattcttcaggtggtctcaggatcacctgacccctgtgatcccagaattcctagtgcggaaggcggagtctcgcaaaagacccgccccttccggggaaggctatataagcccgacaaagcggcccgcgctcgcagagcagcagcaggcgtcggagagcgcggacccggttcccaccaggtatcgtatcaaatgctcgaaacattgcggtatggataaaatgttgtttccttgccaaatttgtgaatcgatgaacagagatattaatatttgtgctattcataaaacgaccgactgtaaagagtgtttccccgactacggggataaagatgatgtagaactacccccctgtacagaacacaacgtgtctcgttgttatcaatgtcattcgggcgaattgtatcgcgtgacttcggactctgacgagaaacctgcccccgagagtgatgaaggcaccgagccatcctatgctccctgcacgattcaccacctgatgggcaagagtcacgggttagtcacttgcgcggcgtgtcggttgaaaaatagtacgttgcatgatgacttggatgacggtgatctcgaacaataa

SEQ ID NO: 542 - DNA, 1626 bp, Artificial Sequence
  Description of Artificial Sequence: Synthetic polynucleotide
atgaggtcgtactacgaggtcatcgttcagctgcccaacgacgtcgagagtcaggtacctggaatctccgattcgttcgtcaactggattacgtcgcgagaatggacgttgcctgaggacgccgattgggatttggaccaggtcgatcaagttcaactgacgctcggcgacaaaatccaacgggagattcgaactcattgggggacgatggccaaagaaccggactttcactattttatccaactggaacaaggtgaggtgttctttcatttacacgtcctgctggaaacgtgttccgtaaagccgatggtactcggaagatatatccgacatattcaacaaaaaattgtgagtaaagtctactgcgccacgagcctacgatggaaggatggatgcgtggtgaccaagaccaaaaatttcgggggcgcgaacaaggtccgggccgagtcgtatattcccgcctacctgatcccgaaacagcaaccggaagtgcagtgggcgtggactaacgtgcccgagtatataaaagcgtgcttgcaccgagaactgcgtgccagtctcgcgcgacttcacttcgaggaggcgggcgtctcgcaatccaaggaaaatctcgcgagaactgcagacggcgctcccgtgatgccgacccgcgtcagcaaacgctacatggagctcgtggattggctcgtggagaaggggatcaccaccgagaaggaatggctgctggaaaacagagaaagctttcggagctttcaggcctcgagcaactcggcgcgtcagatcaagacggccctgcaaggcgccattcaggagatgcttctgaccaagacggcggaggactacctcgtcggaaaggatcccgtctcggacgacgacatccgtcagaaccgcatctacaagattctggaactgaaccactacgacccagcgtacgtggggagtattttggtcgggtggtgccagaagaaatggggcaagcgaaacacgctgtggctgttcggacatgcgaccaccggcaagaccaacatcgcggaggctattgcccatgctgtgccgttctatggatgcgttaactggaccaacgagaactttccgttcaacgactgcgtcgaaaaaatgattatctggtgggaggagggcaaaatgaccgccaaagtggtggaaacagccaaggcgattctgggaggatctcgggtgagagtggaccaaaaatgcaaagcttcggttccgatcgaaccgacgccggtcattattaccagtaacaccaacatgtgttatgtcatcgacgggaacacgaccacgttcgagcataagcagccgttggaggacaggatgtttaagctcgaattgctgactcggttgcctgatgactttggtaaggtgaccaaacaggaggtgcgtcaattcttcaggtggtctcaggatcacctgacccctgtgatcccagaattcctagtgcggaaggcggagtctcgcaaaagacccgccccttccggggaaggctatataagcccgacaaagcggcccgcgctcgcagagcagcagcaggcgtcggagagcgcggacccggttcccaccagattggttggagcggttggtcaaaaagggagtgaatgctgcagctga

SEQ ID NO: 543 - DNA, 1323 bp, Artificial Sequence
  Description of Artificial Sequence: Synthetic polynucleotide
atggagctcgtggattggctcgtggagaaggggatcaccaccgagaaggaatggctgctggaaaacagagaaagctttcggagctttcaggcctcgagcaactcggcgcgtcagatcaagacggccctgcaaggcgccattcaggagatgcttctgaccaagacggcggaggactacctcgtcggaaaggatcccgtctcggacgacgacatccgtcagaaccgcatctacaagattctggaactgaaccactacgacccagcgtacgtggggagtattttggtcgggtggtgccagaagaaatggggcaagcgaaacacgctgtggctgttcggacatgcgaccaccggcaagaccaacatcgcggaggctattgcccatgctgtgccgttctatggatgcgttaactggaccaacgagaactttccgttcaacgactgcgtcgaaaaaatgattatctggtgggaggagggcaaaatgaccgccaaagtggtggaaacagccaaggcgattctgggaggatctcgggtgagagtggaccaaaaatgcaaagcttcggttccgatcgaaccgacgccggtcattattaccagtaacaccaacatgtgttatgtcatcgacgggaacacgaccacgttcgagcataagcagccgttggaggacaggatgtttaagctcgaattgctgactcggttgcctgatgactttggtaaggtgaccaaacaggaggtgcgtcaattcttcaggtggtctcaggatcacctgacccctgtgatcccagaattcctagtgcggaaggcggagtctcgcaaaagacccgccccttccggggaaggctatataagcccgacaaagcggcccgcgctcgcagagcagcagcaggcgtcggagagcgcggacccggttcccaccaggtatcgtatcaaatgctcgaaacattgcggtatggataaaatgttgtttccttgccaaatttgtgaatcgatgaacagagatattaatatttgtgctattcataaaacgaccgactgtaaagagtgtttccccgactacggggataaagatgatgtagaactacccccctgtacagaacacaacgtgtctcgttgttatcaatgtcattcgggcgaattgtatcgcgtgacttcggactctgacgagaaacctgcccccgagagtgatgaaggcaccgagccatcctatgctccctgcacgattcaccacctgatgggcaagagtcacgggttagtcacttgcgcggcgtgtcggttgaaaaatagtacgttgcatgatgacttggatgacggtgatctcgaacaataa

SEQ ID NO: 544 - DNA, 960 bp, Artificial Sequence
  Description of Artificial Sequence: Synthetic polynucleotide
atggagctcgtggattggctcgtggagaaggggatcaccaccgagaaggaatggctgctggaaaacagagaaagctttcggagctttcaggcctcgagcaactcggcgcgtcagatcaagacggccctgcaaggcgccattcaggagatgcttctgaccaagacggcggaggactacctcgtcggaaaggatcccgtctcggacgacgacatccgtcagaaccgcatctacaagattctggaactgaaccactacgacccagcgtacgtggggagtattttggtcgggtggtgccagaagaaatggggcaagcgaaacacgctgtggctgttcggacatgcgaccaccggcaagaccaacatcgcggaggctattgcccatgctgtgccgttctatggatgcgttaactggaccaacgagaactttccgttcaacgactgcgtcgaaaaaatgattatctggtgggaggagggcaaaatgaccgccaaagtggtggaaacagccaaggcgattctgggaggatctcgggtgagagtggaccaaaaatgcaaagcttcggttccgatcgaaccgacgccggtcattattaccagtaacaccaacatgtgttatgtcatcgacgggaacacgaccacgttcgagcataagcagccgttggaggacaggatgtttaagctcgaattgctgactcggttgcctgatgactttggtaaggtgaccaaacaggaggtgcgtcaattcttcaggtggtctcaggatcacctgacccctgtgatcccagaattcctagtgcggaaggcggagtctcgcaaaagacccgccccttccggggaaggctatataagcccgacaaagcggcccgcgctcgcagagcagcagcaggcgtcggagagcgcggacccggttcccaccagattggttggagcggttggtcaaaaagggagtgaatgctgcagctga

SEQ ID NO: 545 - DNA, 1608 bp, Artificial Sequence
  Description of Artificial Sequence: Synthetic polynucleotide
atggctgaaggaggtggcggcccagtgggcgatgcaggccagggtgccgatggagtgggcaattcctccggaaattggcattgcgattcccaatggctggaaaacggagtcgtcactcgaaccacccgaacctgggtcttgcccagctacaacaaccacctgtacaaacgaatccaaggacccagcggaggcgacaacaacaacaaattctttggattcagcaccccctggggatactttgactacaatcgattccactgccacttttccccgcgagactggcaacgactcatcaacaacaactggggcatccgtcccaaagcgatgcgctttagactctttaacatccaggttaaagaggtcacggtccaagacttcaacaccaccatcggcaacaacctcaccagtacggtccaggtctttgcggacaaggactaccaactgccgtacgtcctcggatcggctaccgaaggcaccttcccgccgttcccagcggatatctacacgatcccgcagtacgggtactgcacgctaaactacaacaacgaggcggtggatcgttcggccttctactgtctggactactttccctcagacatgctgcggacaggaaataactttgagtttacttacaccttcgaggacgttcctttccatagcatgtttgcccacaaccagacgctagaccggctgatgaatcccctcgtggatcagtacctctgggctttcagctccgtcagccaagcaggctcatctggacgagctcttcattactcgcgggcgactaaaaccaacatggcggctcaatataggaactggttacctgggcctttcttccgtgatcagcaaatctttacgggcgctagcaacatcactaaaaataacgtctttagcgtttgggaaaaaggcaagcaatgggaactcgacaatcggaccaacctaatgcagcccggtcctgcggcagcgaccacctttagcggagaacctgaccgtcaagccatgcaaaacacgctggcttttagcaggaccgtctacgatcaaacgaccgccacgaccgatcgtaaccagatactcatcaccaacgaagacgaaatcagacccaccaactcggtcggtatcgacgcgtggggagcagttcccaccaacaaccagtcgatcgtgacccccggcactcgcgcggccgtcaacaatcaaggggcgcttcccgggatggtgtggcaaaacagagacatttaccctacagggacccatttggccaaaattcccgacactgacaatcacttccatccgtccccgcttattgggcggtttggctgcaagcatccccctccccagattttcattaaaaacacacccgtccctgccaacccttcggaaacgttccagacggccaaagtggcctccttcatcaaccagtactcgaccggacagtgcaccgtcgaaatcttttgggaactcaagaaggaaacctccaagcgctggaaccccgaaatccagttcacctccaactttggcaacgcggccgacatccagtttgccgtctccgacacgggatcctattccgaacctcgtcccatcggtacccgttaccttaccaaacctctgtaa

SEQ ID NO: 546 - DNA, 2232 bp, Artificial Sequence
  Description of Artificial Sequence: Synthetic polynucleotide
atgtctctcatttctgatgcgattccagattggttggagcggttggtcaaaaagggagtgaatgctgcagctgatttctaccatttggaaagcggtcctcctcgtcctaaggcaaatcagcaaactcaagaatctcttgaaaaggacgattcgagaggtctcgtgttcccaggctacaattatctaggccctttcaacggtctagataaaggagaacccgtcaacgaggcagacgctgccgccttagaacacgacaaggcttacgacctcgaaatcaaggacgggcacaacccgtactttgagtacaacgaggccgacagacgtttccaggaacgtctcaaagacgatacctcctttggaggcaatttaggtaaagccatcttccaggccaaaaagagggttctcgaaccctttggtctggtggaagactcaaagacggctccgaccggagacaagcggaaaggcgaagacgaacctcgtttgcccgacacttcttcacagactcccaagaaaaacaagaagcctcgcaaggaaagaccttccggcggggcagaagatccgggcgaaggcacctcttccaacgctggagcagcagcacccgcctctagtgtgggatcatctatcatggctgaaggaggtggcggcccagtgggcgatgcaggccagggtgccgatggagtgggcaattcctccggaaattggcattgcgattcccaatggctggaaaacggagtcgtcactcgaaccacccgaacctgggtcttgcccagctacaacaaccacctgtacaaacgaatccaaggacccagcggaggcgacaacaacaacaaattctttggattcagcaccccctggggatactttgactacaatcgattccactgccacttttccccgcgagactggcaacgactcatcaacaacaactggggcatccgtcccaaagcgatgcgctttagactctttaacatccaggttaaagaggtcacggtccaagacttcaacaccaccatcggcaacaacctcaccagtacggtccaggtctttgcggacaaggactaccaactgccgtacgtcctcggatcggctaccgaaggcaccttcccgccgttcccagcggatatctacacgatcccgcagtacgggtactgcacgctaaactacaacaacgaggcggtggatcgttcggccttctactgtctggactactttccctcagacatgctgcggacaggaaataactttgagtttacttacaccttcgaggacgttcctttccatagcatgtttgcccacaaccagacgctagaccggctgatgaatcccctcgtggatcagtacctctgggctttcagctccgtcagccaagcaggctcatctggacgagctcttcattactcgcgggcgactaaaaccaacatggcggctcaatataggaactggttacctgggcctttcttccgtgatcagcaaatctttacgggcgctagcaacatcactaaaaataacgtctttagcgtttgggaaaaaggcaagcaatgggaactcgacaatcggaccaacctaatgcagcccggtcctgcggcagcgaccacctttagcggagaacctgaccgtcaagccatgcaaaacacgctggcttttagcaggaccgtctacgatcaaacgaccgccacgaccgatcgtaaccagatactcatcaccaacgaagacgaaatcagacccaccaactcggtcggtatcgacgcgtggggagcagttcccaccaacaaccagtcgatcgtgacccccggcactcgcgcggccgtcaacaatcaaggggcgcttcccgggatggtgtggcaaaacagagacatttaccctacagggacccatttggccaaaattcccgacactgacaatcacttccatccgtccccgcttattgggcggtttggctgcaagcatccccctccccagattttcattaaaaacacacccgtccctgccaacccttcggaaacgttccagacggccaaagtggcctccttcatcaaccagtactcgaccggacagtgcaccgtcgaaatcttttgggaactcaagaaggaaacctccaagcgctggaaccccgaaatccagttcacctccaactttggcaacgcggccgacatccagtttgccgtctccgacacgggatcctattccgaacctcgtcccatcggtacccgttaccttaccaaacctctgtaa

SEQ ID NO: 547 - protein, 535 aa, Artificial Sequence
  Description of Artificial Sequence: Synthetic polypeptide
MAEGGGGPVGDAGQGADGVGNSSGNWHCDSQWLENGVVTRTTRTWVLPSYNNHLYKRIQGPSGGDNNNKFFGFSTPWGYFDYNRFHCHFSPRDWQRLINNNWGIRPKAMRFRLFNIQVKEVTVQDFNTTIGNNLTSTVQVFADKDYQLPYVLGSATEGTFPPFPADIYTIPQYGYCTLNYNNEAVDRSAFYCLDYFPSDMLRTGNNFEFTYTFEDVPFHSMFAHNQTLDRLMNPLVDQYLWAFSSVSQAGSSGRALHYSRATKTNMAAQYRNWLPGPFFRDQQIFTGASNITKNNVFSVWEKGKQWELDNRTNLMQPGPAAATTFSGEPDRQAMQNTLAFSRTVYDQTTATTDRNQILITNEDEIRPTNSVGIDAWGAVPTNNQSIVTPGTRAAVNNQGALPGMVWQNRDIYPTGTHLAKIPDTDNHFHPSPLIGRFGCKHPPPQIFIKNTPVPANPSETFQTAKVASFINQYSTGQCTVEIFWELKKETSKRWNPEIQFTSNFGNAADIQFAVSDTGSYSEPRPIGTRYLTKPL

SEQ ID NO: 548 - protein, 440 aa, Artificial Sequence
  Description of Artificial Sequence: Synthetic polypeptide
MELVDWLVEKGITTEKEWLLENRESFRSFQASSNSARQIKTALQGAIQEMLLTKTAEDYLVGKDPVSDDDIRQNRIYKILELNHYDPAYVGSILVGWCQKKWGKRNTLWLFGHATTGKTNIAEAIAHAVPFYGCVNWTNENFPFNDCVEKMIIWWEEGKMTAKVVETAKAILGGSRVRVDQKCKASVPIEPTPVIITSNTNMCYVIDGNTTTFEHKQPLEDRMFKLELLTRLPDDFGKVTKQEVRQFFRWSQDHLTPVIPEFLVRKAESRKRPAPSGEGYISPTKRPALAEQQQASESADPVPTRYRIKCSKHCGMDKMLFPCQICESMNRDINICAIHKTTDCKECFPDYGDKDDVELPPCTEHNVSRCYQCHSGELYRVTSDSDEKPAPESDEGTEPSYAPCTIHHLMGKSHGLVTCAACRLKNSTLHDDLDDGDLEQ

SEQ ID NO: 549 - protein, 319 aa, Artificial Sequence
  Description of Artificial Sequence: Synthetic polypeptide
MELVDWLVEKGITTEKEWLLENRESFRSFQASSNSARQIKTALQGAIQEMLLTKTAEDYLVGKDPVSDDDIRQNRIYKILELNHYDPAYVGSILVGWCQKKWGKRNTLWLFGHATTGKTNIAEAIAHAVPFYGCVNWTNENFPFNDCVEKMIIWWEEGKMTAKVVETAKAILGGSRVRVDQKCKASVPIEPTPVIITSNTNMCYVIDGNTTTFEHKQPLEDRMFKLELLTRLPDDFGKVTKQEVRQFFRWSQDHLTPVIPEFLVRKAESRKRPAPSGEGYISPTKRPALAEQQQASESADPVPTRLVGAVGQKGSECCS

SEQ ID NO: 550 - protein, 662 aa, Artificial Sequence
  Description of Artificial Sequence: Synthetic polypeptide
MRSYYEVIVQLPNDVESQVPGISDSFVNWITSREWTLPEDADWDLDQVDQVQLTLGDKIQREIRTHWGTMAKEPDFHYFIQLEQGEVFFHLHVLLETCSVKPMVLGRYIRHIQQKIVSKVYCATSLRWKDGCVVTKTKNFGGANKVRAESYIPAYLIPKQQPEVQWAWTNVPEYIKACLHRELRASLARLHFEEAGVSQSKENLARTADGAPVMPTRVSKRYMELVDWLVEKGITTEKEWLLENRESFRSFQASSNSARQIKTALQGAIQEMLLTKTAEDYLVGKDPVSDDDIRQNRIYKILELNHYDPAYVGSILVGWCQKKWGKRNTLWLFGHATTGKTNIAEAIAHAVPFYGCVNWTNENFPFNDCVEKMIIWWEEGKMTAKVVETAKAILGGSRVRVDQKCKASVPIEPTPVIITSNTNMCYVIDGNTTTFEHKQPLEDRMFKLELLTRLPDDFGKVTKQEVRQFFRWSQDHLTPVIPEFLVRKAESRKRPAPSGEGYISPTKRPALAEQQQASESADPVPTRYRIKCSKHCGMDKMLFPCQICESMNRDINICAIHKTTDCKECFPDYGDKDDVELPPCTEHNVSRCYQCHSGELYRVTSDSDEKPAPESDEGTEPSYAPCTIHHLMGKSHGLVTCAACRLKNSTLHDDLDDGDLEQ

SEQ ID NO: 551 - protein, 541 aa, Artificial Sequence
  Description of Artificial Sequence: Synthetic polypeptide
MRSYYEVIVQLPNDVESQVPGISDSFVNWITSREWTLPEDADWDLDQVDQVQLTLGDKIQREIRTHWGTMAKEPDFHYFIQLEQGEVFFHLHVLLETCSVKPMVLGRYIRHIQQKIVSKVYCATSLRWKDGCVVTKTKNFGGANKVRAESYIPAYLIPKQQPEVQWAWTNVPEYIKACLHRELRASLARLHFEEAGVSQSKENLARTADGAPVMPTRVSKRYMELVDWLVEKGITTEKEWLLENRESFRSFQASSNSARQIKTALQGAIQEMLLTKTAEDYLVGKDPVSDDDIRQNRIYKILELNHYDPAYVGSILVGWCQKKWGKRNTLWLFGHATTGKTNIAEAIAHAVPFYGCVNWTNENFPFNDCVEKMIIWWEEGKMTAKVVETAKAILGGSRVRVDQKCKASVPIEPTPVIITSNTNMCYVIDGNTTTFEHKQPLEDRMFKLELLTRLPDDFGKVTKQEVRQFFRWSQDHLTPVIPEFLVRKAESRKRPAPSGEGYISPTKRPALAEQQQASESADPVPTRLVGAVGQKGSECCS

SEQ ID NO: 552 - protein, 743 aa, Artificial Sequence
  Description of Artificial Sequence: Synthetic polypeptide
MSLISDAIPDWLERLVKKGVNAAADFYHLESGPPRPKANQQTQESLEKDDSRGLVFPGYNYLGPFNGLDKGEPVNEADAAALEHDKAYDLEIKDGHNPYFEYNEADRRFQERLKDDTSFGGNLGKAIFQAKKRVLEPFGLVEDSKTAPTGDKRKGEDEPRLPDTSSQTPKKNKKPRKERPSGGAEDPGEGTSSNAGAAAPASSVGSSIMAEGGGGPVGDAGQGADGVGNSSGNWHCDSQWLENGVVTRTTRTWVLPSYNNHLYKRIQGPSGGDNNNKFFGFSTPWGYFDYNRFHCHFSPRDWQRLINNNWGIRPKAMRFRLFNIQVKEVTVQDFNTTIGNNLTSTVQVFADKDYQLPYVLGSATEGTFPPFPADIYTIPQYGYCTLNYNNEAVDRSAFYCLDYFPSDMLRTGNNFEFTYTFEDVPFHSMFAHNQTLDRLMNPLVDQYLWAFSSVSQAGSSGRALHYSRATKTNMAAQYRNWLPGPFFRDQQIFTGASNITKNNVFSVWEKGKQWELDNRTNLMQPGPAAATTFSGEPDRQAMQNTLAFSRTVYDQTTATTDRNQILITNEDEIRPTNSVGIDAWGAVPTNNQSIVTPGTRAAVNNQGALPGMVWQNRDIYPTGTHLAKIPDTDNHFHPSPLIGRFGCKHPPPQIFIKNTPVPANPSETFQTAKVASFINQYSTGQCTVEIFWELKKETSKRWNPEIQFTSNFGNAADIQFAVSDTGSYSEPRPIGTRYLTKPL

SEQ ID NO: 553 - protein, 598 aa, Artificial Sequence
  Description of Artificial Sequence: Synthetic polypeptide
TAPTGDKRKGEDEPRLPDTSSQTPKKNKKPRKERPSGGAEDPGEGTSSNAGAAAPASSVGSSIMAEGGGGPVGDAGQGADGVGNSSGNWHCDSQWLENGVVTRTTRTWVLPSYNNHLYKRIQGPSGGDNNNKFFGFSTPWGYFDYNRFHCHFSPRDWQRLINNNWGIRPKAMRFRLFNIQVKEVTVQDFNTTIGNNLTSTVQVFADKDYQLPYVLGSATEGTFPPFPADIYTIPQYGYCTLNYNNEAVDRSAFYCLDYFPSDMLRTGNNFEFTYTFEDVPFHSMFAHNQTLDRLMNPLVDQYLWAFSSVSQAGSSGRALHYSRATKTNMAAQYRNWLPGPFFRDQQIFTGASNITKNNVFSVWEKGKQWELDNRTNLMQPGPAAATTFSGEPDRQAMQNTLAFSRTVYDQTTATTDRNQILITNEDEIRPTNSVGIDAWGAVPTNNQSIVTPGTRAAVNNQGALPGMVWQNRDIYPTGTHLAKIPDTDNHFHPSPLIGRFGCKHPPPQIFIKNTPVPANPSETFQTAKVASFINQYSTGQCTVEIFWELKKETSKRWNPEIQFTSNFGNAADIQFAVSDTGSYSEPRPIGTRYLTKPL

SEQ ID NO: 554 - DNA, 4694 bp, Artificial Sequence
  Description of Artificial Sequence: Synthetic polynucleotide
tggccagtttccaagacaggctcgctcgctcactcgggccggggccccaaaggggcccctagcgaccgcttcgcggtcgcggcccgagtgagcgagcgagcctgtcttggaaactggccagcactccggtgaggtaatgccgtcacgtggtcgggaatgggaacgggaaatctcgcgagaacgtaaacaaatataagacggcgccacacggcgctgcgtcatacgcgcgcgcgcaccggcgagatgaggtcgtactacgaggtcatcgttcagctgcccaacgacgtcgagagtcaggtacctggaatctccgattcgttcgtcaactggattacgtcgcgagaatggacgttgcctgaggacgccgattgggatttggaccaggtcgatcaagttcaactgacgctcggcgacaaaatccaacgggagattcgaactcattgggggacgatggccaaagaaccggactttcactattttatccaactggaacaaggtgaggtgttctttcatttacacgtcctgctggaaacgtgttccgtaaagccgatggtactcggaagatatatccgacatattcaacaaaaaattgtgagtaaagtctactgcgccacgagcctacgatggaaggatggatgcgtggtgaccaagaccaaaaatttcgggggcgcgaacaaggtccgggccgagtcgtatattcccgcctacctgatcccgaaacagcaaccggaagtgcagtgggcgtggactaacgtgcccgagtatataaaagcgtgcttgcaccgagaactgcgtgccagtctcgcgcgacttcacttcgaggaggcgggcgtctcgcaatccaaggaaaatctcgcgagaactgcagacggcgctcccgtgatgccgacccgcgtcagcaaacgctacatggagctcgtggattggctcgtggagaaggggatcaccaccgagaaggaatggctgctggaaaacagagaaagctttcggagctttcaggcctcgagcaactcggcgcgtcagatcaagacggccctgcaaggcgccattcaggagatgcttctgaccaagacggcggaggactacctcgtcggaaaggatcccgtctcggacgacgacatccgtcagaaccgcatctacaagattctggaactgaaccactacgacccagcgtacgtggggagtattttggtcgggtggtgccagaagaaatggggcaagcgaaacacgctgtggctgttcggacatgcgaccaccggcaagaccaacatcgcggaggctattgcccatgctgtgccgttctatggatgcgttaactggaccaacgagaactttccgttcaacgactgcgtcgaaaaaatgattatctggtgggaggagggcaaaatgaccgccaaagtggtggaaacagccaaggcgattctgggaggatctcgggtgagagtggaccaaaaatgcaaagcttcggttccgatcgaaccgacgccggtcattattaccagtaacaccaacatgtgttatgtcatcgacgggaacacgaccacgttcgagcataagcagccgttggaggacaggatgtttaagctcgaattgctgactcggttgcctgatgactttggtaaggtgaccaaacaggaggtgcgtcaattcttcaggtggtctcaggatcacctgacccctgtgatcccagaattcctagtgcggaaggcggagtctcgcaaaagacccgccccttccggggaaggctatataagcccgacaaagcggcccgcgctcgcagagcagcagcaggcgtcggagagcgcggacccggttcccaccaggtatcgtatcaaatgctcgaaacattgcggtatggataaaatgttgtttccttgccaaatttgtgaatcgatgaacagagatattaatatttgtgctattcataaaacgaccgactgtaaagagtgtttccccgactacggggataaagatgatgtagaactacccccctgtacagaacacaacgtgtctcgttgttatcaatgtcattcgggcgaattgtatcgcgtgacttcggactctgacgagaaacctgcccccgagagtgatgaaggcaccgagccatcctatgctccctgcacgattcaccacctgatgggcaagagtcacgggttagtcacttgcgcggcgtgtcggttgaaaaatagtacgttgcatgatgacttggatgacggtgatctcgaacaataaatgattgaaatgtagccatgtctctcatttctgatgcgattccagattggttggagcggttggtcaaaaagggagtgaatgctgcagctgatttctaccatttggaaagcggtcctcctcgtcctaaggcaaatcagcaaactcaagaatctcttgaaaaggacgattcgagaggtctcgtgttcccaggctacaattatctaggccctttcaacggtctagataaaggagaacccgtcaacgaggcagacgctgccgccttagaacacgacaaggcttacgacctcgaaatcaaggacgggcacaacccgtactttgagtacaacgaggccgacagacgtttccaggaacgtctcaaagacgatacctcctttggaggcaatttaggtaaagccatcttccaggccaaaaagagggttctcgaaccctttggtctggtggaagactcaaagacggctccgaccggagacaagcggaaaggcgaagacgaacctcgtttgcccgacacttcttcacagactcccaagaaaaacaagaagcctcgcaaggaaagaccttccggcggggcagaagatccgggcgaaggcacctcttccaacgctggagcagcagcacccgcctctagtgtgggatcatctatcatggctgaaggaggtggcggcccagtgggcgatgcaggccagggtgccgatggagtgggcaattcctccggaaattggcattgcgattcccaatggctggaaaacggagtcgtcactcgaaccacccgaacctgggtcttgcccagctacaacaaccacctgtacaaacgaatccaaggacccagcggaggcgacaacaacaacaaattctttggattcagcaccccctggggatactttgactacaatcgattccactgccacttttccccgcgagactggcaacgactcatcaacaacaactggggcatccgtcccaaagcgatgcgctttagactctttaacatccaggttaaagaggtcacggtccaagacttcaacaccaccatcggcaacaacctcaccagtacggtccaggtctttgcggacaaggactaccaactgccgtacgtcctcggatcggctaccgaaggcaccttcccgccgttcccagcggatatctacacgatcccgcagtacgggtactgcacgctaaactacaacaacgaggcggtggatcgttcggccttctactgtctggactactttccctcagacatgctgcggacaggaaataactttgagtttacttacaccttcgaggacgttcctttccatagcatgtttgcccacaaccagacgctagaccggctgatgaatcccctcgtggatcagtacctctgggctttcagctccgtcagccaagcaggctcatctggacgagctcttcattactcgcgggcgactaaaaccaacatggcggctcaatataggaactggttacctgggcctttcttccgtgatcagcaaatctttacgggcgctagcaacatcactaaaaataacgtctttagcgtttgggaaaaaggcaagcaatgggaactcgacaatcggaccaacctaatgcagcccggtcctgcggcagcgaccacctttagcggagaacctgaccgtcaagccatgcaaaacacgctggcttttagcaggaccgtctacgatcaaacgaccgccacgaccgatcgtaaccagatactcatcaccaacgaagacgaaatcagacccaccaactcggtcggtatcgacgcgtggggagcagttcccaccaacaaccagtcgatcgtgacccccggcactcgcgcggccgtcaacaatcaaggggcgcttcccgggatggtgtggcaaaacagagacatttaccctacagggacccatttggccaaaattcccgacactgacaatcacttccatccgtccccgcttattgggcggtttggctgcaagcatccccctccccagattttcattaaaaacacacccgtccctgccaacccttcggaaacgttccagacggccaaagtggcctccttcatcaaccagtactcgaccggacagtgcaccgtcgaaatcttttgggaactcaagaaggaaacctccaagcgctggaaccccgaaatccagttcacctccaactttggcaacgcggccgacatccagtttgccgtctccgacacgggatcctattccgaacctcgtcccatcggtacccgttaccttaccaaacctctgtaaattaaacccttcaataaaccgtttatgcgtaactgtatttccgtctcctgtcgttattcagtcacatgatgcggcattacctcaccggagtgctggccagtttccaagacaggctcgctcgctcactcgggccggggccccaaaggggcccctagcgaccgcttcgcggtcgcggcccgagtgagcgagcgagcctgtcttggaaactggcca

SEQ ID NO: 555 - DNA, 2211 bp, Artificial Sequence
  Description of Artificial Sequence: Synthetic polynucleotide
atggctgctgatggttatcttccagattggctcgaggacactctctctgaaggaataagacagtggtggaagctcaaacctggcccaccaccaccaaagcccgcagagcggcataaggacgacagcaggggtcttgtgcttcctgggtacaagtacctcggacccttcaacggactcgacaagggagagccggtcaacgaggcagacgcagcggccctcgagcacgacaaggcctacgaccagcagctcaaggccggtgacaacccctacctcaagtacaaccacgccgacgcggagttccagcagcggcttcagggcgacacatcgtttgggggcaacctcggcagagcagtcttccaggccaaaaagagggttcttgaacctcttggtctggttgagcaagcgggtgagacggctcctggaaagaagagaccgttgattgaatccccccagcagcccgactcctccacgggtatcggcaaaaaaggcaagcagccggctaaaaagagactcaattttggtcagactggcgactcagagtcagtccccgacccacaacctctcggagaacctccagcaacccccgctgctgtgggacctactacaatggcttcaggtggtggcgcaccaatggcagacaataacgaaggcgccgacggagtgggtaatgcctcaggaaattggcattgcgattccacatggctgggcgacagagtcatcaccaccagcacccgcacctgggccttgcccacctacaataaccacctctacaagcaaatctccagtgcttcaacgggggccagcaacgacaaccactacttcggctacagcaccccctgggggtattttgacttcaacagattccactgccacttttcaccacgtgactggcagcgactcatcaacaacaattggggattccggcccaagagactcaacttcaaactcttcaacatccaagtcaaggaggtcacgacgaatgatggcgtcacaaccatcgctaataaccttaccagcacggttcaagtcttctcggactcagactatcagctcccgtacgtgctcgggtcggctcacgagggctgcctcccgccgttcccagcagacgtcttcatggtgccacagtatggatacctcaccctgaacaacgggagtcaggcagtaggacgctcttcattttactgcctggagtactttccttctcagatgctgcgtaccggaaacaactttaccttcagctacacttttgaggacgttcctttccacagcagctacgctcacagccagagtctggaccgtctcatgaatcctctcatcgaccagtacctgtattacctgaacagaactcagaatcagtccggaagtgcccaaaacaaggacttgctgtttagccgggggtctccagctggcatgtctgttcagcccaaaaactggctacctggaccctgttatcggcagcagcgcgtttctaaaacaaaaacagacaacaacaacagcaactttacctggactggtgcttcaaaatataaccttaatgggcgtgaatctataatcaaccctggcactgctatggcctcacacaaagacgacaaagacaagttctttcccatgagcggtgtcatgatttttggaaaggagagcgccggagcttcaaacactgcattggacaatgtcatgatcacagacgaagaggaaatcaaagccactaaccccgtggccaccgaaagatttgggactgtggcagtcaatctccagagcagcagcacagaccctgcgaccggagatgtgcatgttatgggagccttacctggaatggtgtggcaagacagagacgtatacctgcagggtcccatttgggccaaaattcctcacacagatggacactttcacccgtctcctcttatgggcggctttggactcaagaacccgcctcctcagatcctcatcaaaaacacgcctgttcctgcgaatcctccggcggagttttcagctacaaagtttgcttcattcatcacccaatactccacaggacaagtgagtgtggaaattgaatgggagctgcagaaagaaaacagcaagcgctggaatcccgaagtgcagtacacatccaattatgcaaaatctgccaacgttgattttactgtggacaacaatggactttatactgagcctcgccccattggcacccgttacctcacccgtcccctgtaa

SEQ ID NO: 556 - protein, 736 aa, Artificial Sequence
  Description of Artificial Sequence: Synthetic polypeptide
MAADGYLPDWLEDTLSEGIRQWWKLKPGPPPPKPAERHKDDSRGLVLPGYKYLGPFNGLDKGEPVNEADAAALEHDKAYDQQLKAGDNPYLKYNHADAEFQQRLQGDTSFGGNLGRAVFQAKKRVLEPLGLVEQAGETAPGKKRPLIESPQQPDSSTGIGKKGKQPAKKRLNFGQTGDSESVPDPQPLGEPPATPAAVGPTTMASGGGAPMADNNEGADGVGNASGNWHCDSTWLGDRVITTSTRTWALPTYNNHLYKQISSASTGASNDNHYFGYSTPWGYFDFNRFHCHFSPRDWQRLINNNWGFRPKRLNFKLFNIQVKEVTTNDGVTTIANNLTSTVQVFSDSDYQLPYVLGSAHEGCLPPFPADVFMVPQYGYLTLNNGSQAVGRSSFYCLEYFPSQMLRTGNNFTFSYTFEDVPFHSSYAHSQSLDRLMNPLIDQYLYYLNRTQNQSGSAQNKDLLFSRGSPAGMSVQPKNWLPGPCYRQQRVSKTKTDNNNSNFTWTGASKYNLNGRESIINPGTAMASHKDDKDKFFPMSGVMIFGKESAGASNTALDNVMITDEEEIKATNPVATERFGTVAVNLQSSSTDPATGDVHVMGALPGMVWQDRDVYLQGPIWAKIPHTDGHFHPSPLMGGFGLKNPPPQILIKNTPVPANPPAEFSATKFASFITQYSTGQVSVEIEWELQKENSKRWNPEVQYTSNYAKSANVDFTVDNNGLYTEPRPIGTRYLTRPL

SEQ ID NO: 557 - DNA, 2211 bp, Artificial Sequence
  Description of Artificial Sequence: Synthetic polynucleotide
atggcttccgatggttatcttccagattggctcgaggacaacctctctgagggcatccgcgagtggtgggacttgaaacctggagccccgaaacccaaagccaaccagcaaaagcaggacgacggccggggtctggtgcttcctggctacaagtacctcggacccttcaacggactcgacaagggggagcccgtcaacgcggcggatgcagcggccctcgagcacgacaaggcctacgaccagcagctcagagcgggtgacaatccgtacctgcggtataaccacgccgacgccgagtttcaggagcgtctgcaagaagatacgtcttttgggggcaacctcgggcgagcagtcttccaggccaagaagagggttctcgaaccttttggtctggttgaggaaggtgctaagacggctcctggaaagaaacgtccggtagagcagtcgccacaagagccagactcctcctcgggcattggcaagacaggccagcagcccgctaaaaagagactcaattttggtcagactggcgactcagagtcagtccccgacccacaacctctcggagaacctccagcaacccccgctgctgtgggacctactacaatggcttcaggcggtggcgcaccaatggcagacaataacgaaggcgccgacggagtgggtaatgcctcaggaaattggcattgcgattccacatggctgggcgacagagtcatcaccaccagcacccgaacatgggccttgcccacctataacaaccacctctacaagcaaatctccagtgcttcaacgggggccagcaacgacaaccactacttcggctacagcaccccctgggggtattttgatttcaacagattccactgccatttctcaccacgtgactggcagcgactcatcaacaacaattggggattccggcccaagagactcaacttcaaactcttcaacatccaagtcaaggaggtcacgacgaatgatggcgtcacaaccatcgctaataaccttaccagcacggttcaagtcttctcggactcggagtaccagcttccgtacgtcctcggctctgcgcaccagggctgcctccctccgttcccggcggacgtgttcatgattccgcagtacggctacctaacgctcaacaatggcagccaggcagtgggacggtcatccttttactgcctggaatatttcccatcgcagatgctgagaacgggcaataactttaccttcagctacaccttcgaggacgtgcctttccacagcagctacgcgcacagccagagcctggaccggctgatgaatcctctcatcgaccagtacctgtattacctgaacagaactcagaatcagtccggaagtgcccaaaacaaggacttgctgtttagccgggggtctccagctggcatgtctgttcagcccaaaaactggctacctggaccctgttaccggcagcagcgcgtttctaaaacaaaaacagacaacaacaacagcaactttacctggactggtgcttcaaaatataaccttaatgggcgtgaatctataatcaaccctggcactgctatggcctcacacaaagacgacaaagacaagttctttcccatgagcggtgtcatgatttttggaaaggagagcgccggagcttcaaacactgcattggacaatgtcatgatcacagacgaagaggaaatcaaagccactaaccccgtggccaccgaaagatttgggactgtggcagtcaatctccagagcagcagcacagaccctgcgaccggagatgtgcatgttatgggagccttacctggaatggtgtggcaagacagagacgtatacctgcagggtcccatttgggccaaaattcctcacacagatggacactttcacccgtctcctcttatgggcggctttggacttaagcacccgcctcctcagatcctcatcaaaaacacgcctgttcctgcgaatcctccggcagagttttcggctacaaagtttgcttcattcatcacccagtattctactggccaagtcagcgtggagattgaatgggagctgcagaaagaaaacagcaaacgctggaatcccgaagtgcagtatacatctaactatgcaaaatctgccaacgttgatttcactgtggacaacaatggactttatactgagcctcgtcccattggcacccgttacctcacccgtcccctgtaa

SEQ ID NO: 558 - protein, 736 aa, Artificial Sequence
  Description of Artificial Sequence: Synthetic polypeptide
MASDGYLPDWLEDNLSEGIREWWDLKPGAPKPKANQQKQDDGRGLVLPGYKYLGPFNGLDKGEPVNAADAAALEHDKAYDQQLRAGDNPYLRYNHADAEFQERLQEDTSFGGNLGRAVFQAKKRVLEPFGLVEEGAKTAPGKKRPVEQSPQEPDSSSGIGKTGQQPAKKRLNFGQTGDSESVPDPQPLGEPPATPAAVGPTTMASGGGAPMADNNEGADGVGNASGNWHCDSTWLGDRVITTSTRTWALPTYNNHLYKQISSASTGASNDNHYFGYSTPWGYFDFNRFHCHFSPRDWQRLINNNWGFRPKRLNFKLFNIQVKEVTTNDGVTTIANNLTSTVQVFSDSEYQLPYVLGSAHQGCLPPFPADVFMIPQYGYLTLNNGSQAVGRSSFYCLEYFPSQMLRTGNNFTFSYTFEDVPFHSSYAHSQSLDRLMNPLIDQYLYYLNRTQNQSGSAQNKDLLFSRGSPAGMSVQPKNWLPGPCYRQQRVSKTKTDNNNSNFTWTGASKYNLNGRESIINPGTAMASHKDDKDKFFPMSGVMIFGKESAGASNTALDNVMITDEEEIKATNPVATERFGTVAVNLQSSSTDPATGDVHVMGALPGMVWQDRDVYLQGPIWAKIPHTDGHFHPSPLMGGFGLKHPPPQILIKNTPVPANPPAEFSATKFASFITQYSTGQVSVEIEWELQKENSKRWNPEVQYTSNYAKSANVDFTVDNNGLYTEPRPIGTRYLTRPL

SEQ ID NO: 559 - DNA, 2211 bp, Artificial Sequence
  Description of Artificial Sequence: Synthetic polynucleotide
atggctgctgatggttatcttccagattggctcgaggacactctctctgaaggaataagacagtggtggaagctcaaacctggcccaccaccaccaaagcccgcagagcggcataaggacgacagcaggggtcttgtgcttcctgggtacaagtacctcggacccttcaacggactcgacaagggagagccggtcaacgaggcagacgcagcggccctcgagcacgacaaggcctacgaccagcagctcaaggccggtgacaacccctacctcaagtacaaccacgccgacgcggagttccagcagcggcttcagggcgacacatcgtttgggggcaacctcggcagagcagtcttccaggccaaaaagagggttcttgaacctcttggtctggttgagcaagcgggtgagacggctcctggaaagaagagaccgttgattgaatccccccagcagcccgactcctccacgggtatcggcaaaaaaggcaagcagccggctaaaaagagactcaattttggtcagactggcgactcagagtcagtccccgacccacaacctctcggagaacctccagcaacccccgctgctgtgggacctactacaatggcttcaggtggtggcgcaccaatggcagacaataacgaaggcgccgacggagtgggtaatgcctcaggaaattggcattgcgattccacatggctgggcgacagagtcatcaccaccagcacccgcacctgggccttgcccacctacaataaccacctctacaagcaaatctccagtgcttcaacgggggccagcaacgacaaccactacttcggctacagcaccccctgggggtattttgacttcaacagattccactgccacttttcaccacgtgactggcagcgactcatcaacaacaattggggattccggcccaagagactcaacttcaaactcttcaacatccaagtcaaggaggtcacgacgaatgatggcgtcacaaccatcgctaataaccttaccagcacggttcaagtcttctcggactcagactatcagctcccgtacgtgctcgggtcggctcacgagggctgcctcccgccgttcccagcagacgtcttcatggtgccacagtatggatacctcaccctgaacaacgggagtcaggcagtaggacgctcttcattttactgcctggagtactttccttctcagatgctgcgtaccggaaacaactttaccttcagctacacttttgaggacgttcctttccacagcagctacgctcacagccagagtctggaccgtctcatgaatcctctcatcgaccagtacctgtattacctgaacagaactcagaatcagtccggaagtgcccaaaacaaggacttgctgtttagccgggggtctccaactggcatgtctgttcagcccaaaaactggctacctggaccctgttatcggcagcagcgcgtttctaaaacaaaaacagacaacaacaacagcaactttacctggactggtgcttcaaaatataaccttaatgggcgtgaatctataatcaaccctggcactgctatggcctcacacaaagacgacaaagacaagttctttcccatgagcggtgtcatgatttttggaaaggagagcgccggagcttcaaacactgcattggacaatgtcatgatcacagacgaagaggaaatcaaagccactaaccccgtggccactgaaagatttgggactgtggcagtcaatctccagagcagcagcacagaccctgcgaccggagatgtgcatgccatgggagccttacctggaatggtgtggcaagacagagacgtatacctgcagggtcctatttgggccaaaattcctcacacggatggacactttcacccgtctcctctcatgggcggctttggactcaagaacccgcctcctcagatcctcatcaaaaacacgcctgttcctgcgaatcctccggcggagttttcagctacaaagtttgcttcattcatcacccagtattccacaggacaagtgagcgtggagattgaatgggagctgcagaaagaaaacagcaaacgctggaatcccgaagtgcagtatacatctaactatgcaaaatctgccaacgttgatttcactgtggacaacaatggactttatactgagcctcgccccattggcacccgttacctcacccgtcccctgtaa

SEQ ID NO: 560 - protein, 736 aa, Artificial Sequence
  Description of Artificial Sequence: Synthetic polypeptide
MAADGYLPDWLEDTLSEGIRQWWKLKPGPPPPKPAERHKDDSRGLVLPGYKYLGPFNGLDKGEPVNEADAAALEHDKAYDQQLKAGDNPYLKYNHADAEFQQRLQGDTSFGGNLGRAVFQAKKRVLEPLGLVEQAGETAPGKKRPLIESPQQPDSSTGIGKKGKQPAKKRLNFGQTGDSESVPDPQPLGEPPATPAAVGPTTMASGGGAPMADNNEGADGVGNASGNWHCDSTWLGDRVITTSTRTWALPTYNNHLYKQISSASTGASNDNHYFGYSTPWGYFDFNRFHCHFSPRDWQRLINNNWGFRPKRLNFKLFNIQVKEVTTNDGVTTIANNLTSTVQVFSDSDYQLPYVLGSAHEGCLPPFPADVFMVPQYGYLTLNNGSQAVGRSSFYCLEYFPSQMLRTGNNFTFSYTFEDVPFHSSYAHSQSLDRLMNPLIDQYLYYLNRTQNQSGSAQNKDLLFSRGSPTGMSVQPKNWLPGPCYRQQRVSKTKTDNNNSNFTWTGASKYNLNGRESIINPGTAMASHKDDKDKFFPMSGVMIFGKESAGASNTALDNVMITDEEEIKATNPVATERFGTVAVNLQSSSTDPATGDVHAMGALPGMVWQDRDVYLQGPIWAKIPHTDGHFHPSPLMGGFGLKNPPPQILIKNTPVPANPPAEFSATKFASFITQYSTGQVSVEIEWELQKENSKRWNPEVQYTSNYAKSANVDFTVDNNGLYTEPRPIGTRYLTRPL

SEQ ID NO: 561 - DNA, 2211 bp, Artificial Sequence
  Description of Artificial Sequence: Synthetic polynucleotide
atggctgccgatggttatcttccagattggctcgaggacaacctctctgagggcattcgcgagtggtgggcgctgaaacctggagccccgaagcccaaagccaaccagcaaaagcaggacgacggccggggtctggtgcttcctggctacaagtacctcggacccttcaacggactcgacaagggggagcccgtcaacgcggcggatgcagcggccctcgagcacgacaaggcctacgaccagcagctcaaagcgggtgacaatccgtacctgcggtataaccacgccgacgccgagtttcaggagcgtctgcaagaagatacgtcttttgggggcaacctcgggcgagcagtcttccaggccaagaagcgggttctcgaacctctcggtctggttgaggaaggcgctaagacggctcctggaaagaaacgtccggtagagcaatcgccacaagagccagactcctcctcgggcatcggcaagacaggccagcagcccgctaaaaagagactcaattttggtcagactggcgactcagagtcagtccccgacccacaacctctcggagaacctccagcaacccccgctgctgtgggacctactacaatggcttcaggcggtggcgcaccaatggcagacaataacgaaggcgccgacggagtgggtaatgcctcaggaaattggcattgcgattccacatggctgggcgacagagtcatcaccaccagcacccgaacatgggccttgcccacctataacaaccacctctacaagcaaatctccagtgcttcgacgggggccagcaacgacaaccactacttcggctacagcaccccctgggggtattttgactttaacagattccactgccacttttcaccacgtgactggcagcgactcatcaacaacaactggggattccggcccaagagactcagcttcaagctcttcaacatccaggtcaaggaggtcacgacgaatgatggcgtcacaaccatcgctaataaccttaccagcacggttcaagtcttctcggactcggagtaccagcttccgtacgtcctcggctctgcgcaccagggctgcctccctccgttcccggcggacgtgttcatgattccgcaatacggctacctgacgctcaacaatggcagccaagccgtgggacgttcatccttttactgcctggaatatttcccttctcagatgctgagaacgggcaacaactttaccttcagctacacctttgaggaagtgcctttccacagcagctacgcgcacagccagagcctggaccggctgatgaatcctctcatcgatcaatacctgtattacctgaacagaactcaaaatcagtccggaagtgcccaaaacaaggacttgctgtttagccgtgggtctccagctggcatgtctgttcagcccaaaaactggctacctggaccctgttatcggcagcagcgcgtttctaaaacaaaaacagacaacaacaacagcaattttacctggactggtgcttcaaaatataacctcaatgggcgtgaatccatcatcaaccctggcactgctatggcctcacataaagacgacgaagacaagttctttcccatgagcggtgtcatgatttttggaaaagagagcgccggagcttcaaacactgcattggacaatgtcatgattacagacgaagaggaaattaaagccactaaccctgtggccaccgaaagatttgggaccgtggcagtcaatttccagagcagcagcacagaccctgcgaccggagatgtgcatgctatgggagcattacctggcatggtgtggcaagatagagacgtgtacctgcagggtcccatttgggccaaaattcctcacacagatggacactttcacccgtctcctcttatgggcggctttggactcaagaacccgcctcctcagatcctcatcaaaaacacgcctgttcctgcgaatcctccggcggagttttcagctacaaagtttgcttcattcatcacccaatactccacaggacaagtgagcgtggagattgaatgggagctgcagaaagaaaacagcaaacgctggaatcccgaagtgcagtatacatctaactatgcaaaatctgccaacattgatttcactgtggacaacaatggactttatactgagcctcgccccattggcacccgttacctcacccgtccccagtaa

SEQ ID NO: 562 - protein, 736 aa, Artificial Sequence
  Description of Artificial Sequence: Synthetic polypeptide
MAADGYLPDWLEDNLSEGIREWWALKPGAPKPKANQQKQDDGRGLVLPGYKYLGPFNGLDKGEPVNAADAAALEHDKAYDQQLKAGDNPYLRYNHADAEFQERLQEDTSFGGNLGRAVFQAKKRVLEPLGLVEEGAKTAPGKKRPVEQSPQEPDSSSGIGKTGQQPAKKRLNFGQTGDSESVPDPQPLGEPPATPAAVGPTTMASGGGAPMADNNEGADGVGNASGNWHCDSTWLGDRVITTSTRTWALPTYNNHLYKQISSASTGASNDNHYFGYSTPWGYFDFNRFHCHFSPRDWQRLINNNWGFRPKRLSFKLFNIQVKEVTTNDGVTTIANNLTSTVQVFSDSEYQLPYVLGSAHQGCLPPFPADVFMIPQYGYLTLNNGSQAVGRSSFYCLEYFPSQMLRTGNNFTFSYTFEEVPFHSSYAHSQSLDRLMNPLIDQYLYYLNRTQNQSGSAQNKDLLFSRGSPAGMSVQPKNWLPGPCYRQQRVSKTKTDNNNSNFTWTGASKYNLNGRESIINPGTAMASHKDDEDKFFPMSGVMIFGKESAGASNTALDNVMITDEEEIKATNPVATERFGTVAVNFQSSSTDPATGDVHAMGALPGMVWQDRDVYLQGPIWAKIPHTDGHFHPSPLMGGFGLKNPPPQILIKNTPVPANPPAEFSATKFASFITQYSTGQVSVEIEWELQKENSKRWNPEVQYTSNYAKSANIDFTVDNNGLYTEPRPIGTRYLTRPQ

SEQ ID NO: 563 - DNA, 2211 bp, Artificial Sequence
  Description of Artificial Sequence: Synthetic polynucleotide
atggctgccgatggttatcttccagattggctcgaggacaacctctctgagggcattcgcgagtggtgggacttgaaacctggagccccgaaacccaaagccaaccagcaaaagcaggacgacggccggggtctggtgcttcctggctacaagtacctcggacccttcaacggactcgacaagggggagcccgtcaacgcggcggatgcagcggccctcgagcacgacaaggcctacgaccagcagctcaaagcgggtgacaatccgtaccttcggtataaccacgccgacgccgagtttcaggagcgtctgcaagaagatacgtcttttgggggcaacctcgggcgagcagtcttccaggccaaaaagagggttctcgaacctctcggtctggttgaggaagcggctaagacggctcctggaaagaaacgtccggtagagcagtcgccacaagagccagactcctcctcgggcattggcaagacaggccagcagcccgctaaaaagagactcaattttggtcagactggcgactcagagtcagtccccgacccacaacctctcggagaacctcccgcagccccctcaggtgtgggatctcttacaatggcttcaggtggtggcgcaccaatggcagacaataacgaaggcgccgacggagtgggtaatgcctcaggaaattggcattgcgattccacatggctgggcgacagagtcatcaccaccagcacccgcacctgggccttgcccacctacaataaccacctctacaagcaaatctccagtgcttcaacgggggccagcaacgacaaccactacttcggctacagcaccccctgggggtattttgacttcaacagattccactgccacttttcaccacgtgactggcaaagactcatcaacaacaattggggattccggcccaagagactcaacttcaagctcttcaacatccaagtcaaggaggtcacgacgaatgatggcgtcacgaccatcgctaataaccttaccagcacggttcaagtcttctcggactcggagtaccagttgccgtacgtcctcggctctgcgcaccagggctgcctccctccgttcccggcggacgtgttcatgattccgcagtacggctacctaacgctcaacaatggcagccaggcagtgggacggtcatccttttactgcctggaatatttcccatcgcagatgctgagaacgggcaacaactttaccttcagctacacctttgaggaagtgcctttccacagcagctacgcgcacagccagagcctggaccggctgatgaatcctctcatcgaccagtacctgtattacctgaacagaactcaaaatcagtccggaagtgcccaaaacaaggacttgctgtttagccgtgggtctccagctggcatgtctgttcagcccaaaaactggctacctggaccctgttaccggcagcagtgcgtttctaaaacaaaaacagacaacaacaacagcaactttacctggactggtgcttcaaaatataaccttaatgggcgtgaatctataatcaaccctggcactgctatggcctcacacaaagacgacaaagacaagttctttcccatgagcggtgtcatgatttttggaaaggagagcgccggagcttcaaacactgcattggacaatgtcatgatcacagacgaagaggaaatcaaagccactaaccccgtggccaccgaaagatttgggactgtggcagtcaatctccagagcagcagcacagaccctgcgaccggagatgtgcatgttatgggagccttacctggaatggtgtggcaagacagagacgtatacctgcagggtcctatttgggccaaaattcctcacacagatggacactttcacccgtctcctcttatgggcggctttggactcaagaacccgcctcctcagatcctcatcaaaaacacgcctgttcctgcgaatcctccggcggagttttcagctacaaagtttgcttcattcatcacccaatactccacaggacaagtgagcgtggagattgaatgggagctgcagaaagaaaacagcaagcgctggaatcccgaagtgcagtacacatccaattatgcaaaatctgccaacgttgatttcactgtggacaacaatggactttatactgagcctcgccccattggcacccgttacctcacccgtcccctgtaa

SEQ ID NO: 564 - protein, 736 aa, Artificial Sequence
  Description of Artificial Sequence: Synthetic polypeptide
MAADGYLPDWLEDNLSEGIREWWDLKPGAPKPKANQQKQDDGRGLVLPGYKYLGPFNGLDKGEPVNAADAAALEHDKAYDQQLKAGDNPYLRYNHADAEFQERLQEDTSFGGNLGRAVFQAKKRVLEPLGLVEEAAKTAPGKKRPVEQSPQEPDSSSGIGKTGQQPAKKRLNFGQTGDSESVPDPQPLGEPPAAPSGVGSLTMASGGGAPMADNNEGADGVGNASGNWHCDSTWLGDRVITTSTRTWALPTYNNHLYKQISSASTGASNDNHYFGYSTPWGYFDFNRFHCHFSPRDWQRLINNNWGFRPKRLNFKLFNIQVKEVTTNDGVTTIANNLTSTVQVFSDSEYQLPYVLGSAHQGCLPPFPADVFMIPQYGYLTLNNGSQAVGRSSFYCLEYFPSQMLRTGNNFTFSYTFEEVPFHSSYAHSQSLDRLMNPLIDQYLYYLNRTQNQSGSAQNKDLLFSRGSPAGMSVQPKNWLPGPCYRQQCVSKTKTDNNNSNFTWTGASKYNLNGRESIINPGTAMASHKDDKDKFFPMSGVMIFGKESAGASNTALDNVMITDEEEIKATNPVATERFGTVAVNLQSSSTDPATGDVHVMGALPGMVWQDRDVYLQGPIWAKIPHTDGHFHPSPLMGGFGLKNPPPQILIKNTPVPANPPAEFSATKFASFITQYSTGQVSVEIEWELQKENSKRWNPEVQYTSNYAKSANVDFTVDNNGLYTEPRPIGTRYLTRPL

SEQ ID NO: 565 - DNA, 2211 bp, Artificial Sequence
  Description of Artificial Sequence: Synthetic polynucleotide
atggctgccgatggttatcttccagattggctcgaggacaacctctctgagggcattcgcgaatggtgggacttgaaacctggagccccgaaacccaaagtcaaccagcaaaagcaggacaacgctcggggtcttgtgcttccgggttacaaatacctcggacccttcaacggactcgacaagggggagcccgtcaacgcggcggacgcagcggccctcgagcacgacaaggcctacgaccagcagctcaaagcgggtgacaatccgtaccttcggtataaccacgccgacgccgagtttcaggagcgtctgcaagaagatacgtcttttgggggcaaccttggacgagcagtcttccaggccaagaagagggttctcgaaccttttggtctggttgaggaaggtgctaagacggctcctggaaagaaacgtccggtagagcagtcgccacaagagccagactcctcctcgggcattggcaagacaggccagcagcccgctaaaaagagactcaattttggtcagactggcgactcagagtcagtccccgacccacaacctctcggagaacctccagcaacccccgctgctgtgggacctactacaatggcttcaggcggtggcgcaccaatggcagacaataacgaaggcgccgacggagtgggtaatgcctcaggaaattggcattgcgattccacatggctgggcgacagagtcatcaccaccagcacccgcacctgggccttgcccacctacaataaccacctctacaagcaaatctccagtgcttcaacgggggccagcaacgacaaccactacttcggctacagcaccccctgggggtattttgacttcaacagattccactgccacttttcaccacgtgactggcaaagactcatcaacaacaattggggattccggcccaagagactcaacttcaagctcttcaacatccaagtcaaggaggtcacgacgaatgatggcgtcacgaccatcgctaataaccttaccagcacggttcaagtcttctcggactcggagtaccagttgccgtacgtcctcggctctgcgcaccagggctgcctccctccgttcccggcggacgtgttcatgattccgcaatacggctacctgacgctcaacaatggcagccaggcagtgggacggtcatccttttactgcctggaatatttcccatcgcagatgctgagaacgggcaataactttaccttcagctacacttttgaggacgttcctttccacagcagctacgctcacagccagagcctggaccggctgatgaatcctctcatcgaccagtacctgtattacctgaacagaactcagaatcagtccggaagtgcccaaaacaaggacttgctgtttagccgtgggtctccaactggcatgtctgttcagcccaaaaactggctacctggaccctgttatcggcagcagcgcgtttctaaaacaaaaacagacaacaacaacagcaactttacctggactggtgcttcaaaatataaccttaatgggcgtgaatctataatcaaccctggcactgctatggcctcacacaaagacgacgaagacaagttctttcccatgagcggtgtcatgatttttggaaaggagagcgccggagcttcaaacactgcattggacaatgtcatgatcacagacgaagaggaaatcaaagccactaaccccgtggccactgaaagatttgggactgtggcagtcaatctccagagcagcagcacagaccctgcgaccggagatgtgcatgccatgggagccttacctggaatggtgtggcaagacagagacgtatacctgcagggtcctatttgggccaaaattcctcacacggatggacactttcacccgtctcctctcatgggcggctttggacttaagcacccgcctcctcagatcctcatcaaaaacacgcctgttcctgcgaatcctccggcagagttttcggctacaaagtttgcttcattcatcacccagtattccacaggacaagtgagcgtggagattgaatgggagctgcagaaagaaaacagcaaacgctggaatcccgaagtgcagtatacatctaactatgcaaaatctgccaacgttgatttcactgtggacaacaatggactttatactgagcctcgccccattggcacccgttacctcacccgtcccctgtaa

SEQ ID NO: 566 - protein, 736 aa, Artificial Sequence
  Description of Artificial Sequence: Synthetic polypeptide
MAADGYLPDWLEDNLSEGIREWWDLKPGAPKPKVNQQKQDNARGLVLPGYKYLGPFNGLDKGEPVNAADAAALEHDKAYDQQLKAGDNPYLRYNHADAEFQERLQEDTSFGGNLGRAVFQAKKRVLEPFGLVEEGAKTAPGKKRPVEQSPQEPDSSSGIGKTGQQPAKKRLNFGQTGDSESVPDPQPLGEPPATPAAVGPTTMASGGGAPMADNNEGADGVGNASGNWHCDSTWLGDRVITTSTRTWALPTYNNHLYKQISSASTGASNDNHYFGYSTPWGYFDFNRFHCHFSPRDWQRLINNNWGFRPKRLNFKLFNIQVKEVTTNDGVTTIANNLTSTVQVFSDSEYQLPYVLGSAHQGCLPPFPADVFMIPQYGYLTLNNGSQAVGRSSFYCLEYFPSQMLRTGNNFTFSYTFEDVPFHSSYAHSQSLDRLMNPLIDQYLYYLNRTQNQSGSAQNKDLLFSRGSPTGMSVQPKNWLPGPCYRQQRVSKTKTDNNNSNFTWTGASKYNLNGRESIINPGTAMASHKDDEDKFFPMSGVMIFGKESAGASNTALDNVMITDEEEIKATNPVATERFGTVAVNLQSSSTDPATGDVHAMGALPGMVWQDRDVYLQGPIWAKIPHTDGHFHPSPLMGGFGLKHPPPQILIKNTPVPANPPAEFSATKFASFITQYSTGQVSVEIEWELQKENSKRWNPEVQYTSNYAKSANVDFTVDNNGLYTEPRPIGTRYLTRPL

SEQ ID NO: 567 - DNA, 2208 bp, Artificial Sequence
  Description of Artificial Sequence: Synthetic polynucleotide
  modified_base (955)..(955): a, c, g, or t
  modified_base (971)..(972): a, c, g, or t
  modified_base (981)..(981): a, c, g, or t
  modified_base (986)..(986): a, c, g, or t
  modified_base (1235)..(1235): a, c, g, or t
  modified_base (1694)..(1696): a, c, g, or t
  modified_base (1698)..(1698): a, c, g, or t
  modified_base (1763)..(1765): a, c, g, or t
  modified_base (1778)..(1778): a, c, g, or t
  modified_base (2204)..(2204): a, c, g, or t
atggctgccgatggttatcttccagattggctcgaggacaacctctctgagggcattcgcgaatggtgggacttgaaacctggagccccgaaacccaaagtcaaccagcaaaagcaggacaacgctcggggtcttgtgcttccgggttacaaatacctcggacccttcaacggactcgacaagggggagcccgtcaacgcggcggacgcagcggccctcgagcacgacaaggcctacgaccagcagctcaaagcgggtgacaatccgtaccttcggtataaccacgccgacgccgagtttcaggagcgtctgcaagaagatacgtcttttgggggcaaccttggacgagcagtcttccaggccaagaagagggttctcgaaccttttggtctggttgaggaaggtgctaagacggctcctggaaagaaacgtccggtagagcagtcgccacaagagccagactcctcctcgggcattggcaagacaggccagcagcccgctaaaaagagactcaattttggtcagactggcgactcagagtcagtccccgacccacaacctctcggagaacctccagcaacccccgctgctgtgggacctactacaatggcttcaggcggtggcgcaccaatggcagacaataacgaaggcgccgacggagtgggtaatgcctcaggaaattggcattgcgattccacatggctgggcgacagagtcatcaccaccagcacccgaacatgggccttgcccacctataacaaccacctctacaagcaaatctccagtgcttcaacgggggccagcaacgacaaccactacttcggctacagcaccccctgggggtattttgatttcaacagattccactgccacttttcaccacgtgactggcagcgactcatcaataacaattggggattccggcccaagagactcaacttcaaactcttcaacntccaagtcaaggaggnnacgacgaangatgncgtcacaaccatcgctaataaccttaccagcacggttcaagtcttctcggactcggagtaccagcttccgtacgtcctcggctctgcgcaccagggctgcctccctccgttcccggcggacgtgttcatgattccgcaatacggctacctgacgctcaacaatggcagccaggcagtgggacggtcatccttttactgcctggaatatttcccatcgcagatgctgagaacgggcaataactttacctncagctacacttttgaggacgttcctttccacagcagctacgctcacagccagagcctggaccggctgatgaatcctctcatcgaccagtacctgtattacctgaacagaactcagaatcagtccggaagtgcccaaaacaaggacttgctgtttagccgtgggtctccaactggcatgtctgttcagcccaaaaactggctacctggaccctgttatcggcagcagcgcgtttctaaaacaaaaacagacaacaacaacagcaactttacctggactggtgcttcaaaatataaccttaatgggcgtgaatctataatcaaccctggcactgctatggcctcacacaaagacgacgaagacaagttctttcccatgagcggtgtcatgatttttggaaaggagagcgccggagcttcaaacactgcattggacaatgtcatgatcacagacgaagagannncnaagccactaaccccgtggccactgaaagatttgggactgtggcagtcaatctccaagcagcacannnaccctgcgaccgnagatgtgcatgccatgggagccttacctggaatggtgtggcaagacagagacgtatacctgcagggtcctatttgggccaaaattcctcacacggatggacactttcacccgtctcctctcatgggcggctttggacttaagcacccgcctcctcagatcctcatcaaaaacacgcctgttcctgcgaatcctccggcagagttttcggctacaaagtttgcttcattcatcacccagtattccacaggacaagtgagcgtggagattgaatgggagctgcagaaagaaaacagcaaacgctggaatcccgaagtgcagtatacatctaactatgcaaaatctgccaacgttgatttcactgtggacaacaatggactttatactgagcctcgccccattggcacccgttacctcacccgtccccngtaa

SEQ ID NO: 568 - protein, 723 aa, Artificial Sequence
  Description of Artificial Sequence: Synthetic polypeptide
MAADGYLPDWLEDNLSEGIREWWDLKPGAPKPKVNQQKQDNARGLVLPGYKYLGPFNGLDKGEPVNAADAAALEHDKAYDQQLKAGDNPYLRYNHADAEFQERLQEDTSFGGNLGRAVFQAKKRVLEPFGLVEEGAKTAPGKKRPVEQSPQEPDSSSGIGKTGQQPAKKRLNFGQTGDSESVPDPQPLGEPPATPAAVGPTTMASGGGAPMADNNEGADGVGNASGNWHCDSTWLGDRVITTSTRTWALPTYNNHLYKQISSASTGASNDNHYFGYSTPWGYFDFNRFHCHFSPRDWQRLINNNWGFRPKRLNFKLFNQVKETTDVTTIANNLTSTVQVFSDSEYQLPYVLGSAHQGCLPPFPADVFMIPQYGYLTLNNGSQAVGRSSFYCLEYFPSQMLRTGNNFTSYTFEDVPFHSSYAHSQSLDRLMNPLIDQYLYYLNRTQNQSGSAQNKDLLFSRGSPTGMSVQPKNWLPGPCYRQQRVSKTKTDNNNSNFTWTGASKYNLNGRESIINPGTAMASHKDDEDKFFPMSGVMIFGKESAGASNTALDNVMITDEEATNPVATERFGTVAVNLQSSPATDVHAMGALPGMVWQDRDVYLQGPIWAKIPHTDGHFHPSPLMGGFGLKHPPPQILIKNTPVPANPPAEFSATKFASFITQYSTGQVSVEIEWELQKENSKRWNPEVQYTSNYAKSANVDFTVDNNGLYTEPRPIGTRYLTRP

SEQ ID NO: 569 - DNA, 2208 bp, Artificial Sequence
  Description of Artificial Sequence: Synthetic polynucleotide
atggctgccgatggttatcttccagattggctcgaggacactctctctgaaggaataagacagtggtggaagctcaaacctggcccaccaccaccaaagcccgcagagcggcataaggacgacagcaggggtcttgtgcttcctgggtacaagtacctcggacccttcaacggactcgacaagggagagccggtcaacgaggcagacgccgcggccctcgagcacgacaaagcctatgaccggcagctcgacagcggagacaacccgtacctcaagtacaaccacgccgacgcggagtttcaggagcgccttaaagaagatacgtcttttgggggcaacctcggacgagcagtcttccaggcgaaaaagagggttcttgaacctctgggcctggttgaggaacctgttaagacggctccgggaaaaaagaggccggtagagcactctcctgtggagccagactcctcctcgggaaccggaaaggcgggtcagcagcctgcaagaaaaagattgaattttggtcagactggagacgcagactcagtacctgacccccagcctctcggacagccaccagcagccccctctggtctgggaactaatacgatggctacaggcagtggcgcaccaatggcagacaataacgagggcgccgacggagtgggtaattcctcgggaaattggcattgcgattccacatggatgggcgacagagtcatcaccaccagcacccgaacctgggccctgcccacctacaacaaccacctctacaaacaaatttccagccaatcaggagcctcgaacgacaatcactactttggctacagcaccccttgggggtattttgacttcaacagattccactgccacttttcaccacgtgactggcaaagactcatcaacaacaactggggattccgacccaagagactcaagttcaagctctttaacattcaagtcaaagaggtcacgcagaatgacggtacgacgacgattgccaataaccttaccagcacggttcaggtgtttactgactcggagtaccagctcccgtacgtcctcggctcggcgcatcaaggatgcctcccgccgttcccagcagacgtcttcatggtgccacagtatggatacctcaccctgaacaacgggagtcaggcagtaggacgctcttcattttactgcctggagtactttccttctcagatgctgcgtaccggtaacaactttaccttcagctacacttttgaggacgttcctttccacagcagctacgctcacagccagagtctggaccgtctcatgaatcctctcatcgaccagtacctgtattacttgagcagaacagacgctccaagtggaaccaccacgcagtcaaggcttcagttttctcaggccggagcgagtgacattcgggaccagtctaggaactggcttcctggaccctgttaccgccagcagcgagtatcaaagacatctgcggataacaacaacagtgaatactcgtggactggagctaccaagtaccacctcaatggcagagactctctggtgaatccgggcccggccatggcaagccacaaggacgatgaagaaaagttttttcctcagagcggggttctcatctttgggaagcaaggctcagagaaaacaagtgtggacattgaaaaggtcatgattacagacgaagaggaaatcaggacaaccaatcccgtggctacggagcagtatggttctgtatctaccaacctccagagaggcaacagacaagcagctaccgcagatgtcaacacacaaggcgttcttccaggcatggtctggcaggacagagatgtgtaccttcaggggcccatctgggcaaagattccacacacggacggacattttcacccctctcccctcatgggtggattcggacttaaacaccctcctccacagattctcatcaagaacaccccggtacctgcgaatccttcgaccaccttcagtgcggcaaagtttgcttccttcatcacacagtactccacgggacaggtcagcgtggagatcgagtgggagctgcagaaggaaaacagcaaacgctggaatcccgaagttcagtacacttccaactacaacaagtctgttaatgtggactttactgtggacactaatggcgtgtattcagagcctcgccccattggcaccagatacctgactcgtaatctgtaa

SEQ ID NO: 570 - protein, 735 aa, Artificial Sequence
  Description of Artificial Sequence: Synthetic polypeptide
MAADGYLPDWLEDTLSEGIRQWWKLKPGPPPPKPAERHKDDSRGLVLPGYKYLGPFNGLDKGEPVNEADAAALEHDKAYDRQLDSGDNPYLKYNHADAEFQERLKEDTSFGGNLGRAVFQAKKRVLEPLGLVEEPVKTAPGKKRPVEHSPVEPDSSSGTGKAGQQPARKRLNFGQTGDADSVPDPQPLGQPPAAPSGLGTNTMATGSGAPMADNNEGADGVGNSSGNWHCDSTWMGDRVITTSTRTWALPTYNNHLYKQISSQSGASNDNHYFGYSTPWGYFDFNRFHCHFSPRDWQRLINNNWGFRPKRLKFKLFNIQVKEVTQNDGTTTIANNLTSTVQVFTDSEYQLPYVLGSAHQGCLPPFPADVFMVPQYGYLTLNNGSQAVGRSSFYCLEYFPSQMLRTGNNFTFSYTFEDVPFHSSYAHSQSLDRLMNPLIDQYLYYLSRTDAPSGTTTQSRLQFSQAGASDIRDQSRNWLPGPCYRQQRVSKTSADNNNSEYSWTGATKYHLNGRDSLVNPGPAMASHKDDEEKFFPQSGVLIFGKQGSEKTSVDIEKVMITDEEEIRTTNPVATEQYGSVSTNLQRGNRQAATADVNTQGVLPGMVWQDRDVYLQGPIWAKIPHTDGHFHPSPLMGGFGLKHPPPQILIKNTPVPANPSTTFSAAKFASFITQYSTGQVSVEIEWELQKENSKRWNPEVQYTSNYNKSVNVDFTVDTNGVYSEPRPIGTRYLTRNL

SEQ ID NO: 571 - DNA, 2208 bp, Artificial Sequence
  Description of Artificial Sequence: Synthetic polynucleotide
atggctgccgatggttatcttccagattggctcgaggacactctctctgaaggaataagacagtggtggaagctcaaacctggcccaccaccaccaaagcccgcagagcggcataaggacgacagcaggggtcttgtgcttcctgggtacaagtacctcggacccttcaacggactcgacaagggagagccggtcaacgaggcagacgccgcggccctcgagcacgacaaagcctatgaccggcagctcgacagcggagacaacccgtacctcaagtacaaccacgccgacgcggagtttcaggagcgccttaaagaagatacgtcttttgggggcaacctcggacgagcagtcttccaggcgaaaaagagggttcttgaacctctgggcctggttgaggaacctgttaagacggctccgggaaaaaagaggccggtagagcactctcctgtggagccagactcctcctcgggaaccggaaaggcgggccagcagcctgcaagaaaaagattgaattttggtcagactggagacgcaaactcagtacctgacccccagcctctcggacagccaccagcagccccctctggtctgggaactaatacgatggctacaggcagtggcgcaccaatggcagacaataacgagggcgccgacggagtgggtaattcctcgggaaattggcattgcgattccacatggatgggcgacagagtcatcaccaccagcacccgaacctgggccctgcccacctacaacaaccacctctacaaacaaatttccagccaatcaggagcctcgaacgacaatcactactttggctacagcaccccttgggggtattttgacttcaacagattccactgccacttttcaccacgtgactggcaaagactcatcaacaacaactggggattccgacccaagagactcaagttcaagctctttaacattcaagtcaaagaggtcacgcagaatgacggtacgacgacgattgccaataaccttaccagcacggttcaggtgtttactgactcggagtaccagctcccgtacgtcctcggctcggcgcatcaaggatgcctcccgccgttcccagcagacgtcttcatggtgccacagtatggatacctcaccctgaacaacgggagtcgggcagtaggacgctcttcattttactgcctggagtactttccttctcagatgctgcgtaccggtaacaactttaccttcagctacacttttgaggacgttcctttccacagcagctacgctcacagccagagtctggaccgtctcatgaatcctctcatcgaccagtacctgtattacttgagcagaacagacactccaagtggaaccaccacgcagtcaaggcttcagttttctcaggccggagcgagtgacattcgggaccagtctaggaactggcttcctggaccctgttaccgccagcagcgagtatcaaagacatctgcggataacaacaacagtgaatactcgtggactggagctaccaagtaccacctcaatggcagagactctctggtgaatccgggcccggccatggcaagccacaaggacgatgaagaaaagttttttcctcagagcggggttctcatctttgggaagcaaggctcagagaaaacaagtgtggacattgaaaaggtcatgattacagacgaagaggaaatcaggacgaccaatcccgtggctacggagcagtatggttctgtatctaccaacctccagagaggcaacagacaagcagctaccgcagatgtcaacacacaaggcgttcttccaggcatggtctggcaggacagagatgtgtaccttcaggggcccatctgggcaaagattccacacacggacggacattttcacccctctcccctcatgggtggattcggacttaaacaccctcctccacagattctcatcaagaacaccccggtacctgcgaatccttcgaccaccttcagtgcggcaaagtttgcttccttcatcacacagtactccacgggacaggtcagcgtggagatcgagtgggagctgcagaaggaaaacagcaaacgctggaatcccgaagttcagtacacttccaactacaacaagtctgttaatgtggactttactgtggacactaatggcgtgtatacagagcctcgccccattggcaccagatacctgactcgtaatctgtaa

SEQ ID NO: 572 - protein, 735 aa, Artificial Sequence
  Description of Artificial Sequence: Synthetic polypeptide
MAADGYLPDWLEDTLSEGIRQWWKLKPGPPPPKPAERHKDDSRGLVLPGYKYLGPFNGLDKGEPVNEADAAALEHDKAYDRQLDSGDNPYLKYNHADAEFQERLKEDTSFGGNLGRAVFQAKKRVLEPLGLVEEPVKTAPGKKRPVEHSPVEPDSSSGTGKAGQQPARKRLNFGQTGDANSVPDPQPLGQPPAAPSGLGTNTMATGSGAPMADNNEGADGVGNSSGNWHCDSTWMGDRVITTSTRTWALPTYNNHLYKQISSQSGASNDNHYFGYSTPWGYFDFNRFHCHFSPRDWQRLINNNWGFRPKRLKFKLFNIQVKEVTQNDGTTTIANNLTSTVQVFTDSEYQLPYVLGSAHQGCLPPFPADVFMVPQYGYLTLNNGSRAVGRSSFYCLEYFPSQMLRTGNNFTFSYTFEDVPFHSSYAHSQSLDRLMNPLIDQYLYYLSRTDTPSGTTTQSRLQFSQAGASDIRDQSRNWLPGPCYRQQRVSKTSADNNNSEYSWTGATKYHLNGRDSLVNPGPAMASHKDDEEKFFPQSGVLIFGKQGSEKTSVDIEKVMITDEEEIRTTNPVATEQYGSVSTNLQRGNRQAATADVNTQGVLPGMVWQDRDVYLQGPIWAKIPHTDGHFHPSPLMGGFGLKHPPPQILIKNTPVPANPSTTFSAAKFASFITQYSTGQVSVEIEWELQKENSKRWNPEVQYTSNYNKSVNVDFTVDTNGVYTEPRPIGTRYLTRNL

SEQ ID NO: 573 - DNA, 2211 bp, Artificial Sequence
  Description of Artificial Sequence: Synthetic polynucleotide
atggctgccgatggttatcttccagattggctcgaggacactctctctgaaggaataagacagtggtggaagctcaaacctggcccaccaccaccaaagcccgcagagcggcataaggacgacagcaggggtcttgtgcttcctgggtacaagtacctcggacccttcaacggactcgacaagggagagccggtcaacgaggcagacgccgcggccctcgagcacgacaaggcctacgaccagcagctcaaagcgggtgacaatccgtacctgcggtataaccacgccgacgccgagtttcaggagcgtctgcaagaagatacgtcttttgggggcaacctcgggcgagcagtcttccaggccaagaagcgggttctcgaacctctcggtctggttgaggaaggcgctaagacggctcctggaaagaaacgtccggtagagcagtcgccacaagagccagactcctcctcgggcatcggcaagacaggccagcagcccgctaaaaagagactcaattttggtcagactggcgactcagagtcagtccccgacccacaacctctcggagaacctccagcaacccccgctgctgtgggacctactacaatggcttcaggcggtggcgcaccaatggcagacaataacgaaggcgccgacggagtgggtaatgcctcaggaaattggcattgcgattccacatggctgggcgacagagtcatcaccaccagcacccgaacatgggccttgcccacctataacaaccacctctacaagcaaatctccagtgcttcgacgggggccagcaacgacaaccactacttcggctacagcaccccctgggggtattttgactttaacagattccactgccacttttcaccacgtgactggcagcgactcatcaacaataactggggattccggcccaagagactcagcttcaagctcttcaacatccaggtcaaggaggtcacgacgaatgatggcgtcacaaccatcgctaataaccttaccagcacggttcaagtcttctcggactcggagtaccagcttccgtacgtcctcggctctgcgcaccagggctgcctccctccgttcccggcggacgtgttcatgattccgcaatacggctacctgacgctcaacaatggcagccaagccgtgggacgttcatccttttactgcctggaatatttcccttctcagatgctgagaacgggcaacaactttaccttcagctacacctttgaggaagtgcctttccacagcagctacgcgcacagccagagcctggaccggctgatgaatcctctcatcgatcaatacctgtattacctgaacagaactcaaaatcagtccggaagtgcccaaaacaaggacttgctgtttagccgtgggtctccagctggcatgtctgttcagcccaaaaactggctacctggaccctgttatcggcagcagcgcgtttctaaaacaaaaacagacaacaacaacagcaattttacctggactggtgcttcaaaatataacctcaatgggcgtgaatccatcatcaaccctggcactgctatggcctcacacaaagacgacgaagacaagttctttcccatgagcggtgtcatgatttttggaaaagagagcgccggagcttcaaacactgcattggacaatgtcatgattacggacgaagaggaaattaaagccactaaccctgtggccaccgaaagatttgggaccgtggcagtcaatttccagagcagcagcacagaccctgcgaccggagatgtgcatgctatgggagcattacctggcatggtgtggcaagatagagacgtgtacctgcagggtcccatttgggccaaaattcctcacacagatggacactttcacccgtctcctcttatgggcggctttggactcaagaacccgcctcctcagatcctcatcaaaaacacgcctgttcctgcgaatcctccggcggagttttcagctacaaagtttgcttcattcatcactcaatactccacaggacaagtgagcgtggaaattgaatgggagctgcagaaagaaaacagcaaacgctggaatcccgaagtgcagtatacatctaactatgcaaaatctgccaacgttgatttcactgtggacaacaatggactttatactgagcctcgccccattggcacccgttacctcacccgtcccctgtaa

SEQ ID NO: 574 - protein, 736 aa, Artificial Sequence
  Description of Artificial Sequence: Synthetic polypeptide
MAADGYLPDWLEDTLSEGIRQWWKLKPGPPPPKPAERHKDDSRGLVLPGYKYLGPFNGLDKGEPVNEADAAALEHDKAYDQQLKAGDNPYLRYNHADAEFQERLQEDTSFGGNLGRAVFQAKKRVLEPLGLVEEGAKTAPGKKRPVEQSPQEPDSSSGIGKTGQQPAKKRLNFGQTGDSESVPDPQPLGEPPATPAAVGPTTMASGGGAPMADNNEGADGVGNASGNWHCDSTWLGDRVITTSTRTWALPTYNNHLYKQISSASTGASNDNHYFGYSTPWGYFDFNRFHCHFSPRDWQRLINNNWGFRPKRLSFKLFNIQVKEVTTNDGVTTIANNLTSTVQVFSDSEYQLPYVLGSAHQGCLPPFPADVFMIPQYGYLTLNNGSQAVGRSSFYCLEYFPSQMLRTGNNFTFSYTFEEVPFHSSYAHSQSLDRLMNPLIDQYLYYLNRTQNQSGSAQNKDLLFSRGSPAGMSVQPKNWLPGPCYRQQRVSKTKTDNNNSNFTWTGASKYNLNGRESIINPGTAMASHKDDEDKFFPMSGVMIFGKESAGASNTALDNVMITDEEEIKATNPVATERFGTVAVNFQSSSTDPATGDVHAMGALPGMVWQDRDVYLQGPIWAKIPHTDGHFHPSPLMGGFGLKNPPPQILIKNTPVPANPPAEFSATKFASFITQYSTGQVSVEIEWELQKENSKRWNPEVQYTSNYAKSANVDFTVDNNGLYTEPRPIGTRYLTRPL

SEQ ID NO: 575 - protein, 735 aa, Artificial Sequence
  Description of Artificial Sequence: Synthetic polypeptide
MAADGYLPDWLEDTLSEGIRQWWKLKPGPPPPKPAERHKDDSRGLVLPGYKYLGPFNGLDKGEPVNEADAAALEHDKAYDRQLDSGDNPYLKYNHADAEFQERLKEDTSFGGNLGRAVFQAKKRVLEPLGLVEEPVKTAPGKKRPVEHSPVEPDSSSGTGKAGQQPARKRLNFGQTGDADSVPDPQPLGQPPAAPSGLGTNTMATGSGAPMADNNEGADGVGNSSGNWHCDSTWMGDRVITTSTRTWALPTYNNHLYKQISSQSGASNDNHYFGYSTPWGYFDFNRFHCHFSPRDWQRLINNNWGFRPKRLKFKLFNIQVKEVTQNDGTTTIANNLTSTVQVFTDSEYQLPYVLGSAHQGCLPPFPADVFMVPQYGYLTLNNGSQAVGRSSFYCLEYFPSQMLRTGNNFTFSYTFEDVPFHSSYAHSQSLDRLMNPLIDQYLYYLSRTDTPSGTTTQSRLQFSQAGASDIRNQSRNWLPGPCYRQQRVSKTSADNNNSEYSWTGATKYHLNGRDSLVNPGPAMASHKDDEEKFFPQSGVLIFGKQGSEKTSVDIEKVMITDEEEIRTTNPVATEQYGSVSTNLQRGNRQAATADVNTQGVLPGMVWQDRDVYLQGPIWAKIPHTDGHFHPSPLMGGFGLKHPPPQILIKNTPVPANPSTTFSAAKFASFITQYSTGQVSVEIEWELQKENSKRWNPEVQYTSNYNKSVNVDFTVDTNGVYSEPRPIGTRYLTRNQ

SEQ ID NO: 576 - DNA, 2208 bp, Artificial Sequence
  Description of Artificial Sequence: Synthetic polynucleotide
atggctgccgatggttatcttccagattggctcgaggacactctctctgaaggaataagacagtggtggaagctcaaacctggcccaccaccaccaaagcccgcagagcggcataaggacgacagcaggggtcttgtgcttcctgggtacaagtacctcggacccttcaacggactcgacaagggagagccggtcaacgaggcagacgccgcggccctcgagcacgacaaagcctatgaccggcagctcgacagcggagacaacccgtacctcaagtacaaccacgccgacgcggagtttcaggaacgccttaaagaagatacgtcttttgggggcaacctcggacgagcagtcttccaggcgaaaaagagggttcttgaacctctgggcctggttgaggaacctgttaagacggctccgggaaaaaagaggccggtagagcactctcctgtggagccagactcctcctcgggaaccggaaaggcgggccagcagcctgcaagaaaaagattgaattttggtcagactggagacgcagactcagtacctgacccccagcctctcggacagccaccagcagccccctctggtctgggaactaatacgatggctacaggcagtggcgcaccaatggcagacaataacgagggcgccgacggagtgggtaattcctcgggaaattggcattgcgattccacatggatgggcgacagagtcatcaccaccagcacccgaacctgggccctgcccacctacaacaaccacctctacaaacaaatttccagccaatcaggagcctcgaacgacaatcactactttggctacagcaccccttgggggtattttgacttcaacagattccactgccacttttcaccacgtgactggcaaagactcatcaacaacaactggggattccgacccaagagactcaagttcaagctctttaacattcaagtcaaagaggtcacgcagaatgacggtacgacgacgattgccaataaccttaccagcacggttcaggtgtttactgactcggagtaccagctcccgtacgtcctcggctcggcgcatcaaggatgcctcccgccgttcccagcagacgtcttcatggtgccacagtatggatacctcaccctgaacaacgggagtcaggcagtaggacgctcttcattttactgcctggagtactttccttctcagatgctgcgtaccggtaacaactttaccttcagctacacttttgaggacgttcctttccacagcagctacgctcacagccagagtctggaccgtctcatgaatcctctcatcgaccagtacctgtattacttgagcagaacagacactccaagtggaaccaccacgcagtcaaggcttcagttttctcaggccggagcgagtgacattcggaaccagtctaggaactggcttcctggaccctgttaccgccagcagcgagtatcaaagacatctgcggataacaacaacagtgaatactcgtggactggagctaccaagtaccacctcaatggcagagactctctggtgaatccgggcccggccatggcaagccacaaggacgatgaagaaaagttttttcctcagagcggggttctcatctttgggaagcaaggctcagagaaaacaagtgtggacattgaaaaggtcatgattacagacgaagaggaaatcaggacaaccaatcccgtggctacggagcagtatggttctgtatctaccaacctccagagaggcaacagacaagcagctaccgcagatgtcaacacacaaggcgttcttccaggcatggtctggcaggacagagatgtgtaccttcaggggcccatctgggcaaagattccacacacggacggacattttcacccctctcccctcatgggtggattcggacttaaacaccctcctccacagattctcatcaagaacaccccggtacctgcgaatccttcgaccaccttcagtgcggcaaagtttgcttccttcatcacacagtactccacgggacaggtcagcgtggagatcgagtgggagctgcagaaggaaaacagcaaacgctggaatcccgaagttcagtacacttccaactacaacaagtctgttaatgtggactttactgtggacactaatggcgtgtattcagagcctcgccccattggcaccagatacctgactcgtaatcagtaa

SEQ ID NO: 577 - DNA, 2208 bp, Artificial Sequence
  Description of Artificial Sequence: Synthetic polynucleotide
atggctgccgatggttatcttccagattggctcgaggacactctctctgaaggaataagacagtggtggaagctcaaacctggcccaccaccaccaaagcccgcagagcggcataaggacgacagcaggggtcttgtgcttcctgggtacaagtacctcggacccttcaacggactcgacaagggagagccggtcaacgaggcagacgccgcggccctcgagcacgacaaagcctatgaccggcagctcgacagcggagacaacccgtacctcaagtacaaccacgccgacgcggagtttcaggagcgccttaaagaagatacgtcttttgggggcaacctcggacgagcagtcttccaggcgaaaaagagggttcttgaacctctgggcctggttgaggaacctgttaagacggctccgggaaaaaagaggccggtagagcactctcctgtggagccagactcctcctcgggaaccggaaaggcgggccagcagcctgcaagaaaaagattgaattttggtcagactggagacgcagactcagtacctgatccccagcctctcggacagccaccagcagccccctctggtctgggaactaatacgatggctacaggcagtggcgcaccaatggcagacaataacgagggcgccgacggagtgggtaattcctcgggaaattggcattgcgattccacatggatgggcgacagagtcatcaccaccagcacccgaacctgggccctgcccacctacaacaaccacctctacaaacaaatttccagccaatcaggagcctcgaacgacaatcactactttggctacagcaccccttgggggtattttgacttcaacagattccactgccacttttcaccacgtgactggcaaagactcatcaacaacaactggggattccgacccaagagactcaagttcaagctctttaacattcaagtcaaagaggtcacgcagaatgacggtacgacgacgattgccaataaccttaccagcacggttcaggtgtttactgactcggagtaccagctcccgtatgtcctcggctcggcgcatcaaggatgcctcccgccgttcccagcagacgtcttcatggtgccacagtatggatacctcaccctgaacaacgggagtcaggcagtaggacgctcttcattttactgcctggagtactttccttctcagatgctgcgtaccggtaacaactttaccttcagctacacttttgaggacgttcctttccacagcagctacgctcacagccagagtctggaccgtctcatgaatcctctcatcgaccagtacctgtattacttgagcagaacagacactccaagtggaaccaccacgcagtcaaggcttcagttttctcaggccggagcgagtgacattcgggaccagtctaggaactggcttcctggaccctgttaccgccagcagcgagtatcaaagacatctgcggataacaacaacagtgaatactcgtggactggagctaccaagtaccacctcaatggcagagactctctggtgaatccgggcccggccatggcaagccacaaggacgatgaagaaaagttttttcctcagagcggggttctcatctttgggaagcaaggctcagagaaaacaagtgtggacattgaaaaggtcatgattacagacgaagaggaaatcaggacaaccaatcccgtggctacggagcagtatggttctgtatctaccaacctccagagaggcaacagacaagcagctaccgcagatgtcaacacacaaggcgttcttccaggcatggtctggcaggacagagatgtgtaccttcaggggcccatctgggcaaagattccacacacggacggacattttcacccctctcccctcatgggtggattcggacttaaacaccctcctccacagattctcatcaagaacaccccggtacctgcgaatccttcgaccaccttcagtgcggcaaagtttgcttccttcatcacacagtactccacgggacaggtcagcgtggagatcgagtgggagctgcagaaggaaaacagcaaacgctggaatcccgaagttcagtacacttccaactacaacaagtctgttaatgtggactttactgtggacactaatggcgtgtattcagagcctcgccccattggcaccagatacctgactcgtaatctgtaa

SEQ ID NO: 578 - protein, 735 aa, Artificial Sequence
  Description of Artificial Sequence: Synthetic polypeptide
MAADGYLPDWLEDTLSEGIRQWWKLKPGPPPPKPAERHKDDSRGLVLPGYKYLGPFNGLDKGEPVNEADAAALEHDKAYDRQLDSGDNPYLKYNHADAEFQERLKEDTSFGGNLGRAVFQAKKRVLEPLGLVEEPVKTAPGKKRPVEHSPVEPDSSSGTGKAGQQPARKRLNFGQTGDADSVPDPQPLGQPPAAPSGLGTNTMATGSGAPMADNNEGADGVGNSSGNWHCDSTWMGDRVITTSTRTWALPTYNNHLYKQISSQSGASNDNHYFGYSTPWGYFDFNRFHCHFSPRDWQRLINNNWGFRPKRLKFKLFNIQVKEVTQNDGTTTIANNLTSTVQVFTDSEYQLPYVLGSAHQGCLPPFPADVFMVPQYGYLTLNNGSQAVGRSSFYCLEYFPSQMLRTGNNFTFSYTFEDVPFHSSYAHSQSLDRLMNPLIDQYLYYLSRTDTPSGTTTQSRLQFSQAGASDIRDQSRNWLPGPCYRQQRVSKTSADNNNSEYSWTGATKYHLNGRDSLVNPGPAMASHKDDEEKFFPQSGVLIFGKQGSEKTSVDIEKVMITDEEEIRTTNPVATEQYGSVSTNLQRGNRQAATADVNTQGVLPGMVWQDRDVYLQGPIWAKIPHTDGHFHPSPLMGGFGLKHPPPQILIKNTPVPANPSTTFSAAKFASFITQYSTGQVSVEIEWELQKENSKRWNPEVQYTSNYNKSVNVDFTVDTNGVYSEPRPIGTRYLTRNL

SEQ ID NO: 579 - DNA, 2601 bp, Artificial Sequence
  Description of Artificial Sequence: Synthetic polynucleotide
ccatcgacgtcagacgcggaagcttcgatcaactacgcggacaggtaccaaaacaaatgttctcgtcacgtgggcatgaatctgatgctgtttccctgcagacaatgcgagagactgaatcagaattcaaatatctgcttcactcacggtgtcaaagactgtttagagtgctttcccgtgtcagaatctcaacccgtttctgtcgtcaaaaaggcgtatcagaaactgtgctacattcatcacatcatgggaaaggtgccagacgcttgcactgcttgcgacctggtcaatgtggacttggatgactgtgtttctgaacaataaatgacttaaaccaggtatgactgccgatggttatcttccagattggctcgaggacaaccttagtgaaggaattcgcgagtggtgggctttgaaacctggagcccctcaacccaaggcaaatcaacaacatcaagacaacgctcgaggtcttgtgcttccgggttacaaataccttggacccggcaacggactcgacaagggggagccggtcaacgcagcagacgcggcggccctcgagcacgacaaggcctacgaccagcagctcaaggccggagacaacccgtacctcaagtacaaccacgccgacgccgagttccaggagcggctcaaagaagatacgtcttttgggggcaacctcgggcgagcagtcttccaggccaaaaagaggcttcttgaacctcttggtctggttgaggaagcggctaagacggctcctggaaagaagaggcctgtagagcagtctcctcaggaaccggactcctccgcgggtattggcaaatcgggtgcacagcccgctaaaaagagactcaatttcggtcagactggcgacacagagtcagtcccagaccctcaaccaatcggagaacctcccgcagccccctcaggtgtgggatctcttacaatggcttcaggtggtggcgcaccagtggcagacaataacgaaggtgccgatggagtgggtagttcctcgggaaattggcattgcgattcccaatggctgggggacagagtcatcaccaccagcacccgaacctgggccctgcccacctacaacaatcacctctacaagcaaatctccaacagcacatctggaggatcttcaaatgacaacgcctacttcggctacagcaccccctgggggtattttgacttcaacagattccactgccacttctcaccacgtgactggcagcgactcatcaacaacaactggggattccggcctaagcaactcaacttcaagctcttcaacattcaggtcaaagaggttacggacaacaatggagtcaagaccatcgccaataaccttaccagcacggtccaggtcttcacggactcagactatcagctcccgtacgtgctcgggtcggctcacgagggctgcctcccgccgttcccagcggacgttttcatgattcctcagtacgggtatctgacgcttaatgatggaagccaggccgtgggtcgttcgtccttttactgcctggaatatttcccgtcgcaaatgctaagaacgggtaacaacttccagttcagctacgagtttgagaacgtacctttccatagcagctacgctcacagccaaagcctggaccgactaatgaatccactcatcgaccaatacttgtactatctctcaaagactattaacggttctggacagaatcaacaaacgctaaaattcagtgtggccggacccagcaacatggctgtccagggaagaaactacatacctggacccagctaccgacaacaacgtgtctcaaccactgtgactcaaaacaacaacagcgaatttgcttggcctggagcttcttcttgggctctcaatggacgtaatagcttgatgaatcctggacctgctatggccagccacaaagaaggagaggaccgtttctttcctttgtctggatctttaatttttggcaaacaaggaactggaagagacaacgtggatgcggacaaagtcatgataaccaacgaagaagaaattaaaactactaacccggtagcaacggagtcctatggacaagtggccacaaaccaccagagtgcccaagcacaggcgcagaccggctgggttcaaaaccaaggaatacttccgggtatggtttggcaggacagagatgtgtacctgcaaggacccatttgggccaaaattcctcacacggacggcaactttcacccttctccgctgatgggagggtttggaatgaagcacccgcctcctcagatcctcatcaaaaacacacctgtacctgcggatcctccaacggccttcaacaaggacaagctgaactctttcatcacccagtattctactggccaagtcagcgtggagatcgagtgggagctgcagaaggaaaacagcaagcgctggaacccggagatccagtacacttccaactattacaagtctaataatgttgaatttgctgttaatactgaaggtgtatatagtgaaccccgccccattggcaccagatacctgactcgtaatctgtaattgcttgttaatcaataaaccgtttaattcgtttcagttgaactgcggcc

SEQ ID NO: 580 - DNA, 2601 bp, Artificial Sequence
  Description of Artificial Sequence: Synthetic polynucleotide
ccatcgacgtcagacgcggaagcttcgatcaactacgcggacaggtaccaaaacaaatgttctcgtcacgtgggcatgaatctgatgctgtttccctgcagacaatgcgagagactgaatcagaattcaaatatctgcttcactcacggtgtcaaagactgtttagagtgctttcccgtgtcagaatctcaacccgtttctgtcgtcaaaaaggcgtatcagaaactgtgctacattcatcacatcatgggaaaggtgccagacgcttgcactgcttgcgacctggtcaatgtggacttggatgactgtgtttctgaacaataaatgacttaaaccaggtatggctgccgatggttatcttccagattggctcgaggacaaccttagtgaaggaattcgcgagtggtgggctttgaaacctggagcccctcaacccaaggcaaatcaacaacatcaagacaacgctcgaggtcttgtgcttccgggttacaaataccttggacccggcaacggactcgacaagggggagccggtcaacgcagcagacgcggcggccctcgagcacgacaaggcctacgaccagcagctcaaggccggagacaacccgtacctcaagtacaaccacgccgacgccgagttccaggagcggctcaaagaagatacgtcttttgggggcaacctcgggcgagcagtcttccaggccaaaaagaggcttcttgaacctcttggtctggttgaggaagcggctaagacggctcctggaaagaagaggcctgtagagcagtctcctcaggaaccggactcctccgcgggtattggcaaatcgggtgcacagcccgctaaaaagagactcaatttcggtcagactggcgacacagagtcagtcccagaccctcaaccaatcggagaacctcccgcagccccctcaggtgtgggatctcttacaatggcttcaggtggtggcgcaccagtggcagacaataacgaaggtgccgatggagtgggtagttcctcgggaaattggcattgcgattcccaatggctgggggacagagtcatcaccaccagcacccgaacctgggccctgcccacctacaacaatcacctctacaagcaaatctccaacagcacatctggaggatcttcaaatgacaacgcctacttcggctacagcaccccctgggggtattttgacttcaacagattccactgccacttctcaccacgtgactggcagcgactcatcaacaacaactggggattccggcctaagcgactcaacttcaagctcttcaacattcaggtcaaagaggttacggacaacaatggagtcaagaccatcgccaataaccttaccagcacggtccaggtcttcacggactcagactatcagctcccgtacgtgctcgggtcggctcacgagggctgcctcccgccgttcccagcggacgttttcatgattcctcagtacgggtatctgacgcttaatgatggaagccaggccgtgggtcgttcgtccttttactgcctggaatatttcccgtcgcaaatgctaagaacgggtaacaacttccagttcagctacgagtttgagaacgtacctttccatagcagctacgctcacagccaaagcctggaccgactaatgaatccactcatcgaccaatacttgtactatctctcaaagactattaacggttctggacagaatcaacaaacgctaaaattcagtgtggccggacccagcaacatggctgtccagggaagaaactacatacctggacccagctaccgacaacaacgtgtctcaaccactgtgactcaaaacaacaacagcgaatttgcttggcctggggcttcttcttgggctctcaatggacgtaatagcttgatgaatcctggacctgctatggccagccacaaagaaggagaggaccgtttctttcctttgtctggatctttaatttttggcaaacaaggaactggaagagacaacgtggatgcggacaaagtcatgataaccaacgaagaagaaattaaaactactaacccggtagcaacggagtcctatggacaagtggccacaaaccaccagagtgcccaagcacaggcgcagaccggctgggttcaaaaccaaggaatacttccgggtatggtttggcaggacagagatgtgtacctgcaaggacccatttgggccaaaattcctcacacgggcggcaactttcacccttctccgctgatgggagggtttggaatgaagcacccgcctcctcagatcctcatcaaaaacacacctgtacctgcggatcctccaacggccttcaacaaggacaagctgaactctttcatcacccagtattctactggccaagtcagcgtggagatcgagtgggagctgcagaaggaaaacagcaagcgctggaacccggagatccagtacacttccaactattacaagtctaataatgttgaatttgctgttaatactggaggtgtatatagtgaaccccgccccattggcaccagatacctgactcgtaatctgtaattgcttgttaatcaataaaccgtttaattcgtttcagttgaactgcggcc

SEQ ID NO: 581 - DNA, 2601 bp, Artificial Sequence
  Description of Artificial Sequence: Synthetic polynucleotide
ccatcgacgtcagacgcggaagcttcgatcaactacgcggacaggtaccaaaacaaatgttctcgtcacgtgggcatgaatctgatgctgtttccctgcagacaatgcgagagactgaatcagaattcaaatatctgcttcactcacggtgtcaaagactgtttagagtgctttcccgtgtcagaatctcaacccgtttctgtcgtcaaaaaggcgtatcagaaactgtgctacattcatcacatcatgggaaaggtgccagacgcttgcactgcttgcgacctggtcaatgtggactcggatgactgtgtttctgaacaataaatgacttaaaccaggtatggctgccgatggttatcttccagattggctcgaggacaaccttagtgaaggaattcgcgagtggtgggctttgaaacctggagcccctcaacccaaggcaaatcaacaacatcaagacaacgctcgaggtcttgtgcttccgggttacaaataccttggacccggcaacggactcgacaagggggagccggtcaacgcagcagacgcggcggccctcgagcacgacaaggcctacgaccagcagctcaaggccggagacaacccgtacctcaagtacaaccacgccgacgccgagttccaggagcggctcaaagaagatacgtcttttgggggcaacctcgggcgagcagtcttccaggccaaaaagaggcttcttgaacctcttggtctggttgaggaagcggctaagacggctcctggaaagaagaggcctgtagagcagtctcctcaggaaccggactcctccgcgggtattgacaaatcgggtgcacagcccgctaaaaagagactcaatttcggtcagactggcgacacagagtcagtcccagaccctcaaccaatcggagaacctcccgcagccccctcaggtgtgggatctcttacaatggcttcaggtggtggcgcaccagtggcagacaataacgaaggtgccgatggagtgggtagttcctcgggaaattggcattgcgattcccaatggctgggggacagagtcatcaccaccagcacccgaacctgggccctgcccacctacaacaatcacctctacaagcaaatctccaacagcacatctggaggatcttcaaatgacaacgcctacttcggctacagcaccccctgggggtattttgacttcaacagattccactgccacttctcaccacgtgactggcagcgactcatcaacaacaactggggattccggcctaagcgactcaacttcaagctcttcaacattcaggtcaaagaggttacggacaacaatggagtcaagaccatcgccaataaccttaccagcacggtccaggtcttcacggactcggactatcagctcccgtacgtgctcgggtcggctcacgagggctgcctcccgccgttcccagcggacgttttcatgattcctcagtacgggtatctgacgcttaatgatggaagccaggccgtgggtcgttcgtccttttactgcctggaatatttcccgtcgcaaatgctaagaacgggtaacaacttccagttcagctacgagtttgagaacgtacctttccatagcagctacgctcacagccaaagcctggaccgactaatgaatccactcatcgaccaatacttgtactatctctcaaagactattaacggttctggacagaatcaacaaacgctaaaattcagtgtggccggacccagcaacatggctgtccagggaagaaactacatacctggacccagctaccgacaacaacgtgtctcaaccactgtgactcaaaacaacaacagcgaatttgcttggcctggagcttcttcttgggctctcaatggacgtaatagcttgatgaatcctggacctgctatggccagccacaaagaaggagaggaccgtttctttcctttgtctggatctttaatttttggcaaacaaggaactggaagagacaacgtggatgcggacaaagtcatgataaccaacgaagaagaaattaaaactactaacccggtagcaacggagtcctatggacaagtggccacaaaccaccagagtgcccaagcacaggcgcagaccggctgggttcaaaaccaaggaatacttccgggtatggtttggcaggacagagatgtgtacctgcaaggacccatttgggccaaaattcctcacacggacggcaactttcacccttctccgctgatgggagggtttggaatgaagcacccgcctcctcagatcctcatcaaaaacacacctgtacctgcggatcctccaacggccttcaacaaggacaagctgaactctttcatcacccagtattctactggccaagtcagcgtggagatcgagtgggagctgcagaaggaaaacagcaagcgctggaacccggagatccagtacacttccaactattacaagtctaataatgttgaatttgctgttaatactgaaggtgtatatagtgaaccccgccccattggcaccagatacctgactcgtaatctgtaattgcttgttaatcaataaaccgtttaattcgtttcagttgaactgcggcc

SEQ ID NO: 582 - DNA, 2601 bp, Artificial Sequence
  Description of Artificial Sequence: Synthetic polynucleotide
ccatcgacgtcagacgcggaagcttcgatcaactacgcggacaggtaccaaaacaaatgttctcgtcacgtgggcatgaatctgatgctgtttccctgcagacaatgcgagagactgaatcagaattcaaatatctgcttcactcacggtgtcaaagactgtttagagtgctttcccgtgtcagaatctcaacccgtttctgtcgtcaaaaaggcgtatcagaaactgtgctacattcatcacatcatgggaaaggtgccagacgcttgcactgcttgcgacctggtcaatgtggacttggatgactgtgtttctgaacaataaatgacttaaaccaggtatggctgccgatggttatcttccagattggctcgaggacaaccttagtgaaggaattcgcgagtggtgggctttgaaacctggagcccctcaacccaaggcaaatcaacaacatcaagacaacgctcgaggtcttgtgcttccgggttacaaataccttggacccggcaacggactcgacaagggggagccggtcaacgcagcagacgcggcggccctcgagcacgacaaggcctacgaccagcagctcaaggccggagacaacccgtacctcaagtacaaccacgccgacgccgagttccaggagcggctcaaagaagatacgtcttttgggggcaacctcgggcgagcagtcctccaggccaaaaagaggcttcttgaacctcttggtctggttgaggaagcggctaagacggctcctggaaagaagaggcctgtagagcagtctcctcaggaaccggactcctccgcgggtattggcaaatcgggtgcacagcccgctaaaaagagactcaatttcggtcagactggcgacacagagtcagtcccagaccctcaaccaatcggagaacctcccgcagccccctcaggtgtgggatctcttacaatggcttcaggtggtggcgcaccagtggcagacaataacgaaggtgccgatggagtgggtagttcctcgggaaattggcattgcgattcccaatggctgggggacagagtcatcaccaccagcacccgaacctgggccctgcccacctacaacaatcacctctacaagcaaatctccaacagcacatctggaggatcttcaaatgacaacgcctacttcggctacagcaccccctgggggtattttgacttcaacagattccactgccacttctcaccacgtgactggcagcgactcatcaacaacaactggggattccggcctaagcgactcaacttcaagctcttcaacattcaggtcaaagaggttacggacaacaatggagtcaagaccatcgccaataaccttaccagcacggtccaggtcttcacggactcagactatcagctcccgtacgtgctcgggtcggctcacgagggctgcctcccgccgttcccagcggacgttttcatgattcctcagtacgggtatctgacgcttaatgatggaagccaggccgtgggtcgttcgtccttttactgcctggaatatttcccgtcgcaaatgctaagaacgggtaacaacttccagttcagctacgagtttgagaacgtacctttccatagcagctacgctcacagccaaagcctggaccgactaatgaatccactcatcgaccaatacttgtactatctctcaaagactattaacggttctggacagaatcaacaaacgctaaaattcagtgtggccggatccagcaacatggctgtccagggaagaaactacatacctggacccagctaccgacaacaacgtgtctcaaccactgtgactcaaaacaacaacagcgaatttgcttggcctggagcttcttcttgggctctcaatggacgtaatagcttgatgaatcctggacctgctatggccagccacaaagaaggagaggaccgtttctttcctttgtctggatctttaatttttggcaaacaaggaactggaagagacaacgtggatgcggacaaagtcatgataaccaacgaagaagaaattaaaactactaacccggtagcaacggagtcctatggacaagtggccacaaaccaccagagtgcccaagcacaggcgcagaccggctgggttcaaaaccaaggaatacttccaggtatggtttggcaggacagagatgtgtacctgcaaggacccatttgggccaaaattcctcacacggacggcaactttcacccttctccgctgatgggagggtttggaatgaagcacccgcctcctcagatcctcatcaaaaacacacctgtacctgcggatcctccaacggccttcaacaaggacaagctgaactctttcatcacccagtattctactggccaagtcagcgtggagatcgagtgggagctgcagaaggaaaacagcaagcgctggaacccggagatccagtacacttccaactattacaagtctaataatgttgaatttgctgttaatactgaaggtgtatatagtgaaccccgccccattggcaccagatacctgactcgtaatctgtaattgcttgttaatcaataaaccgtttaattcgtttcagttgaactgcggcc

SEQ ID NO: 583 - DNA, 2601 bp, Artificial Sequence
  Description of Artificial Sequence: Synthetic polynucleotide
ccatcgacgtcagacgcggaagcttcgatcaactacgcggacaggtaccaaaacaaatgttctcgtcacgtgggcatgaatctgatgctgtttccctgcagacaatgcgagagactgaatcagaattcaaatatctgcttcactcacggtgtcaaagactgtttagagtgctttcccgtgtcagaatctcaacccgtttctgtcgtcaaaaaggcgtatcagaaactgtgctacattcatcacatcatgggaaaggtgccagacgcttgcactgcttgcgacctggtcaatgtggacttggatgactgtgtttctgaacaataaatgacttaaaccaggtatggctgccgatggttatcttccagattggctcgaggacaaccttagtgaaggaattcgcgagtggtgggctttgaaacctggagcccctcaacccaaggcaaatcaacaacatcaagacaacgctcgaggtcttgtgcttccgggttacaaataccttggacccggcaacggactcgacaagggggagccggtcaacgcagcagacgcggcggccctcgagcacgacagggcctacgaccagcagctcaaggccggagacaacccgtacctcaagtacaaccacgccgacgccgagttccaggagcggctcaaagaagatacgtcttttgggggcaacctcgggcgagcagtcttccaggccaaaaagaggcttcttgaacctcttggtctggttgaggaagcggctaagacggctcctggaaagaagaggcctgtagagcagtctcctcaggaaccggactcctccgcgggtattggcaaatcgggtgcacagcccgctaaaaagagactcaatttcggtcagactggcgacacagagtcagtcccagaccctcaaccaatcggagaacctcccgcagccccctcaggtgtgggatctcttacaatggcttcaggtggtggcgcaccagtggcagacaataacgaaggtgccgatggagtgggtagttcctcgggaaattggcattgcgattcccaatggctgggggacagagtcatcaccaccagcacccgaacctgggccctgcccacctacaacaatcacctctacaagcaaatctccaacagcacatctggaggatcttcaaatgacaacgcctacttcggctacagcaccccctgggggtattttgacttcaacagattccactgccacttctcaccacgtgactggcagcgactcatcaacaacaactggggattccggcctaagcgactcaacttcaagctcttcaacattcaggtcaaagaggttacggacaacaatggagtcaagaccatcgccaataaccttaccagcacggtccaggtcttcacggactcagactatcagctcccgtacgtgctcgggtcggctcacgagggctgcctcccgccgttcccagcggacgttttcatgattcctcagtacgggtatctgacgcttaatgatggaagccaggccgtgggtcgttcgtccttttactgcctggaatatttcccgtcgcaaatgctaagaacgggtaacaacttccagttcagctacgagtttgagaacgtacctttccatagcagctacgctcacagccaaagcctggaccgactaatgaatccactcatcgaccaatacttgtactatctctcaaagactattaacggttctggacagaatcaacaaacgctaaaattcagtgtggccggacctagcaacatggctgtccagggaagaaactacatacctggacccagctaccgacaacaacgtgtctcaaccactgtgactcaaaacaacaacagcgaatttgcttggcctggagcttcttcttgggctctcaatggacgtaatagcttgatgaatcctggacctgctatggccagccacaaagaaggagaggaccgtttctttcctttgtctggatctttaatttttggcaaacaaggaactggaagagacaacgtggatgcggacaaagtcatgataaccaacgaagaagaaattaaaactactaacccggtagcaacggagtcctatggacaagtggccacaaaccaccagagtgcccaagcacaggcgcagaccggctgggttcaaaaccaaggaatacttccgggtatggtttggcaggacagagatgtgtacctgcaaggacccatttgggccaaaattcctcacacggacggcaactttcacccttctccgctgatgggagggtttggaatgaagcacccgcctcctcagatcctcatcaaaaacacacctgtacctgcggatcctccaacggccttcaacaaggacaagctgaactctttcatcacccagtattctactggccaagtcagcgtggagatcgagtgggagctgcagaagaaaaacagcaagcgctggaacccggagatccagtacacttccaactattacaagtctaataatgttgaatttgctgttaacactgaaggtgtatatagtgaaccccgccccattggcaccagatacctgactcgtaatctgtaattgcttgttaatcaataaaccgtttaattcgtttcagttgaactgcggcc

SEQ ID NO: 584 - DNA, 2601 bp, Artificial Sequence
  Description of Artificial Sequence: Synthetic polynucleotide
ccatcgacgtcagacgcggaagcttcgatcaactacgcggacaggtaccaaaacaaatgttctcgtcacgtgggcatgaatctgatgctgtttccctgcagacaatgcgagagactgaatcagaattcaaatatctgcttcactcacggtgtcaaagactgtttagagtgctttcccgtgtcagaatctcaacccgtttctgtcgtcaaaaaggcgtatcagaaactgtgctacattcatcacatcatgggaaaggtgccagacgcttgcactgcttgcgacctggtcaatgtggacttggatgactgtgtttctgaacaataaatgacttaaaccaggtatggctgccgatggttatcttccagattggctcgaggacaaccttagtgaaggaattcgcgagtggtgggctttgaaacctggagcccctcaacccaaggcaaatcaacaacatcaagacaacgctcgaggtcttgtgcttccgggttacaaataccttggacccggcaacggactcgacaagggggagccggtcaacgcagcagacgcggcggccctcgagcacgacaaggcctacgaccagcagctcaaggccggagacaacccgtacctcaagtacaaccacgccgacgccgagttccaggagcggctcaaagaagatacgtcttttgggggcaacctcgggcgagcagtcttccaggccaaaaagaggcttcttgaacctcttggtctggttgaggaagcggctaagacggctcctggaaagaagaggcctgtagagcagtctcctcaggaaccggactcctccgcgggtattggcaaatcgggtgcacagcccgctaaaaagagactcaatttcggtcagactggcgacacagagtcagtcccagaccctcaaccaatcggagaacctcccgcagccccctcaggtgtgggatctcttacaatggcttcaggtggtggcgcaccagtggcagacaataacgaaggtgccgatggagtgggtagttcctcgggaaattggcattgcgattcccaatggctgggggacagagtcatcaccaccagcacccgaacctgggccctgcccacctacaacaatcacctctacaagcaaatctccaacagcacatctggaggatcttcaaatgacaacgcctacttcggctacagcaccccctgggggtattttgacttcaacagattccactgccacttctcaccacgtgactggcagcgactcatcaacaacaactggggattccggcctaagcgactcaacttcaagctcttcaacattcaggtcaaagaggttacggacaacaatggagtcaagaccatcgccaataaccttaccagcacggtccaggtcttcacggactcagactatcagctcccgtacgtgctcgggtcggctcacgagggctgcctcccgccgttcccagcggacgttttcatgattcctcagtacgggtatctgacgcttaatgatggaagccaggccgtgggtcgttcgtccttttactgcctggaatatttcccgtcgcaaatgctaagaacgggtaacaacttccagttcagctacgagtttgagaacgtacctttccatagcagctacgctcacagccaaagcctggaccgactaatgaatccactcatcgaccaatacttgtactatctctcaaagactattaacggttctggacagaatcaacaaacgctaaaattcagtgtggccggacccagcaacatggctgtccagggaagaaactacatacctggacccagctaccgacaacaacgtgtctcaaccactgtgactcaaaacaacaacagcgaatttgcttggcctggagcttcttcttgggctctcaatggacgtaatagcttgatgaatcctggacctgctatggccagccacaaagaaggagaggaccgtttctttcctttgtctggatctttaatttttggcaaacaaggaactggaagagacaacgtggatgcggacaaagtcatgataaccaacgaagaagaaattaaaactactaacccggtagcaacggagtcctatggacaagtggccacaaaccaccagagtgcccaagcacgggcgcagaccggctgggttcaaaaccaaggaatacttccgggtatggtttggcaggacagagatgtgtacctgcaaggacccatttgggccaaaattcctcacacggacggcaactttcacccttctccgctgatgggagggtttggaatgaagcacccgcctcctcagatcctcatcaaaaacacacctgtacctgcggatcctccaacggccttcaacaaggacaagctgaactctttcatcacccagtattctactggccaagtcagcgtggagatcgagtgggagctgcagaaggaaaacagcaagcgctggaacccggagatccagtacacttccaactattacaagtctaataatgttgaatttgctgttaatactgaaggtgtatatagtgaaccccgccccattggcaccagatacctgactcgtaatctgtaattgcttgttaatcaataaaccgtttaattcgtttcagttgaactgcggcc

SEQ ID NO: 585 - DNA, 2601 bp, Artificial Sequence
  Description of Artificial Sequence: Synthetic polynucleotide
ccatcgacgtcagacgcggaagcttcgatcaactacgcggacaggtaccaaaacaaatgttctcgtcacgtgggcatgaatctgatgctgtttccctgcagacaatgcgagagactgaatcagaattcaaatatctgcttcactcacggtgtcaaagactgtttagagtgctttcccgtgtcagaatctcaacccgtttctgtcgtcaaaaaggcgtatcagaaactgtgctacattcatcacatcatgggaaaggtgccagacgcttgcactgcttgcgacctggtcaatgtggacttggatgactgtgtttctgaacaataaatgacttaaaccaggtatggctgccgatggttatcttccagattggctcgaggacaaccttagtgaaggaattcgcgagtggtgggctttgaaacctggagcccctcaacccaaggcaaatcaacaacatcaagacaacgctcgaggtcttgtgcttccgggttacaaataccttggacccggcaacggactcgacaagggggagccggtcaacgcagtagacgcggcggccctcgagcacgacaaggcctacgaccagcagctcaaggccggagacaacccgtacctcaagtacaaccacgccgacgccgagttccaggagcggctcaaagaagatacgtcttttgggggcaacctcgggcgagcagtcttccaggccaaaaagaggcttcttgaacctcttggtctggttgaggaagcggctaagacggctcctggaaagaagaggcctgtagagcagtctcctcaggaaccggactcctccgcgggtattggcaaatcgggtgcacagcccgctaaaaagagactcaatttcggtcagactggcgacacagagtcagtcccagaccctcaaccaatcggagaacctcccgcagccccctcaggtgtgggatctcttacaatggcttcaggtggtggcgcaccagtggcagacaataacgaaggtgccgatggagtgggtagttcctcgggaaattggcattgcgattcccaatggctgggggacagagtcatcaccaccagcacccgaacctgggccctgcccacctacaacaatcacctctacaagcaaatctccaacagcacatctggaggatcttcaaatgacaacgcctacttcggctacagcaccccctgggggtattttgacttcaacagattccactgccacttctcaccacgtgactggcagcgactcatcaacaacaactggggatttcggcctaagcgactcaacttcaagctcttcaacattcaggtcaaagaggttacggacaacaatggagtcaagaccatcgccaataaccttaccagcacggtccaggtcttcacggactcagactatcagctcccgtacgtgctcgggtcggctcacgagggctgcctcccgccgttcccagcggacgttttcatgattcctcagtacgggtatctgacgcttaatgatggaagccaggccgtgggtcgttcgtccttttactgcctggaatatttcccgtcgcaaatgctaagaacgggtaacaacttccagttcagctacgagtttgagaacgtacctttccatagcagctacgctcacagccaaagcctggaccgactaatgaatccactcatcgaccaatacttgtactatctctcaaagactattaacggttctggacagaatcaacaaacgctaaaattcagtgtggccggacccagcaacatggctgtccagggaagaaactacatacctggacccagctaccgacaacaacgtgtctcaaccactgtgactcaaaacaacaacagcgaatttgcttggcctggagcttcttcttgggctctcaatggacgtaatagcttgatgaatcctggacctgctatggccagccacaaagaaggagaggaccgtttctttcctttgtctggatctttaatttttggcaaacaaggaactggaagagacaacgtggatgcggacaaagtcatgataaccaacgaagaagaaattaaaactactaacccggtagcaacggagtcctatggacaagtggccacaaaccaccagagtgcccaagcacaggcgcagaccggctgggttcaaaaccaaggaatacttccgggtatggtttggcaggacagagatgtgtacctgcaaggacccatttgggccaaaattcctcacacggacggcaactttcacccttctccgctgatgggagggtttggaatgaagcacccgcctcctcagatcctcatcaaaaacacacctgtacctgcggatcctccaacggccttcaacaaggacaagctgaactctttcatcacccagtattctactggccaagtcagcgtggagatcgagtgggagctgcagaaggaaaacagcaagcgctggaacccggagatccagtacacttccaactattacaagtctaataatgttgaatttgctgttaatactgaaggtgtatatagtgaaccccgccccattggcaccagatacctgactcgtaatctgtaattgcttgttaatcaataaaccgtttaattcgtttcagttgaactgcggcc

SEQ ID NO: 586 - DNA, 2580 bp, Artificial Sequence
  Description of Artificial Sequence: Synthetic polynucleotide
ccatcgacgtcagacgcggaagcttcgatcaactacgcggacaggtaccaaaacaaatgttctcgtcacgtgggcatgaatctgatgctgtttccctgcagacaatgcgagagactgaatcagaattcaaatatctgcttcactcacggtgtcaaagactgtttagagtgctttcccgtgtcagaatctcaacccgtttctgtcgtcaaaaaggcgtatcagaaactgtgctacattcatcacatcatgggaaaggtgccagacgcttgcactgcttgcgacctggtcaatgtggacttggatgactgtgtttctgaacaataaatgacttaaaccaggtatggctgccgatggttatcttccagattggctcgaggacaaccttagtgaaggaattcgcgagtggtgggctttgaaacctggagcccctcaacccaaggcaaatcaacaacatcaagacaacgctcgaggtcttgtgcttccgggttacaaataccttggacccggcaacggactcgacaagggggagccggtcaacgcagcagacgcggcggccctcgagcacgacaaggcctacgaccagcagctcaaggccggagacaacccgtacctcaagtacaaccacgccgacgccgagttccaggagcggctcaaagaagatacgtcttttgggggcaacctcgggcgagcagtcttccaggccaaaaagaggcttcttgaacctcttggtctggttgaggaagcggctaagacggctcctggaaagaagaggcctgtagagcagtctcctcgggaaccggactcctccgcgggtattggcaaatcgggtgcacagcccgctaaaaagagactcaatttcggtcagactggcgacacagagtcagtcccagaccctcaaccaatcggagaacctcccgcagccccctcaggtgtgggatctcttacaatggcttcaggtggtggcgcaccagtggcagacaataacgaaggtgccgatggagtgggtagttcctcgggaaattggcattgcgattcccaatggctgggggacagagtcatcaccaccagcacccgaacctgggccctgcccacctacaacaatcacctctacaagcaaatctccaacagcacatctggaggatcttcaaatgacaacgcctacttcggctacagcaccccctgggggtattttgacttcaacagattccactgccacttctcaccacgtgactggcagcgactcatcaacaacaactggggattccggcctaagcgactcaacttcaagctcttcaacattcaggtcaaagaggttacggacaacaatggagtcaagaccatcgccaataaccttaccagcacggtccaggtcttcacggactcagactatcagctcccgtacgtgctcgggtcggctcacgagggctgcctcccgccgttcccagcggacgttttcatgattcctcagtacgggtatctgacgcttaatgatggaagccaggccgtgggtcgttcgtccttttactgcctggaatatttcccgtcgcaaatgctaagaacgggtaacaacttccagttcagctacgagtttgagaacgtacctttccatagcagctacgctcacagccaaagcctggaccgactaatgaatccactcatcgaccaatacttgtactatctctcaaagactattaacggttctggacagaatcaacaaacgctaaaattcagtgtggccggacccagcaacatggctgtccagggaagaaactacatacctggacccagctaccgacaacaacgtgtctcaaccactgtgactcaaaacaacaacagcgaatttgcttggcctggagcttcttcttgggctctcaatggacgtaatagcttgatgaatcctggacctgctatggccagccacaaagaaggagaggaccgtttctttcctttgtctggatctttaatttttggcaaacaaggaactggaagagacaacgtggatgcggacaaagtcatgataaccaacgaagaagaaattaaaactactaacccggtagcaacggagtcctatggacaagtggccacaaaccaccagagtgcccaagcacaggcgcagaccggctgggttcaaaaccaaggaatacttccgggtatggtttggcaggacagagatgtgtacctgcaaggacccatttgggccaaaattcctcacacggacggcaactttcacccttctccgctgatgggagggtttggaatgaagcacccgcctcctcagatcctcatcaaaaacacacctgtacctgcggatcctccaacggccttcaacaaggacaagctgaactctttcatcacccagtattctactggccaagtcagcgtggagatcgagtgggaactgcagaaggaaaacagcaagcgctggaacccggagatccagtacacttccaactattacaagtctaataatgttgaatttgctgttaatactgaaggtgtatatagtgaaccccgccccattggcaccagatacctgactcgtaatctgtaattgcttgttaatcaataaaccgtttaatt

SEQ ID NO: 587 - DNA, 2601 bp, Artificial Sequence
  Description of Artificial Sequence: Synthetic polynucleotide
ccatcgacgtcagacgcggaagcttcgatcaactacgcggacaggtaccaaaacaaatgttctcgtcacgtgggcatgaatctgatgctgtttccctgcagacaatgcgagagactgaatcagaattcaaatatctgcttcactcacggtgtcaaagactgtttagagtgctttcccgtgtcagaatctcaacccgtttctgtcgtcaaaaaggcgtatcagaaactgtgctacattcatcacatcatgggaaaggtgccagacgcttgcactgcttgcgacctggtcaatgtggacttggatgactgtgtttctgaacaataaatgacttaaaccaggtatggctgccgatggttatcttccagattggctcgaggacaaccttagtgaaggaattcgcgagtggtgggctttgaaacctggagcccctcaacccaaggcaaatcaacaacatcaagacaacgctcgaggtcttgtgcttccgggttacaaataccttggacccggcaacggactcgacaagggggagccggtcaacgcagcagacgcggcggccctcgagcacgacaaggcctacgaccagcagctcaaggccggagacaacccgtacctcaagtacaaccacgccgacgccgagttccaggagcggctcaaagaagatacgtcttttgggggcaacctcgggcgagcagtctttcaggccaaaaagaggcttcttgaacctcttggtctggttgaggaagcggctaagacggctcctggaaagaagaggcctgtagagcagtctcctcaggaaccggactcctccgcgggtattggcaaatcgggtgcacagcccgctaaaaagagactcaatttcggtcagactggcgacacagagtcagtcccagaccctcaaccaatcggagaacctcccgcagccccctcaggtgtgggatctcttacaatggcttcatgtggtggcgcaccagtggcagacaataacgaaggtgccgatggagtgggtagttcctcgggaaattggcattgcgattcccaatggctgggggacagagtcatcaccaccagcacccgaacctgggccctgcccacctacaacaatcacctctacaagcaaatctccaacagcacatctggaggatcttcaaatgacaacgcctacttcggctacagcaccccctgggggtattttgacttcaacagattccactgccacttctcaccacgtgactggcagcgactcatcaacaacaactggggattccggcctaagcgactcaacttcaagctcttcaacattcaggtcaaagaggttacggacaacaatggagtcaagaccatcgccaataaccttaccagcacggtccaggtcttcacggactcagactatcagctcccgtacgtgctcgggtcggctcacgagggctgcctcccgccgttcccagcggacgttttcatgattcctcagtacgggtatctgacgcttaatgatggaagccaggccgtgggtcgttcgtccttttactgcctggaatatttcccgtcgcaaatgctaagaacgggtaacaacttccagttcagctacgagtttgagaacgtacctttccatagcagctacgctcacagccaaagcctggaccgactaatgaatccactcatcgaccaatacttgtactatctctcaaagactattaacggttctggacagaatcaacaaacgctaaaattcagtgtggccggacccagcaacatggctgtccagggaagaaactacatacctggacccagctaccgacaacaacgtgtctcaaccactgtgactcaaaacaacaacagcgaatttgcttggcctggagcttcttcttgggctctcaatggacgtaatagcttgatgaatcctggacctgctatggccagccacaaagaaggagaggaccgtttctttcctttgtctggatctttaatttttggcaaacaaggaactggaagagacaacgtggatgcggacaaagtcatgataaccaacgaagaagaaattaaaactactaacccggtagcaacggagtcctatggacaagtggccacaaaccaccagagtgcccaagcacaggcgcagaccggctgggttcaaaaccaaggaatacttccgggtatggtttggcaggacagagatgtgtacctgcaaggacccatttgggccaaaattcctcacacggacggcaactttcacccttctccgctgatgggagggtttggaatgaagcacccgcctcctcagatcctcatcaaaaacacacctgtacctgcggatcctccaacggccttcaacaaggacaagctgaactctttcatcacccagtattctactggccaagtcagcgtggagatcgagtgggagctgcagaaggaaaacagcaagcgctggaacccggagatccagtacacttccaactattacaagtctaataatgttgaatttgctgttaatactgaaggtgtatatagtgaaccccgccccattggcaccagatacctgactcgtaatctgtaattgcttgttaatcaataaaccgtttaattcgtttcagttgaactgcggcc

SEQ ID NO: 588 - DNA, 2601 bp, Artificial Sequence
  Description of Artificial Sequence: Synthetic polynucleotide
ccatcgacgtcagacgcggaagcttcgatcaactacgcggacaggtaccaaaacaaatgttctcgtcacgtgggcatgaatctgatgctgtttccctgcagacaatgcgagagactgaatcagaattcaaatatctgcttcactcacggtgtcaaagactgtttagagtgctttcccgtgtcagaatctcaacccgtttctgtcgtcaaaaaggcgtatcagaaactgtgctacattcatcacatcatgggaaaggtgccagacgcttgcactgcttgcgacctggtcaatgtggacttggatgactgtgtttctgaacaataaatgacttaaaccaggtatggctgccgatggttatcttccagattggctcgaggacaaccttagtgaaggaattcgcgagtggtgggctttgaaacctggagcccctcaacccaaggcaaatcaacaacatcaagacaacgctcgaggtcttgtgcttccgggttacaaataccttggacccggcaacggactcgacaagggggagccgatcaacgcagcagacgcggcggccctcgagcacgacaaggcctacgaccagcagctcaaggccggagacaacccgtacctcaagtacaaccacgccgacgccgagttccaggagcggctcaaagaagatacgtcttttgggggcaacctcgggcgagcagtcttccaggccaaaaagaggcttcttgaacctcttggtctggttgaggaagcggctaagacggctcctggaaagaagaggcctgtagagcagtctcctcaggaaccggactcctccgcgggtattggcaaatcgggtgcacagcccgctaaaaagagactcaatttcggtcagactggcgacacagagtcagtcccagaccctcaaccaatcggagaacctcccgcagccccctcaggtgtgggatctcttacaatggcttcaggtggtggcgcaccagtggcagacaataacgaaggtgccgatggagtgggtagttcctcgggaaattggcattgcgattcccaatggctgggggacagagtcatcaccaccagcacccgaacctgggccctgcccacctacaacaatcacctctacaagcaaatctccaacagcacatctggaggatcttcaaatgacaacgcctacttcggctacagcaccccctgggggtattttgacttcaacagattccactgccacttctcaccacgtgactggcagcgactcatcaacaacaactggggattccggcctaagcgactcaacttcaagctcttcaacattcaggtcaaagaggttacggacaacaatggagtcaagaccatcgccaataaccttaccagcacggtccaggtcttcacggactcagactatcagctcccgtacgtgctcgggtcggctcacgagggctgcctcccgccgttcccagcggacgttttcatgattcctcagtacgggtatctgacgcttaatgatggaagccaggccgtgggtcgttcgtccttttactgcctggaatatttcccgtcgcaaatgctaagaacgggtaacaacttccagttcagctacgagtttgagaacgtacctttccatagcagctacgctcacagccaaagcctggaccgactaatgaatccactcatcgaccaatacttgtactatctctcaaagactattaacggttctggacagaatcaacaaacgctaaaattcagtgtggccggacccagcaacatggctgtccagggaagaaactacatacctggacccagctaccgacaacaacgtgtctcaaccactgtgactcaaaacaacaacagcgaatttgcttggcctggagcttcttcttgggctctcaatggacgtaatagcttgatgaatcctggacctgctatggccagccacaaagaaggagaggaccgtttctttcctttgtctggatctttaatttttggcaaacaaggaactggaagagacaacgtggatgcggacaaagtcatgataaccaacgaagaagaaattaaaactactaacccggtagcaacggagtcctatggacaagtggccacaaaccaccagagtgcccaagcacaggcgcagaccggctgggttcaaaaccaaggaatacttccgggtatggtttggcaggacagagatgtgtacctgcaaggacccatttgggccaaaattcctcacacgtacggcaactttcacccttctccgctgatgggagggtttggaatgaagcacccgcctcctcagatcctcatcaaaaacacacctgtacctgcggatcctccaacggccttcaacaaggacaagctgaactctttcatcacccagtattctactggccaagtcagcgtggagatcgagtgggagctgcagaaggaaaacagcaagcgctggaacccggagatccagtacacttccaactattacaagtctaataatgttgaatttgctgttaatactgaaggtgtatatagtgaaccccgccccattggcaccagatacctgactcgtaatctgtaattgcttgttaatcaataaaccgtttaattcgtttcagttgaactgcggcc

SEQ ID NO: 589 - DNA, 2601 bp, Artificial Sequence
  Description of Artificial Sequence: Synthetic polynucleotide
ccatcgacgtcagacgcggaagcttcgatcaactacgcggacaggtaccaaaacaaatgttctcgccacgtgggcatgaatctgatgctgtttccctgcagacaatgcgagagactgaatcagaattcaaatatctgcttcactcacggtgtcaaagactgtttagagtgctttcccgtgtcagaatctcaacccgtttctgtcgtcaaaaaggcgtatcagaaactgtgctacattcatcacatcatgggaaaggtgccagacgcttgcactgcttgcgacctggtcaatgtggacttggatgactgtgtttctgaacaataaatgacttaaaccaggtatggctgccgatggttatcttccagattggctcgaggacaaccttagtgaaggaattcgcgagtggtgggctttgaaacctggagcccctcaacccaaggcaaatcaacaacatcaagacaacgctcgaggtcttgtgcttccgggttacaaataccttggacccggcaacggactcgacaagggggagccggtcaacgcagcagacgcggcggccctcgagcacgacaaggcctacgaccagcagctcaaggccggagacaacccgtacctcaagtacaaccacgccgacgccgagttccaggagcggctcaaagaagatacgtcttttgggggcaacctcgggcgagcagtcttccaggccaaaaagaggcttcttgaacctcttggtctggttgaggaagcggctaagacggctcctggaaagaagaggcctgtagagcagtctcctcaggaaccggactcctccgcgggtattggcaaatcgggtgcacagcccgctaaaaagagactcaatttcggtcagactggcgacacagagtcagtcccagaccctcaaccaatcggagaacctcccgctgccccctcaggtgtgggatctcttacaatggcttcaggtggtggcgcaccagtggcagacaataacgaaggtgccgatggagtgggtagttcctcgggaaattggcattgcgattcccaatggctgggggacagagtcatcaccaccagcacccgaacctgggccctgcccacctacaacaatcacctctacaagcaaatctccaacagcacatctggaggatcttcaaatgacaacgcctacttcggctacagcaccccctgggggtattttgacttcaacagattccactgccacttctcaccacatgactggcagcgactcatcaacaacaactggggattccggcctaagcgactcaacttcaagctcttcaacattcaggtcaaagaggttacggacaacaatggagtcaagaccatcgccaataaccttaccagcacggtccaggtcttcacggactcagactatcagctcccgtacgtgctcgggtcggctcacgagggctgcctcccgccgttcccagcggacgttttcatgattcctcagtacgggtatctgacgcttaatgatggaagccaggccgtgggtcgttcgtccttttactgcctggaatatttcccgtcgcaaatgctaagaacgggtaacaacttccagttcagctacgagtttgagaacgtacctttccatagcagctacgctcacagccaaagcctggaccgactaatgaatccactcatcgaccaatacttgtactatctctcaaagactattaacggttctggacagaatcaacaaacgctaaaattcaatgtggccggacccagcaacatggctgtccagggaagaaactacatacctggacccagctaccgacaacaacgtgtctcaaccactgtgactcaaaacaacaacagcgaatttgcctggcctagagcttcttcttgggctctcaatggacgtaatagcttgatgaatcctggacctgctatggccagccacaaagaaggagaggaccgtttctttcctttgtctggatctttaatttttggcaaacaaggaactggaagagacaacgtggatgcggacaaagtcatgataaccaacgaagaagaaattaaaactactaacccggtagcaacggagtcctatggacaagtggccacaaaccaccagagtgcccaagcacaggcgcagaccggctgggttcaaaaccaaggaatacttccgggtatggtttggcaggacagagatgtgtacctgcaaggacccatttgggccaaaattcctcacacggacggcaactttcacccttctccgctgatgggagggtttggaatgaagcacccgcctcctcagatcctcatcaaaaacacacctgtacctgcggatcctccaacggccttcaacaaggacaagctgaactctttcatcacccagtattctactggccaagtcagcatggagatcgagtgggagctgcagaaggaaaacagcaagcgctggaacccggagatccagtacacttccaactattacaagtctaataatgttgaatttgctgttaatactgaaggtgtatatagtgaaccccgccccattggcaccagatacctgactcgtaatctgtaattgcttgttaatcaataaaccgtttaattcgtttcagttgaactgcggcc

SEQ ID NO: 590 - DNA, 2601 bp, Artificial Sequence
  Description of Artificial Sequence: Synthetic polynucleotide
ccatcgacgtcagacgcggaagcttcgatcaactacgcggacaggtaccaaaacaaatgttctcgtcacgtgggcatgaatctgatgctgtttccctgcagacaatgcgagagactgaatcagaattcaaatatctgcttcactcacggtgtcaaagactgtttagagtgctttcccgtgtcagaatctcaacccgtttctgtcgtcaaaaaggcgtatcagaaactgtgctacattcatcacatcatgggaaaggtgccagacgcttgcactgcttgcgacctggtcaatgtggacttggatgactgtgtttctgaacaataaatgacttaaaccaggtatggctgccgatggttatcttccagattggctcgaggacaaccttagtgaaggaattcgcgagtggtgggctttgaaacctggagcccctcaacccaaggcaaatcaacaacatcaagacaacgctcgaggtcttgtgcttccgggttacaaataccttggacccggcaacggactcgacaagggggagccggtcaacgcagcagacgcggcggccctcgagcacgacaaggcctacgaccagcagctcaaggccggagacaacccgtacctcaagtacaaccacgccgacgccgagttccaggagcggctcaaagaagatacgtcttttgggggcaacctcgggcgagcagtcttccaggccaaaaagaggcttcttgaacctcttggtctggttgaggaagcggctaagacggctcctggaaagaagaggcctgtagagcagtctcctcaggaaccggactcctccgcgggtattggcaaatcgggtgcacagcccgctaaaaagagactcaatttcggtcagactggcgacacagagtcagtcccagaccctcaaccaatcggagaacctcccgcagccccctcaggtgtgggatctcttacaatggcttcaggtggtggcgcaccagtggcagacaataacgaaggtgccgatggagtgggtagttcctcgggaaattggcattgcgattcccaatggctgggggacagagtcatcaccaccagcacccgaacctgggccctgcccacctacaacaatcacctctacaagcaaatctccaacagcacatctggaggatcttcaaatgacaacgcctacttcggctacagcaccccctgggggtattttgacttcaacagattccactgccacttctcaccacgtgactggcagcgactcatcaacaacaactggggattccggcctaagcgactcaacttcaagctcttcaacattcaggtcaaagaggttacggacaacaatggagtcaagaccatcgccaataaccttaccagcacggtccaggtcttcacggactcagactatcagctcccgtacgtgctcgggtcggctcacgagggctgcctcccgccgttcccagcggacgttttcatgattcctcagtacgggtatctgacgcttaatgatggaagccaggccgtgggtcgttcgtccttttactgcctggaatatttcccgtcgcaaatgctaagaacgggtaacaacttccagttcagctacgagtttgagaacgtacctttccatagcagctacgctcacagccaaagcctggaccgactaatgaatccactcatcgaccaatacttgtactatctctcaaagactattaacggttctggacagaatcaacaaacgctaaaattcagtgtggccggacccagcaacatggctgtccagggaagaaactacatacctggacccagctaccgacaacaacgtgtctcaaccactgtgactcaaaacaacaacagcgaatttgcttggcctagagcttcttcttgggctctcaatggacgtaatagcttgatgaatcctggacctgctatggccagccacaaagaaggagaggaccgtttctttcctttgtctggatctttaatttttggcaaacaaggaactggaagagacaacgtggatgcggacaaagtcatgataaccaacgaagaagaaattaaaactactaacccggtagcaacggagtcctatggacaagtggccacaaaccaccagagtgcccaagcacaggcgcagaccggctgggttcaaaaccaaggaatacttccgggtatggtttggcaggacagagatgtgtacctgcaaggacccatttgggccaaaattcctcacacggacggcaactttcacccttctccgctgatgggagggtttggaatgaagcacccgcctcctcagatcctcatcaaaaacacacctgtacctgcggatcctccaacggccttcaacaaggacaagctgaactctttcatcacccagtattctactggccaagtcagcgtggagatcgagtgggagctgcagaaggaaaacagcaagcgctggaacccggagatccagtacacttccaactattacaagtctaataatgttgaatttgctgttaatactgaaggtgtatatagtgaaccccgccccattggcaccagatacctgactcgtaatctgtaattgcttgttaatcaataaaccgtttaattcgtttcagttgaactgcggcc

SEQ ID NO: 591 - DNA, 2601 bp, Artificial Sequence
  Description of Artificial Sequence: Synthetic polynucleotide
ccatcgacgtcagacgcggaagcttcgatcaactacgcggacaggtaccaaaacaaatgttctcgtcacgtgggcatgaatctgatgctgtttccctgcagacaatgcgagagactgaatcagaattcaaatatctgcttcactcacggtgtcaaagactgtttagagtgctttcccgtgtcagaatctcaacccgtttctgtcgtcaaaaaggcgtatcagaaactgtgctacattcatcacatcatgggaaaggtgccagacgcttgcactgcttgcgacctggtcaatgtggacttggatgactgtgtttctgaacaataaatgacttaaaccaggtatggctgccgatggttatcttccagattggctcgaggacaaccttagtgaaggaattcgcgagtggtgggctttgaaacctggagcccctcaacccaaggcaaatcaacaacatcaagacaacgctcgaggtcttgtgcttccgggttacaaataccttggacccggcaacggactcgacaagggggagccggtcaacgcagcagacgcggcggccctcgagcacgacaaggcctacgaccagcagctcaaggccggagacaacccgtacctcaagtacaaccacgccgacgccgagttccaggagcggctcaaagaagatacgtcttttgggggcaacctcgggcgagcagtcttccaggccaaaaagaggcttcttgaacctcttggtctggttgaggaagcggctaagacggctcctggaaagaagaggcctgtagagcagtctcctcaggaaccggactcctccgcgggtattggcaaatcgggtgcacagcccgctaaaaagagactcaatttcggtcagactggcgacacagagtcagtcccagaccctcaaccaatcggagaacctcccgcagccccctcaggtgtgggatctcttacaatggcttcaggtggtggcgcaccagtggcagacaataacgaaggtgccgatggagtgggtagttcctcgggaaattggcattgcgattcccaatggctgggggacagagtcatcaccaccagcacccgaacctgggccctgcccacctacaacaatcacctctacaagcaaatctccaacagcacatctggaggatcttcaaatgacaacgcctacttcggctacagcaccccctgggggtattttgacttcaacagattccactgccacttctcaccacgtgactggcagcgactcatcaacaacaactggggattccggcctaagcgactcaacttcaagctcttcaacattcaggtcaaagaggttacggacaacaatggagtcaagaccatcgccaataaccttaccagcacggtccaggtcttcacggactcagactatcagctcccgtacgtgctcgggtcggctcacgagggctgcctcccgccgttcccagcggacgttttcatgattcctcagtacgggtatctgacgcttaatgatggaagccaggccgtgggtcgttcgtccttttactgcctggaatatttcccgtcgcaaatgctaagaacgggtaacaacttccagttcagctacgagtttgagaacgtacctttccatagcagctacgctcacagccaaagcctggaccgactaatgaatccactcatcgaccaatacttgtactatctctcaaagactattaacggttctggacagaatcaacaaacgctaaaattcagtgtggccggacccagcaacatggctgtccagggaagaaactacatacctggacccagctaccgacaacaacgtgtctcaaccactgtgactcaaaacaacaacagcgaatttgcttggcctagagcttcttcttgggctctcaatggacgtaatagcttgatgaatcctggacctgctatggccagccacaaagaaggagaggaccgtttctttcctttgtctggatctttaatttttggcaaacaaggaactggaagagacaacgtggatgcggacaaagtcatgataaccaacgaagaagaaattaaaactactaacccggtagcaacggagtcctatggacaagtggccacaaaccaccagagtgcccaagcacaggcgcagaccggctgggttcaaaaccaaggaatacttccgggtatggtttggcaggacagagatgtgtacctgcaaggacccatttgggccaaaattcctcacacggacggcaactttcacccttctccgctgatgggagggtttggaatgaagcacccgcctcctcagatcctcatcaaaaacacacctgtacctgcggatcctccaacggccttcaacaaggacaagctgaactctttcatcacccagtattctactggccaagtcagcgtggagatcgagtgggagcggcagaaggaaaacagcaagcgctggaacccggagatccagtacacttccaactattacaagtctaataatgttgaatttgctgttaatactgaaggtgtatatagtgaaccccgccccattggcaccagatacctgactcgtaatctgtaattgcttgttaatcaataaaccgtttaattcgtttcagttgaactgcggcc

SEQ ID NO: 592 - DNA, 2601 bp, Artificial Sequence
  Description of Artificial Sequence: Synthetic polynucleotide
ccatcgacgtcagacgcggaagcttcgatcaactacgcggacaggtaccaaaacaaatgttctcgtcacgtgggcatgaatctgatgctgtttccctgcagacaatgcgagagactgaatcagaattcaaatatctgcttcactcacggtgtcaaagactgtttagagtgctttcccgtgtcagaatctcaacccgtttctgtcgtcaaaaaggcgtatcagaaactgtgctacattcatcacatcatgggaaaggtgccagacgcttgcactgcttgcgacctggtcaatgtggacttggatgactgtgtttctgaacaataaatgacttaaaccaggtatggctgccgatggttatcttccagattggctcgaggacaaccttagtgaaggaattcgcgagtggtgggctttgaaacctggagcccctcaacccaaggcaaatcaacaacatcaagacaacgctcgaggtcttgtgcttccgggttacaaataccttggacccggcaacggactcgacaagggggagccggtcaacgcagcagacgcggcggccctcgagcacgacaaggcctacgaccagcagctcaaggccggagacaacccgtacctcaagtacaaccacgccgacgccgagttccaggagcggctcaaagaagatacgtcttttgggggcaacctcgggcgagcagtcttccaggccaaaaagaggcttcttgaacctcttggtctggttgaggaagcggctaagacggctcctggaaagaagaggcctgtagagcagtctcctcaggaaccggactcctccgcgggtattggcaaatcgggtgcacagcccgctaaaaagagactcaatttcggtcagactggcgacacagagtcagtcccagaccctcaaccaatcggagaacctcccgcagccccctcaggtgtgggatctcttacaatggcttcaggtggtggcgcaccagtggcagacaataacgaaggtgccgatggagtgggtagttcctcgggaaattggcattgcgattcccaatggctgggggacagagtcatcaccaccagcacccgaacctgggccctgcccacctacaacaatcacctctacaagcaaatctccaacagcacatctggaggatcttcaaatgacaacgcctacttcggctacagcaccccctgggggtattttgacttcaacagattccactgccacttctcaccacgtgactggcagcgactcatcaacaacaactggggattccggcctaagcgactcaacttcaagctcttcaacattcaggtcaaagaggttacggacaacaatggagtcaagaccatcgccaataaccttaccagcacggtccaggtcttcgcggactcagactatcagctcccgtacgtgctcgggtcggctcacgagggctgcctcccgccgttcccagcggacgttttcatgattcctcagtacgggtatctgacgcttaatgatggaagccaggccgtgggtcgttcgtccttttactgcctggaatatttcccgtcgcaaatgctaagaacgggtaacaacttccagttcagctacgagtttgagaacgtacctttccatagcagctacgctcacagccaaagcctggaccgactaatgaatccactcatcgaccaatacttgtactatctctcaaagactattaacggttctggacagaatcaacaaacgctaaaattcagtgtggccggacccagcaacatggctgtccagggaagaaactacatacctggacccagctaccgacaacaacgtgtctcaaccactgtgactcaaaacaacaacagcgaatttgcttggcctagagcttcttcttgggctctcaatggacgtaatagcttgatgaatcctggacctgctatggccagccacaaagaaggagaggaccgtttctttcctttgtctggatctttaatttttggcaaacaaggaactggaagagacaacgtggatgcggacaaagtcatgataaccaacgaagaagaaattaaaactactaacccggtagcaacggagtcctatggacaagtggccacaaaccaccagagtgcccaagcacaggcgcagaccggctgggttcaaaaccaaggaatacttccgggtatggtttggcaggacagagatgtgtacctgcaaggacccatttgggccaaaattcctcacacggacggcaactttcacccttctccgctgatgggagggtttggaatgaagcacccgcctcctcagatcctcatcaaaaacacacctgtacctgcggatcctccaacggccttcaacaaggacaagctgaactctttcatcacccagtattctactggccaagtcagcgtggagatcgagtgggagctgcagaaggaaaacagcaagcgctggaacccggagatccagtacacttccaactattacaagtctaataatgttgaatttgctgttaatactgaaggtgtatatagtgaaccccgccccattggcaccagatacctgactcgtaatctgtaattgcttgttaatcaataaaccgtttaattcgtttcagttgaactgcggcc

SEQ ID NO: 593 - DNA, 2601 bp, Artificial Sequence
  Description of Artificial Sequence: Synthetic polynucleotide
ccatcgacgtcagacgcggaagcttcgatcaactacgcggacaggtaccaaaacaaatgttctcgtcacgtgggcatgaatctgatgctgtttccctgcagacaatgcgagagactgaatcagaattcaaatatctgcttcactcacggtgtcaaagactgtttagagtgctttcccgtgtcagaatctcaacccgtttctgtcgtcaaaaaggcgtatcagaaactgtgctacattcatcacatcatgggaaaggtgccagacgcttgcactgcttgcgacctggtcaatgtggacttggatgactgtgtttctgaacaataaatgacttaaaccaggtatggctgccgatggttatcttccagattggctcgaggacaaccttagtgaaggaattcgcgagtggtgggctttgaaacctggagcccctcaacccaaggcaaatcaacaacatcaagacaacgctcgaggtcttgtgcttccgggttacaaataccttggacccggcaacggactcgacaagggggagccggtcaacgcagcagacgcggcggccctcgagcacgacaaggcctacgaccagcagctcaaggccggagacaacccgtacctcaagtacaaccacgccgacgccgagttccaggagcggctcaaagaagatacgtcttttgggggcaacctcgggcgagcagtcttccaggccaaaaagaggcttcttgaacctcttggtctggttgaggaagcggctaagacggctcctggaaagaagaggcctgtagagcagtctcctcaggaaccggactcctccgcgggtattggcaaatcgggtgcacagcccgctaaaaagagactcaatttcggtcagactggcgacacagagtcagtcccagaccctcaaccaatcggagaacctcccgcagccccctcaggtgtgggatctcttacaatggcttcaggtggtggcgcaccagtggcagacaataacgaaggtgccgatggagtgggtagttcctcgggaaattggcattgcgattcccaatggctgggggacagagtcatcaccaccagcacccgaacctgggccctgcccacctacaacaatcacctctacaagcaaatctccaacagcacatctggaggatcttcaaatgacaacgcctacttcggctacagcaccccctgggggtattttgacttcaacagattccactgccacttctcaccacgtgactggcagcgactcatcaacaacaactggggattccggcctaagcgactcaacttcaagctcttcaacattcaggtcaaagaggttacggacaacaatggagtcaagaccatcgccaataaccttaccagcacggtccaggtcttcacggactcagactatcagctcccgtacgtgctcgggtcggctcacgagggctgcctcccgccgttcccagcggacgttttcatgattcctcagtacgggtatctgacgcttaatgatggaagccaggccgtgggtcgttcgtccttttactgcctggaatatttcccgtcgcaaatgctaagaacgggtaacaacttccagttcagctacgagtttgagaacgtacctttccatagcagctacgctcacagccaaagcctggaccgactaatgaatccactcatcgaccaatacttgtactatctctcaaagactattaacggttctggacagaatcaacaaacgctaaaattcagtgtggccggacccagcaacatggctgtccagggaagaaactacatacctggacccagctaccgacaacaacgtgtctcaaccactgtgactcaaaacaacaacagcgaaattgcttggcctagagcttcttcttgggctctcaatggacgtaatagcttgatgaatcctggacctgctatggccagccacaaagaaggagaggaccgtttctttcctttgtctggatctttaatttttggcaaacaaggaactggaagagacaacgtggatgcggacaaagtcatgataaccaacgaagaagaaattaaaactactaacccagtagcaacggagtcctatggacaagtggccacaaaccaccagagtgcccaagcacaggcgcagaccggctgggttcaaaaccaaggaatacttccgggtatggtttggcaggacagagatgtgtacctgcaaggacccatttgggccaaaattcctcacacggacggcaactttcacccttctccgctgatgggagggtttggaatgaagcacccgcctcctcagatcctcatcaaaaacacacctgtacctgcggatcctccaacggccttcaacaaggacaagctgaactctttcatcacccagtattctactggccaagtcagcgtggagatcgagtgggagctgcagaaggaaaacagcaagcgctggaacccggagatccagtacacttccaactattgcaagtctaataatgttgaatttgctgttaatactgaaggtgtatatagtgaaccccgccccattggcaccagatacctgactcgtaatctgtaattgcttgttaatcaataaaccgtttaattcgtttcagttgaactgcggcc

SEQ ID NO: 594 - DNA, 2601 bp, Artificial Sequence
  Description of Artificial Sequence: Synthetic polynucleotide
ccatcgacgtcagacgcggaagcttcgatcaactacgcggacaggtaccaaaacaaatgttctcgtcacgtgggcatgaatctgatgctgtttccctgcagacaatgcgagagactgaatcagaattcaaatatctgcttcactcacggtgtcaaagactgtttagagtgctttcccgtgtcagaatctcaacccgtttctgtcgtcaaaaaggcgtatcagaaactgtgctacattcatcacatcatgggaaaggtgccagacgcttgcactgcttgcgacctggtcaatgtggacttggatgtctgtgtttctgaacaataaatgacttaaaccaggtatggctgccgatggttatcttccagattggctcgaggacaaccttagtgaaggaattcgcgagtggtgggctttgaaacctggagcccctcaacccaaggcaaatcaacaacatcaagacaacgctcgaggtcttgtgcttccgggttacaaataccttggacccggcaacggactcgataagggggagccggtcaacgcagcagacgcggcggccctcgagcacgacaaggcctacgaccagcagctcaaggccggagacaacccgtacctcaagtacaaccacgccgacgccgagttccaggagcggctcaaagaagatacgtcttttgggggcaacctcgggcgagcagtcttccaggccaaaaagaggcttcttgaacctcttggtctggttgaggaagcggctaagacggctcctggaaagaagaggcctgtagagcagtctcctcaggaaccggactcctccgcgggtattggcaaatcgggtgcacagcccgctaaaaagagactcaatttcggtcagactggcgacacagagtcagtcccagaccctcaaccaatcggagaacctcccgcagccccctcaggtgtgggatctcttacaatggcttcaggtggtggcgcaccagtggcagacaataacgaaggtgccgatggagtgggtagttcctcgggaaattggcattgcgattcccaatggctgggggacagagtcatcaccaccagcacccgaacctgggccctgcccacctacaacaatcacctctacaagcaaatctccaacagcacatctggaggatcttcaaatgacaacgcctacttcggctacagcaccccctgggggtattttgacttcaacagattccactgccacttctcaccacgtgactggcagcgactcatcaacaacaactggggattccggcctaagcgactcaacttcaagctcttcaacattcaggtcaaagaggttacggacaacaatggagtcaagaccatcgccaataaccttaccagcacggtccaggtcttcacggactcagactatcagctcccgtacgtgctcgggtcggctcacgagggctgcctcccgccgttcccagcggacgttttcatgattcctcagtacgggtatctgacgcttaatgatggaagccaggccgtgggtcgttcgtccttttactgcctggaatatttcccgtcgcaaatgctaagaacgggtaacaacttccagttcagctacgagtttgagaacgtacctttccatagcagctacgctcacagccaaagcctggaccgactaatgaatccactcatcgaccaatacttgtactatctctcaaagactattaacggttctggacagaatcaacaaacgctaaaattcagtgtggccggacccagcaacatggctgtccagggaagaaactacatacctggacccagctaccgacaacaacgtgtctcaaccactgtgactcaaaacaacaacagcgaatttgcttggcctagagcttcttcttgggctctcaatggacgtaatagcttgatgaatcctggacctgctatggccagccacaaagaaggagaggaccgtttctttcctttgtctggatctttaatttttggcaaacaaggaactggaagagacaacgtggatgcggacaaagtcatgataaccaacgaagaagaaattaaaactactaacccggtagcaacggagtcctatggacaagtggccacaaaccaccagagtgcccaagcacaggcgcagaccggctgggttcaaaaccaaggaatacttccgggtatggtttggcaggacagagatgtgtacctgcaaggacccatttgggccaaaattcctcacacggacggcaactttcacccttctccgctgatgggagggtttggaatgaagcacccgcctcctcagatcctcatcaaaaacacacctgtacctgcggatcctccaacggccttcaacaaggacaagctgaactctttcatcacccagtattctactggccaagtcagcgtggagatcgagtgggagctgcagaaggaaaacagcaagcgctggaacccggagatccagtacacttccaactattacaagtctaataatgttgaatttgctgttaatactgaaggtgtatatagtgaaccccgccccattggcaccagatacctgactcgtaatctgtaattgcttgttaatcaataaaccgtttaattcgtttcagttgaactgcggcc

SEQ ID NO: 595 - protein, 736 aa, Artificial Sequence
  Description of Artificial Sequence: Synthetic polypeptide
MTADGYLPDWLEDNLSEGIREWWALKPGAPQPKANQQHQDNARGLVLPGYKYLGPGNGLDKGEPVNAADAAALEHDKAYDQQLKAGDNPYLKYNHADAEFQERLKEDTSFGGNLGRAVFQAKKRLLEPLGLVEEAAKTAPGKKRPVEQSPQEPDSSAGIGKSGAQPAKKRLNFGQTGDTESVPDPQPIGEPPAAPSGVGSLTMASGGGAPVADNNEGADGVGSSSGNWHCDSQWLGDRVITTSTRTWALPTYNNHLYKQISNSTSGGSSNDNAYFGYSTPWGYFDFNRFHCHFSPRDWQRLINNNWGFRPKQLNFKLFNIQVKEVTDNNGVKTIANNLTSTVQVFTDSDYQLPYVLGSAHEGCLPPFPADVFMIPQYGYLTLNDGSQAVGRSSFYCLEYFPSQMLRTGNNFQFSYEFENVPFHSSYAHSQSLDRLMNPLIDQYLYYLSKTINGSGQNQQTLKFSVAGPSNMAVQGRNYIPGPSYRQQRVSTTVTQNNNSEFAWPGASSWALNGRNSLMNPGPAMASHKEGEDRFFPLSGSLIFGKQGTGRDNVDADKVMITNEEEIKTTNPVATESYGQVATNHQSAQAQAQTGWVQNQGILPGMVWQDRDVYLQGPIWAKIPHTDGNFHPSPLMGGFGMKHPPPQILIKNTPVPADPPTAFNKDKLNSFITQYSTGQVSVEIEWELQKENSKRWNPEIQYTSNYYKSNNVEFAVNTEGVYSEPRPIGTRYLTRNL

SEQ ID NO: 596 - protein, 736 aa, Artificial Sequence
  Description of Artificial Sequence: Synthetic polypeptide
MAADGYLPDWLEDNLSEGIREWWALKPGAPQPKANQQHQDNARGLVLPGYKYLGPGNGLDKGEPVNAADAAALEHDKAYDQQLKAGDNPYLKYNHADAEFQERLKEDTSFGGNLGRAVFQAKKRLLEPLGLVEEAAKTAPGKKRPVEQSPQEPDSSAGIGKSGAQPAKKRLNFGQTGDTESVPDPQPIGEPPAAPSGVGSLTMASGGGAPVADNNEGADGVGSSSGNWHCDSQWLGDRVITTSTRTWALPTYNNHLYKQISNSTSGGSSNDNAYFGYSTPWGYFDFNRFHCHFSPRDWQRLINNNWGFRPKRLNFKLFNIQVKEVTDNNGVKTIANNLTSTVQVFTDSDYQLPYVLGSAHEGCLPPFPADVFMIPQYGYLTLNDGSQAVGRSSFYCLEYFPSQMLRTGNNFQFSYEFENVPFHSSYAHSQSLDRLMNPLIDQYLYYLSKTINGSGQNQQTLKFSVAGPSNMAVQGRNYIPGPSYRQQRVSTTVTQNNNSEFAWPGASSWALNGRNSLMNPGPAMASHKEGEDRFFPLSGSLIFGKQGTGRDNVDADKVMITNEEEIKTTNPVATESYGQVATNHQSAQAQAQTGWVQNQGILPGMVWQDRDVYLQGPIWAKIPHTGGNFHPSPLMGGFGMKHPPPQILIKNTPVPADPPTAFNKDKLNSFITQYSTGQVSVEIEWELQKENSKRWNPEIQYTSNYYKSNNVEFAVNTGGVYSEPRPIGTRYLTRNL

SEQ ID NO: 597 - protein, 736 aa, Artificial Sequence
  Description of Artificial Sequence: Synthetic polypeptide
MAADGYLPDWLEDNLSEGIREWWALKPGAPQPKANQQHQDNARGLVLPGYKYLGPGNGLDKGEPVNAADAAALEHDKAYDQQLKAGDNPYLKYNHADAEFQERLKEDTSFGGNLGRAVFQAKKRLLEPLGLVEEAAKTAPGKKRPVEQSPQEPDSSAGIDKSGAQPAKKRLNFGQTGDTESVPDPQPIGEPPAAPSGVGSLTMASGGGAPVADNNEGADGVGSSSGNWHCDSQWLGDRVITTSTRTWALPTYNNHLYKQISNSTSGGSSNDNAYFGYSTPWGYFDFNRFHCHFSPRDWQRLINNNWGFRPKRLNFKLFNIQVKEVTDNNGVKTIANNLTSTVQVFTDSDYQLPYVLGSAHEGCLPPFPADVFMIPQYGYLTLNDGSQAVGRSSFYCLEYFPSQMLRTGNNFQFSYEFENVPFHSSYAHSQSLDRLMNPLIDQYLYYLSKTINGSGQNQQTLKFSVAGPSNMAVQGRNYIPGPSYRQQRVSTTVTQNNNSEFAWPGASSWALNGRNSLMNPGPAMASHKEGEDRFFPLSGSLIFGKQGTGRDNVDADKVMITNEEEIKTTNPVATESYGQVATNHQSAQAQAQTGWVQNQGILPGMVWQDRDVYLQGPIWAKIPHTDGNFHPSPLMGGFGMKHPPPQILIKNTPVPADPPTAFNKDKLNSFITQYSTGQVSVEIEWELQKENSKRWNPEIQYTSNYYKSNNVEFAVNTEGVYSEPRPIGTRYLTRNL

SEQ ID NO: 598 - protein, 736 aa, Artificial Sequence
  Description of Artificial Sequence: Synthetic polypeptide
MAADGYLPDWLEDNLSEGIREWWALKPGAPQPKANQQHQDNARGLVLPGYKYLGPGNGLDKGEPVNAADAAALEHDKAYDQQLKAGDNPYLKYNHADAEFQERLKEDTSFGGNLGRAVLQAKKRLLEPLGLVEEAAKTAPGKKRPVEQSPQEPDSSAGIGKSGAQPAKKRLNFGQTGDTESVPDPQPIGEPPAAPSGVGSLTMASGGGAPVADNNEGADGVGSSSGNWHCDSQWLGDRVITTSTRTWALPTYNNHLYKQISNSTSGGSSNDNAYFGYSTPWGYFDFNRFHCHFSPRDWQRLINNNWGFRPKRLNFKLFNIQVKEVTDNNGVKTIANNLTSTVQVFTDSDYQLPYVLGSAHEGCLPPFPADVFMIPQYGYLTLNDGSQAVGRSSFYCLEYFPSQMLRTGNNFQFSYEFENVPFHSSYAHSQSLDRLMNPLIDQYLYYLSKTINGSGQNQQTLKFSVAGSSNMAVQGRNYIPGPSYRQQRVSTTVTQNNNSEFAWPGASSWALNGRNSLMNPGPAMASHKEGEDRFFPLSGSLIFGKQGTGRDNVDADKVMITNEEEIKTTNPVATESYGQVATNHQSAQAQAQTGWVQNQGILPGMVWQDRDVYLQGPIWAKIPHTDGNFHPSPLMGGFGMKHPPPQILIKNTPVPADPPTAFNKDKLNSFITQYSTGQVSVEIEWELQKENSKRWNPEIQYTSNYYKSNNVEFAVNTEGVYSEPRPIGTRYLTRNL

SEQ ID NO: 599 - protein, 736 aa, Artificial Sequence
  Description of Artificial Sequence: Synthetic polypeptide
MAADGYLPDWLEDNLSEGIREWWALKPGAPQPKANQQHQDNARGLVLPGYKYLGPGNGLDKGEPVNAADAAALEHDRAYDQQLKAGDNPYLKYNHADAEFQERLKEDTSFGGNLGRAVFQAKKRLLEPLGLVEEAAKTAPGKKRPVEQSPQEPDSSAGIGKSGAQPAKKRLNFGQTGDTESVPDPQPIGEPPAAPSGVGSLTMASGGGAPVADNNEGADGVGSSSGNWHCDSQWLGDRVITTSTRTWALPTYNNHLYKQISNSTSGGSSNDNAYFGYSTPWGYFDFNRFHCHFSPRDWQRLINNNWGFRPKRLNFKLFNIQVKEVTDNNGVKTIANNLTSTVQVFTDSDYQLPYVLGSAHEGCLPPFPADVFMIPQYGYLTLNDGSQAVGRSSFYCLEYFPSQMLRTGNNFQFSYEFENVPFHSSYAHSQSLDRLMNPLIDQYLYYLSKTINGSGQNQQTLKFSVAGPSNMAVQGRNYIPGPSYRQQRVSTTVTQNNNSEFAWPGASSWALNGRNSLMNPGPAMASHKEGEDRFFPLSGSLIFGKQGTGRDNVDADKVMITNEEEIKTTNPVATESYGQVATNHQSAQAQAQTGWVQNQGILPGMVWQDRDVYLQGPIWAKIPHTDGNFHPSPLMGGFGMKHPPPQILIKNTPVPADPPTAFNKDKLNSFITQYSTGQVSVEIEWELQKKNSKRWNPEIQYTSNYYKSNNVEFAVNTEGVYSEPRPIGTRYLTRNL

SEQ ID NO: 600 - protein, 736 aa, Artificial Sequence
  Description of Artificial Sequence: Synthetic polypeptide
MAADGYLPDWLEDNLSEGIREWWALKPGAPQPKANQQHQDNARGLVLPGYKYLGPGNGLDKGEPVNAADAAALEHDKAYDQQLKAGDNPYLKYNHADAEFQERLKEDTSFGGNLGRAVFQAKKRLLEPLGLVEEAAKTAPGKKRPVEQSPQEPDSSAGIGKSGAQPAKKRLNFGQTGDTESVPDPQPIGEPPAAPSGVGSLTMASGGGAPVADNNEGADGVGSSSGNWHCDSQWLGDRVITTSTRTWALPTYNNHLYKQISNSTSGGSSNDNAYFGYSTPWGYFDFNRFHCHFSPRDWQRLINNNWGFRPKRLNFKLFNIQVKEVTDNNGVKTIANNLTSTVQVFTDSDYQLPYVLGSAHEGCLPPFPADVFMIPQYGYLTLNDGSQAVGRSSFYCLEYFPSQMLRTGNNFQFSYEFENVPFHSSYAHSQSLDRLMNPLIDQYLYYLSKTINGSGQNQQTLKFSVAGPSNMAVQGRNYIPGPSYRQQRVSTTVTQNNNSEFAWPGASSWALNGRNSLMNPGPAMASHKEGEDRFFPLSGSLIFGKQGTGRDNVDADKVMITNEEEIKTTNPVATESYGQVATNHQSAQARAQTGWVQNQGILPGMVWQDRDVYLQGPIWAKIPHTDGNFHPSPLMGGFGMKHPPPQILIKNTPVPADPPTAFNKDKLNSFITQYSTGQVSVEIEWELQKENSKRWNPEIQYTSNYYKSNNVEFAVNTEGVYSEPRPIGTRYLTRNL

SEQ ID NO: 601 - protein, 736 aa, Artificial Sequence
  Description of Artificial Sequence: Synthetic polypeptide
MAADGYLPDWLEDNLSEGIREWWALKPGAPQPKANQQHQDNARGLVLPGYKYLGPGNGLDKGEPVNAVDAAALEHDKAYDQQLKAGDNPYLKYNHADAEFQERLKEDTSFGGNLGRAVFQAKKRLLEPLGLVEEAAKTAPGKKRPVEQSPQEPDSSAGIGKSGAQPAKKRLNFGQTGDTESVPDPQPIGEPPAAPSGVGSLTMASGGGAPVADNNEGADGVGSSSGNWHCDSQWLGDRVITTSTRTWALPTYNNHLYKQISNSTSGGSSNDNAYFGYSTPWGYFDFNRFHCHFSPRDWQRLINNNWGFRPKRLNFKLFNIQVKEVTDNNGVKTIANNLTSTVQVFTDSDYQLPYVLGSAHEGCLPPFPADVFMIPQYGYLTLNDGSQAVGRSSFYCLEYFPSQMLRTGNNFQFSYEFENVPFHSSYAHSQSLDRLMNPLIDQYLYYLSKTINGSGQNQQTLKFSVAGPSNMAVQGRNYIPGPSYRQQRVSTTVTQNNNSEFAWPGASSWALNGRNSLMNPGPAMASHKEGEDRFFPLSGSLIFGKQGTGRDNVDADKVMITNEEEIKTTNPVATESYGQVATNHQSAQAQAQTGWVQNQGILPGMVWQDRDVYLQGPIWAKIPHTDGNFHPSPLMGGFGMKHPPPQILIKNTPVPADPPTAFNKDKLNSFITQYSTGQVSVEIEWELQKENSKRWNPEIQYTSNYYKSNNVEFAVNTEGVYSEPRPIGTRYLTRNL

SEQ ID NO: 602 - protein, 736 aa, Artificial Sequence
  Description of Artificial Sequence: Synthetic polypeptide
MAADGYLPDWLEDNLSEGIREWWALKPGAPQPKANQQHQDNARGLVLPGYKYLGPGNGLDKGEPVNAADAAALEHDKAYDQQLKAGDNPYLKYNHADAEFQERLKEDTSFGGNLGRAVFQAKKRLLEPLGLVEEAAKTAPGKKRPVEQSPREPDSSAGIGKSGAQPAKKRLNFGQTGDTESVPDPQPIGEPPAAPSGVGSLTMASGGGAPVADNNEGADGVGSSSGNWHCDSQWLGDRVITTSTRTWALPTYNNHLYKQISNSTSGGSSNDNAYFGYSTPWGYFDFNRFHCHFSPRDWQRLINNNWGFRPKRLNFKLFNIQVKEVTDNNGVKTIANNLTSTVQVFTDSDYQLPYVLGSAHEGCLPPFPADVFMIPQYGYLTLNDGSQAVGRSSFYCLEYFPSQMLRTGNNFQFSYEFENVPFHSSYAHSQSLDRLMNPLIDQYLYYLSKTINGSGQNQQTLKFSVAGPSNMAVQGRNYIPGPSYRQQRVSTTVTQNNNSEFAWPGASSWALNGRNSLMNPGPAMASHKEGEDRFFPLSGSLIFGKQGTGRDNVDADKVMITNEEEIKTTNPVATESYGQVATNHQSAQAQAQTGWVQNQGILPGMVWQDRDVYLQGPIWAKIPHTDGNFHPSPLMGGFGMKHPPPQILIKNTPVPADPPTAFNKDKLNSFITQYSTGQVSVEIEWELQKENSKRWNPEIQYTSNYYKSNNVEFAVNTEGVYSEPRPIGTRYLTRNL

SEQ ID NO: 603 - protein, 736 aa, Artificial Sequence
  Description of Artificial Sequence: Synthetic polypeptide
MAADGYLPDWLEDNLSEGIREWWALKPGAPQPKANQQHQDNARGLVLPGYKYLGPGNGLDKGEPVNAADAAALEHDKAYDQQLKAGDNPYLKYNHADAEFQERLKEDTSFGGNLGRAVFQAKKRLLEPLGLVEEAAKTAPGKKRPVEQSPQEPDSSAGIGKSGAQPAKKRLNFGQTGDTESVPDPQPIGEPPAAPSGVGSLTMASCGGAPVADNNEGADGVGSSSGNWHCDSQWLGDRVITTSTRTWALPTYNNHLYKQISNSTSGGSSNDNAYFGYSTPWGYFDFNRFHCHFSPRDWQRLINNNWGFRPKRLNFKLFNIQVKEVTDNNGVKTIANNLTSTVQVFTDSDYQLPYVLGSAHEGCLPPFPADVFMIPQYGYLTLNDGSQAVGRSSFYCLEYFPSQMLRTGNNFQFSYEFENVPFHSSYAHSQSLDRLMNPLIDQYLYYLSKTINGSGQNQQTLKFSVAGPSNMAVQGRNYIPGPSYRQQRVSTTVTQNNNSEFAWPGASSWALNGRNSLMNPGPAMASHKEGEDRFFPLSGSLIFGKQGTGRDNVDADKVMITNEEEIKTTNPVATESYGQVATNHQSAQAQAQTGWVQNQGILPGMVWQDRDVYLQGPIWAKIPHTDGNFHPSPLMGGFGMKHPPPQILIKNTPVPADPPTAFNKDKLNSFITQYSTGQVSVEIEWELQKENSKRWNPEIQYTSNYYKSNNVEFAVNTEGVYSEPRPIGTRYLTRNL

SEQ ID NO: 604 - protein, 736 aa, Artificial Sequence
  Description of Artificial Sequence: Synthetic polypeptide
MAADGYLPDWLEDNLSEGIREWWALKPGAPQPKANQQHQDNARGLVLPGYKYLGPGNGLDKGEPINAADAAALEHDKAYDQQLKAGDNPYLKYNHADAEFQERLKEDTSFGGNLGRAVFQAKKRLLEPLGLVEEAAKTAPGKKRPVEQSPQEPDSSAGIGKSGAQPAKKRLNFGQTGDTESVPDPQPIGEPPAAPSGVGSLTMASGGGAPVADNNEGADGVGSSSGNWHCDSQWLGDRVITTSTRTWALPTYNNHLYKQISNSTSGGSSNDNAYFGYSTPWGYFDFNRFHCHFSPRDWQRLINNNWGFRPKRLNFKLFNIQVKEVTDNNGVKTIANNLTSTVQVFTDSDYQLPYVLGSAHEGCLPPFPADVFMIPQYGYLTLNDGSQAVGRSSFYCLEYFPSQMLRTGNNFQFSYEFENVPFHSSYAHSQSLDRLMNPLIDQYLYYLSKTINGSGQNQQTLKFSVAGPSNMAVQGRNYIPGPSYRQQRVSTTVTQNNNSEFAWPGASSWALNGRNSLMNPGPAMASHKEGEDRFFPLSGSLIFGKQGTGRDNVDADKVMITNEEEIKTTNPVATESYGQVATNHQSAQAQAQTGWVQNQGILPGMVWQDRDVYLQGPIWAKIPHTYGNFHPSPLMGGFGMKHPPPQILIKNTPVPADPPTAFNKDKLNSFITQYSTGQVSVEIEWELQKENSKRWNPEIQYTSNYYKSNNVEFAVNTEGVYSEPRPIGTRYLTRNL

SEQ ID NO: 605 - protein, 736 aa, Artificial Sequence
  Description of Artificial Sequence: Synthetic polypeptide
MAADGYLPDWLEDNLSEGIREWWALKPGAPQPKANQQHQDNARGLVLPGYKYLGPGNGLDKGEPVNAADAAALEHDKAYDQQLKAGDNPYLKYNHADAEFQERLKEDTSFGGNLGRAVFQAKKRLLEPLGLVEEAAKTAPGKKRPVEQSPQEPDSSAGIGKSGAQPAKKRLNFGQTGDTESVPDPQPIGEPPAAPSGVGSLTMASGGGAPVADNNEGADGVGSSSGNWHCDSQWLGDRVITTSTRTWALPTYNNHLYKQISNSTSGGSSNDNAYFGYSTPWGYFDFNRFHCHFSPHDWQRLINNNWGFRPKRLNFKLFNIQVKEVTDNNGVKTIANNLTSTVQVFTDSDYQLPYVLGSAHEGCLPPFPADVFMIPQYGYLTLNDGSQAVGRSSFYCLEYFPSQMLRTGNNFQFSYEFENVPFHSSYAHSQSLDRLMNPLIDQYLYYLSKTINGSGQNQQTLKFNVAGPSNMAVQGRNYIPGPSYRQQRVSTTVTQNNNSEFAWPRASSWALNGRNSLMNPGPAMASHKEGEDRFFPLSGSLIFGKQGTGRDNVDADKVMITNEEEIKTTNPVATESYGQVATNHQSAQAQAQTGWVQNQGILPGMVWQDRDVYLQGPIWAKIPHTDGNFHPSPLMGGFGMKHPPPQILIKNTPVPADPPTAFNKDKLNSFITQYSTGQVSMEIEWELQKENSKRWNPEIQYTSNYYKSNNVEFAVNTEGVYSEPRPIGTRYLTRNL

SEQ ID NO: 606 - protein, 736 aa, Artificial Sequence
  Description of Artificial Sequence: Synthetic polypeptide
MAADGYLPDWLEDNLSEGIREWWALKPGAPQPKANQQHQDNARGLVLPGYKYLGPGNGLDKGEPVNAADAAALEHDKAYDQQLKAGDNPYLKYNHADAEFQERLKEDTSFGGNLGRAVFQAKKRLLEPLGLVEEAAKTAPGKKRPVEQSPQEPDSSAGIGKSGAQPAKKRLNFGQTGDTESVPDPQPIGEPPAAPSGVGSLTMASGGGAPVADNNEGADGVGSSSGNWHCDSQWLGDRVITTSTRTWALPTYNNHLYKQISNSTSGGSSNDNAYFGYSTPWGYFDFNRFHCHFSPRDWQRLINNNWGFRPKRLNFKLFNIQVKEVTDNNGVKTIANNLTSTVQVFTDSDYQLPYVLGSAHEGCLPPFPADVFMIPQYGYLTLNDGSQAVGRSSFYCLEYFPSQMLRTGNNFQFSYEFENVPFHSSYAHSQSLDRLMNPLIDQYLYYLSKTINGSGQNQQTLKFSVAGPSNMAVQGRNYIPGPSYRQQRVSTTVTQNNNSEFAWPRASSWALNGRNSLMNPGPAMASHKEGEDRFFPLSGSLIFGKQGTGRDNVDADKVMITNEEEIKTTNPVATESYGQVATNHQSAQAQAQTGWVQNQGILPGMVWQDRDVYLQGPIWAKIPHTDGNFHPSPLMGGFGMKHPPPQILIKNTPVPADPPTAFNKDKLNSFITQYSTGQVSVEIEWELQKENSKRWNPEIQYTSNYYKSNNVEFAVNTEGVYSEPRPIGTRYLTRNL

SEQ ID NO: 607 - protein, 736 aa, Artificial Sequence
  Description of Artificial Sequence: Synthetic polypeptide
MAADGYLPDWLEDNLSEGIREWWALKPGAPQPKANQQHQDNARGLVLPGYKYLGPGNGLDKGEPVNAADAAALEHDKAYDQQLKAGDNPYLKYNHADAEFQERLKEDTSFGGNLGRAVFQAKKRLLEPLGLVEEAAKTAPGKKRPVEQSPQEPDSSAGIGKSGAQPAKKRLNFGQTGDTESVPDPQPIGEPPAAPSGVGSLTMASGGGAPVADNNEGADGVGSSSGNWHCDSQWLGDRVITTSTRTWALPTYNNHLYKQISNSTSGGSSNDNAYFGYSTPWGYFDFNRFHCHFSPRDWQRLINNNWGFRPKRLNFKLFNIQVKEVTDNNGVKTIANNLTSTVQVFTDSDYQLPYVLGSAHEGCLPPFPADVFMIPQYGYLTLNDGSQAVGRSSFYCLEYFPSQMLRTGNNFQFSYEFENVPFHSSYAHSQSLDRLMNPLIDQYLYYLSKTINGSGQNQQTLKFSVAGPSNMAVQGRNYIPGPSYRQQRVSTTVTQNNNSEFAWPRASSWALNGRNSLMNPGPAMASHKEGEDRFFPLSGSLIFGKQGTGRDNVDADKVMITNEEEIKTTNPVATESYGQVATNHQSAQAQAQTGWVQNQGILPGMVWQDRDVYLQGPIWAKIPHTDGNFHPSPLMGGFGMKHPPPQILIKNTPVPADPPTAFNKDKLNSFITQYSTGQVSVEIEWERQKENSKRWNPEIQYTSNYYKSNNVEFAVNTEGVYSEPRPIGTRYLTRNL

SEQ ID NO: 608 - protein, 736 aa, Artificial Sequence
  Description of Artificial Sequence: Synthetic polypeptide
MAADGYLPDWLEDNLSEGIREWWALKPGAPQPKANQQHQDNARGLVLPGYKYLGPGNGLDKGEPVNAADAAALEHDKAYDQQLKAGDNPYLKYNHADAEFQERLKEDTSFGGNLGRAVFQAKKRLLEPLGLVEEAAKTAPGKKRPVEQSPQEPDSSAGIGKSGAQPAKKRLNFGQTGDTESVPDPQPIGEPPAAPSGVGSLTMASGGGAPVADNNEGADGVGSSSGNWHCDSQWLGDRVITTSTRTWALPTYNNHLYKQISNSTSGGSSNDNAYFGYSTPWGYFDFNRFHCHFSPRDWQRLINNNWGFRPKRLNFKLFNIQVKEVTDNNGVKTIANNLTSTVQVFADSDYQLPYVLGSAHEGCLPPFPADVFMIPQYGYLTLNDGSQAVGRSSFYCLEYFPSQMLRTGNNFQFSYEFENVPFHSSYAHSQSLDRLMNPLIDQYLYYLSKTINGSGQNQQTLKFSVAGPSNMAVQGRNYIPGPSYRQQRVSTTVTQNNNSEFAWPRASSWALNGRNSLMNPGPAMASHKEGEDRFFPLSGSLIFGKQGTGRDNVDADKVMITNEEEIKTTNPVATESYGQVATNHQSAQAQAQTGWVQNQGILPGMVWQDRDVYLQGPIWAKIPHTDGNFHPSPLMGGFGMKHPPPQILIKNTPVPADPPTAFNKDKLNSFITQYSTGQVSVEIEWELQKENSKRWNPEIQYTSNYYKSNNVEFAVNTEGVYSEPRPIGTRYLTRNL

SEQ ID NO: 609 - protein, 736 aa, Artificial Sequence
  Description of Artificial Sequence: Synthetic polypeptide
MAADGYLPDWLEDNLSEGIREWWALKPGAPQPKANQQHQDNARGLVLPGYKYLGPGNGLDKGEPVNAADAAALEHDKAYDQQLKAGDNPYLKYNHADAEFQERLKEDTSFGGNLGRAVFQAKKRLLEPLGLVEEAAKTAPGKKRPVEQSPQEPDSSAGIGKSGAQPAKKRLNFGQTGDTESVPDPQPIGEPPAAPSGVGSLTMASGGGAPVADNNEGADGVGSSSGNWHCDSQWLGDRVITTSTRTWALPTYNNHLYKQISNSTSGGSSNDNAYFGYSTPWGYFDFNRFHCHFSPRDWQRLINNNWGFRPKRLNFKLFNIQVKEVTDNNGVKTIANNLTSTVQVFTDSDYQLPYVLGSAHEGCLPPFPADVFMIPQYGYLTLNDGSQAVGRSSFYCLEYFPSQMLRTGNNFQFSYEFENVPFHSSYAHSQSLDRLMNPLIDQYLYYLSKTINGSGQNQQTLKFSVAGPSNMAVQGRNYIPGPSYRQQRVSTTVTQNNNSEIAWPRASSWALNGRNSLMNPGPAMASHKEGEDRFFPLSGSLIFGKQGTGRDNVDADKVMITNEEEIKTTNPVATESYGQVATNHQSAQAQAQTGWVQNQGILPGMVWQDRDVYLQGPIWAKIPHTDGNFHPSPLMGGFGMKHPPPQILIKNTPVPADPPTAFNKDKLNSFITQYSTGQVSVEIEWELQKENSKRWNPEIQYTSNYCKSNNVEFAVNTEGVYSEPRPIGTRYLTRNL

SEQ ID NO: 610 - protein, 736 aa, Artificial Sequence; identical to SEQ ID NO: 606
  Description of Artificial Sequence: Synthetic polypeptide

SEQ ID NO: 611 - DNA, 2208 bp, Artificial Sequence
  Description of Artificial Sequence: Synthetic polynucleotide
atggctgccgatggttatcttccagattggctcgaggacaaccttagtgaaggaattcgcgagtggtgggctttgaaacctggagcccctcaacccaaggcaaatcaacaacatcaagacaacgctcgaggtcttgtgcttccgggttacaaataccttggacccggcaacggactcgacaagggggagccggtcaacgcagcagacgcggcggccctcgagcacgacaaggcctacgaccagcagctcaaggccggagacaacccgtacctcaagtacaaccacgccgacgccgagttccaggagcggctcaaagaagatacgtcttttgggggcaacctcgggcgagcagtcttccaggccaaaaagaggcttcttgaacctcttggtctggttgaggaagcggctaagacggctcctggaaagaagaggcctgtagagcagtctcctcaggaaccggactcctccgcgggtattggcaaatcgggtgcacagcccgctaaaaagagactcaatttcggtcagactggcgacacagagtcagtcccagaccctcaaccaatcggagaacctcccgcagccccctcaggtgtgggatctcttacaatggcttcaggtggtggcgcaccagtggcagacaataacgaaggtgccgatggagtgggtagttcctcgggaaattggcattgcgattcccaatggctgggggacagagtcatcaccaccagcacccgaacctgggccctgcccacctacaacaatcacctctacaagcaaatctccaacagcacatctggaggatcttcaaatgacaacgcctacttcggctacagcaccccctgggggtattttgacttcaacagattccactgccacttctcaccacgtgactggcagcgactcatcaacaacaactggggattccggcctaagcgactcaacttcaagctcttcaacattcaggtcaaagaggttacggacaacaatggagtcaagaccatcgccaataaccttaccagcacggtccaggtcttcacggactcagactatcagctcccgtacgtgctcgggtcggctcacgagggctgcctcccgccgttcccagcggacgttttcatgattcctcagtacgggtatctgacgcttaatgatggaagccaggccgtgggtcgttcgtccttttactgcctggaatatttcccgtcgcaaatgctaagaacgggtaacaacttccagttcggctacgagtttgagaacgtacctttccatagcagctacgctcacagccaaagcctggaccgactaatgaatccactcatcgaccaatacttgtactatctctcaaagactattaacggttctggacagaatcaacaaacgctaaaattcagtgtggccggacccagcaacatggctgtccagggaagaaactacatacctggacccagctaccgacaacaacgtgtctcaaccactgtgactcaaaacaacaacagcgaatttgcttggcctggagcttcttcttgggctctcaatggacgtaatagcttgatgaatcctggacctgctatggccagccacaaagaaggagaggaccgtttctttcctttgtctggatctttaatttttggcaaacaaggaactggaagagacaacgtggatgcggacaaagtcatgataaccaacgaagaagaaattaaaactactaacccggtagcaacggagtcctatggacaagtggccacaaaccaccagagtgcccaagcacaggcgcagaccggctgggttcaaaaccaaggaatacttccgggtatggtttggcaggacagagatgtgtacctgcaaggacccatttgggccaaaattcctcacacggacggcaactttcacccttctccgctgatgggagggtttggaatgaagcacccgcctcctcagatcctcatcaaaaacacacctgtacctgcggatcctccaacggccttcaacaaggacaagctgaactctttcatcacccagtattctactggccaagtcagcgtggagatcgagtgggagctgcagaaggaaaacagcaagcgctgggacccggagatccagtacacttccaactattacaagtctaataatgttgaatttgctgttaatactgaaggtgtatatagtgaaccccgccccattggcaccagatacctgactcgtaatctg

SEQ ID NO: 612 - DNA, 2208 bp, Artificial Sequence
  Description of Artificial Sequence: Synthetic polynucleotide
atggctgccgatggttatcttccagattggctcgaggacaaccttagtgaaggaattcgcgagtggtgggctttgaaacctggagcccctcaacccaaggcaaatcaacaacatcaagacaacgctcgaggtcttgtgcttccgggttacaaataccttggacccggcaacggactcgacaagggggagccggtcaacgcagcagacgcggcggccctcgagcacgacaaggcctacgaccagcagctcaaggccggagacaacccgtacctcaagtacaaccacgccgacgccgagttccaggagcggctcaaagaagatacgtcttttgggggcaacctcgggcgagcagtcttccaggccaaaaagaggcttcttgaacctcttggtctggttgaggaagcggctaagacggctcctggaaagaagaggcctgtagagcagtctcctcaggaaccggactcctccgcgggtattggcaaatcgggtgcacagcccgctaaaaagagactcaatttcggtcagactggcgacacagagtcagtcccagaccctcaaccaatcggagaacctcccgcagccccctcaggtgtgggatctcttacaatggcttcaggtggtggcgcaccagtggcagacaataacgaaggtgccgatggagtgggtagttcctcgggaaattggcattgcgattcccaatggctgggggacagagtcatcaccaccagcacccgaacctgggccctgcccacctacaacaatcacctctacaagcaaatctccaacagcacatctggaggatcttcaaatgacaacgcctacttcggctacagcaccccctgggggtattttgacttcaacagattccactgccgcttctcaccacgtgactggcagcgactcatcaacaacaactggggattccggcctaagcgactcaacttcaagctcttcaacattcaggtcaaagaggttacggacaacaatggagtcaagaccatcgccaataaccttaccagcacggtccaggtcttcacggactcagactatcagctcccgtacgtgctcgggtcggctcacgagggctgcctcccgccgttcccagcggacgttttcatgattcctcagtacgggtatctgacgcttaatgatggaagccaggccgtgggtcgttcgtccttttactgcctggaatatttcccgtcgcaaatgctaagaacgggtaacaacttccagttcagctacgagtttgagaacgtacctttccatagcagctacgctcacagccaaagcctggaccgactaatgaatccactcatcgaccaatacttgtactatctctcaaagactattaacggttctggacagaatcaacaaacgctaaaattcagtgtggccggacccagcaacatggctgtccagggaagaaactacatacctggacccagctaccgacaacaacgtgtctcaaccactgtgactcaaaacaacaacagcgaatttgcttggcctggagcttcttcttgggctctcaatggacgtaatagcttgatgaatcctggacctgctatggccagccacaaagaaggagaggaccgtttctttcctttgtctggatctttaatttttggcaaacaaggaactggaagagacaacgtggatgcggacaaagtcatgataaccaacgaagaagaaattaaaactactaacccggtagcaacggagtcctatggacaagtggccacaaaccaccagagtgcccaagcacaggcgcagaccggctgggttcaaaaccaaggaatacttccgggtatggtttggcaggacagagatgtgtacctgcaaggacccatttgggccaaaattcctcacacggacggcaactttcacccttctccgctgatgggagggtttggaatgaagcacccgcctcctcagatcctcatcaaaaacgcccctgtacctgcggatcctccaacggccttcaacaaggacaagctgaactctttcatcacccagtattctactggccaagtcagcgtggagatcgagtgggagctgcagaaggaaaacagcaagcgctggaacccggagatccagtacacttccaactattacaagtctaataatgttgaatttgctgttaatactgaaggtgtatatagtgaaccccgccccattggcaccagatacctgactcgtaatctg

SEQ ID NO: 613 - DNA, 2208 bp, Artificial Sequence
  Description of Artificial Sequence: Synthetic polynucleotide
atggctgccgatggttatcttccagattggctcgaggacaaccttagtgaaggaattcgcgagtggtgggctttgaaacctggagcccctcaacccaaggcaaatcaacaacatcaagacaacgctcgaggtcttgtgcttccgggttacaaataccttggacccggcaacggactcgacaagggggagccggtcagcgcagcagacgcggcggccctcgagcacgacaaggcctacgaccagcagctcaaggccggagacaacccgtacctcaagtacaaccacgccgacgccgagttccaggagcggctcaaagaagatacgtcttttgggggcaacctcgggcgagcagtcttccaggccaaaaagaggcttcttgaacctcttggtctggttgaggaagcggctaagacggctcctggaaagaagaggcctgtagagcagtctcctcaggaaccggactcctccgcgggtattggcaaatcgggtgcacagcccgctaaaaagagactcaatttcggtcagactggcgacacagagtcagtcccagaccctcaaccaatcggagaacctcccgcagccccctcaggtgtgggatctcttacaatggcttcaggtggtggcgcaccagtggcagacaataacgaaggtgccgatggagtgggtagttcctcgggaaattggcattgcgattcccaatggctgggggacagagtcatcaccaccagcacccgaacctgggccctgcccacctacaacaatcacctctacaagcaaatctccaacagcacatctggaggatcttcaaatgacaacgcctacttcggctacagcaccccctgggggtattttgacttcaacagattccactgccacttctcaccgcgtgactggcagcgactcatcaacaacaactggggattccggcctaagcgactcaacttcaagctcttcaacattcaggtcaaagaggttacggacaacaatggagtcaagaccatcgccaataaccttaccagcacggtccaggtcttcacggactcagactatcagctcccgtacgtgctcgggtcggctcacgagggctgcctcccgccgttcccagcggacgttttcatgattcctcagtacgggtatctgacgcttaatgatggaagccaggccgtgggtcgttcgtccttttactgcctggaatatttcccgtcgcaaatgctaagaacgggtaacaacttccagttcagctacgagtttgagaacgtacctttccatagcagctacgctcacagccaaagcctggaccgactaatgaatccactcatcgaccaatacttgtactatctctcaaagactattaacggttctggacagaatcaacaaacgctaaaattcagtgtggccggacccagcaacatggctgtccagggaagaaactacatacctggacccagctaccgacaacaacgtgtctcaaccactgtgactcaaaacaacaacagcgaatttgcttggcctggagcttcttcttgggctctcaatggacgtaatagcttgatgaatcctggacctgctatggccagccacaaagaaggagaggaccgtttctttcctttgtctggatctttaatttttggcaaacaaggaactggaagagacaacgtggatgcggacaaagtcatgataaccaacgaagaagaaattaaaactactaacccggtagcaacggagtcctatggacaagtggccacaaaccaccagagtgcccaagcacaggcgcagaccggctgggttcaaaaccaaggaatacttccgggtatggtttggcaggacagagatgtgtacctgcaaggacccatttgggccaaaattcctcacacggacggcaactttcacccttctccgctgatgggagggtttggaatgaagcacccgcctcctcagatcctcatcaaaaacacacctgtacctgcggatcctccaacggccttcaacaaggacaagctgaactctttcatcacccagtattctactggccaagtcagcgtggagatcgagtgggagctgcagaaggaaaacagcaagcgctggaacccggagatccagtacacttccaactattacaagtctaataatgttgaatttgctgttaatactgaaggtgtatatagtgaaccccgccccattggcaccagatacctgactcgtaatctg

SEQ ID NO: 614 - DNA, 2208 bp, Artificial Sequence
  Description of Artificial Sequence: Synthetic polynucleotide
atggctgccgatggttatcttccagattggctcgaggacaaccttagtgaaggaattcgcgagtggtgggctttgaaacctggagcccctcaacccaaggcaaatcaacaacatcaagacaacgctcgaggtcttgtgcttccgggttacaaataccttggacccggcaacggactcgacaagggggagccggtcaacgcagcagacgcggcggccctcgagcacgacaaggcctacgaccagcagctcaaggccggagacaacccgtacctcaagtacaaccacgccgacgccgagttccaggagcggctcaaagaagatacgtcttttgggggcaacctcgggcgagcagtcttccaggccaaaaagaggcttcttgaacctcttggtctggttgaggaagcggctaagacggctcctggaaagaagaggcctgtagagcagtctcctcaggaaccggactcctccgcgggtattggcaaatcgggtgcacagcccgctaaaaagagactcaatttcggtcagactggcgacacagagtcagtcccagaccctcaaccaatcggagaacctcccgcagccccctcaggtgtgggatctcttacaatggcttcaggtggtggcgcaccagtggcagacaataacgaaggtgccgatggagtgggtagttcctcgggaaattggcattgcgattcccaatggctgggggacagagtcatcaccaccagcacccgaacctgggccctgcccacctacaacaatcacctctacaagcaaatctccaacagcacatctggaggatcttcaaatgacaacgcctacttcggctacagcaccccctgggggtattttgacttcaacagattccactgccacttctcaccacgtgactggcagcgactcatcaacaacaactggggattccggcctaagcgactcaacttcaagctcttcaacattcaggtcaaagaggttacggacaacaatggagtcaagaccatcgccaataaccttaccagcacggtccaggtcttcacggactcagactatcagctcccgtacgtgctcgggtcggctcacgagggctgcctcccgccgttcccagcggacgttttcatgattcctcagtacgggtatctgacgcttaatgatggaagccaggccgtgggtcgttcgtccttttactgcctggaatatttcccgtcgcaaatgctaagaacgggtaacaacttccagttcagctacgagtttgagaacgtacctttccatagcagctacgctcacagccaaagcctggaccgactaatgaatccactcatcgaccaatacttgtactatctctcaaagactattaacggttctggacagaatcaacaaacgctaaaattcagtgtggccggacccagcaacacggctgtccagggaagaaactacatacctggacccagctaccgacaacaacgtgtctcaaccactgtgactcaaaacaacaacagcgaatttgcttggcctggagcttcttcttgggctctcaatggacgtaatagcttgatgaatcctggacctgctatggccagccacaaagaaggagaggaccgtttctttcctttgtctggatctttaatttttggcaaacaaggaactggaagagacaacgtggatgcggacaaagtcatgataaccaacgaagaagaaattaaaactactaacccggtagcaacggagtcctatggacaagtggccacaaaccaccagagtgcccaagcacaggcgcagaccggctgggttcaaaaccaaggaatacttccgggtatggtttggcaggacagagatgtgtacctgcaaggacccatttgggccaaaattcctcacacggacggcaactttcacccttctccgctgatgggagggtttggaatgaagcacccgcctcctcagatcctcatcaaaaacacacctgtacctgcggatcctccaacggccttcaacaaggacaagctgaactctttcatcacccagtattctactggccaagtcagcgtggagatcgagtgggagctgcagaaggaaaacagcaagcgctggaacccggagatccagtacacttccaactattacaagtctaataatgttgaatttgctgttaatactgaaggtgtatatagtgaaccccgccccattggcaccagatacctgactcgtaatctg

SEQ ID NO: 615 - DNA, 2208 bp, Artificial Sequence
  Description of Artificial Sequence: Synthetic polynucleotide
atggctgccgatggttatcttccagattggctcgaggacaaccttagtgaaggaattcgcgagtggtgggctttgaaacctggagcccctcaacccaaggcaaatcaacaacatcaagacaacgctcgaggtcttgtgcttccgggttacaaataccttggacccggcaacggactcgacaagggggagccggtcaacgcagcagacgcggcggccctcgagcacgacaaggcctacgaccagcagctcaaggccggagacaacccgtacctcaagtacaaccacgccgacgccgagttccaggagcggctcaaagaagatacgtcttttgggggcaacctcgggcgagcagtcttccaggccaaaaagaggcttcttgaacctcttggtctggttgaggaagcggctaagacggctcctggaaagaagaggcctgtagagcagtctcctcaggaaccggactcctccgcgggtattggcaaatcgggtgcacagcccgctaaaaagagactcaatttcggtcagactggcgacacagagtcagtcccagaccctcaaccaatcggagaacctcccgcagccccctcaggtgtgggatctcttacaatggcttcaggtggtggcgcaccagtggcagacaataacgaaggtgccgatggagtgggtagttcctcgggaaattggcattgcgattcccaatggctgggggacagagtcatcaccaccagcacccgaacctgggccctgcccacctacaacaatcacctctacaagcaaatctccaacagcacatctggaggatcttcaaatgacaacgcctacttcggctacagcaccccctgggggtattttgacttcaacagattccactgccacttctcaccacgtgactggcagcgactcatcaacaacaactggggattccggcctaagcggctcaacttcaagctcttcaacattcaggtcaaagaggttacggacaacaatggagtcaagaccatcgccaataaccttaccagcacggtccaggtcttcacggactcagactatcagctcccgtacgtgctcgggtcggctcacgagggctgcctcccgccgttcccagcggacgttttcatgattcctcagtacgggtatctgacgcttaatgatggaagccaggccgtgggtcgttcgtccttttactgcctggaatatttcccgtcgcaaatgctaagaacgggtagcaacttccagttcagctacgagtttgagaacgtacctttccatagcagctacgctcacagccaaagcctggaccgactaatgaatccactcatcgaccaatacttgtactatctctcaaagactattaacggttctggacagaatcaacaaacgctaaaattcagtgtggccggacccagcaacatggctgtccagggaagaaactacatacctggacccagctaccgacaacaacgtgtctcaaccactgtgactcaaaacaacaacagcgaatttgcttggcctggagcttcttcttgggctctcaatggacgtaatagcttgatgaatcctggacctgctatggccagccacaaagaaggagaggaccgtttctttcctttgtctggatctttaatttttggcaaacaaggaactggaagagacaacgtggatgcggacaaagtcatgataaccaacgaagaagaaattaaaactactaacccggcagcaacggagtcctatggacaagtggccacaaaccaccagagtgcccaagcacaggcgcagaccggctgggttcaaaaccaaggaatacttccgggtatggtttggcaggacagagatgtgtacctgcaaggacccatttgggccaaaattcctcacacggacggcaactttcacccttctccgctgatgggagggtttggaatgaagcacccgcctcctcagatcctcatcaaaaacacacctgtacctgcggatcctccaacggccttcaacaaggacaagctgaactctttcatcacccagtattctactggccaagtcagcgtggagatcgagtgggagctgcagaaggaaaacagcaagcgctggaacccggagatccagcacacttccaactattacaagtctaataatgttgaatttgctgttaatactgaaggtgtatatagtgaaccccgccccattggcaccagatacctgactcgtaatctg

SEQ ID NO: 616 - DNA, 2208 bp, Artificial Sequence
  Description of Artificial Sequence: Synthetic polynucleotide
atggctgccgatggttatcttccagattggctcgaggacaaccttagtgaaggaattcgcgagtggtgggctttgaaacctggagcccctcaacccaaggcaaatcaacaacatcaagacaacgctcgaggtcttgtgcttccgggttacaaataccttggacccggcaacggactcgacaagggggagccggtcaacgcagcagacgcggcggccctcgagcacgacaaggcctacgaccagcagctcaaggccggagacaacccgtacctcaagtacaaccacgccgacgccgagttccaggagcggctcaaagaagatacgtcttttgggggcaacctcgggcgagcagtcttccaggccaaaaagaggcttcttgaacctcttggtctggttgaggaagcggctaagacggctcctggaaagaagaggcctgtagagcagtctcctcaggaaccggactcctccgcgggtattggcaaatcgggtgcacagcccgctaaaaagagactcaatttcggtcagactggcgacacagagtcagtcccagaccctcaaccaatcggagaacctcccgcagccccctcaggtgtgggatctcttacaatggcttcaggtggtggcgcaccagtggcagacaataacgaaggtgccgatggagtgggtagttcctcgggaaattggcattgcgattcccaatggctgggggacagagtcatcaccaccagcacccgaacctgggccctgcccacctacaacaatcacctctacaagcaaatctccaacagcacatctggaggatcttcaaatgacaacgcctacttcggctacagcaccccctgggggtattttgacttcaacagattccactgccacttctcaccacgtgactggcagcgactcatcaacaacaactggggattccggcctaagcgactcaacttcaggctcttcaacattcaggtcaaagaggttacggacaacaatggagtcaagaccatcgccaataaccttaccagcacggtccaggtcttcacggactcagactatcagctcccgtacgtgctcgggtcggctcacgagggctgcctcccgccgttcccagcggacgttttcatgattcctcagtacgggtatctgacgcttaatgatggaagccaggccgtgggtcgttcgtccttttactgcctggaatatttcccgtcgcaaatgctaagaacgggtaacaacttccagttcagctacgagtttgagaacgtacctttccatagcagctacgctcacagccaaagcctggaccgactaatgaatccactcatcgaccaatacttgtactatctctcaaagactattaacggttctggacagaatcaacaaacgctaaaattcagtgtggccggacccagcaacatggctgtccagggaagaaactacatacctggacccagctaccgacaacaacgtgtctcaaccactgtgactcaaaacaacaacagcgaatttgcttggcctggagcttcttcttgggctctcaatggacgtaatagcttgatgaatcctggacctgctatggccagccacaaagaaggagaggaccgtttctttcctttgtctggatctttaatttttggcaaacaaggaactggaagagacaacgtggatgcggacaaagtcatgataaccaacgaagaagaaattaaaactactaacccggtagcaacggagtcctatggacaagtggccacaaaccaccagagtgcccaagcacaggcgcagaccggctgggttcaaagccaaggaatacttccgggtatggtttggcaggacagagatgtgtacctgcaaggacccatttgggccaaaattcctcacacggacggcaactttcacccttctccgctgatgggagggtttggaatgaagcacccgcctccccagatcctcatcaaaaacacacctgtacctgcggatcctccaacggccttcaacaaggacaagctgaactctttcatcacccagtattctactggccaagtcagcgtggagatcgagtgggagctgcagaaggaaaacagcaagcgctggaacccggagatccagtacacttccaactattacaagtctaataatgttgaatttgctgttaatactgaaggtgtatatagtgaaccccgccccattggcaccagatacctgactcgtaatctg

SEQ ID NO: 617 - DNA, 2205 bp, Artificial Sequence
  Description of Artificial Sequence: Synthetic polynucleotide
atggctgccgatggttatcttccagattggctcgaggacaaccttagtgaaggaattcgcgagtggtgggctttgaaacctggagcccctcaacccaaggcaaatcaacaacatcaagacaacgcccgaggtcttgtgcttccgggttacaaataccttggacccggcaacggactcgacaagggggagccggtcaacgcagcagacgcggcggccctcgagcacgacaaggcctacgaccagcagctcaaggccggagacaacccgtacctcaagtacaaccacgccgacgccgagttccaggagcggctcaaagaagatacgtcttttgggggcaacctcgggcgagcagtcttccaggccaaaaagaggcttcttgaacctcttggtctggttgaggaagcggctaagacggctcctggaaagaagaggcctgtagagcagtctcctcaggaaccggactcctccgcgggtattggcaaatcgggtgcacagcccgctaaaaagagactcaatttcggtcagactggcgacacagagtcagtcccagaccctcaaccaatcggagaacctcccgcagccccctcaggtgtgggatctcttacaatggcttcaggtggtggcgcaccagtggcagacaataacgaaggtgccgatggagtgggtagttcctcgggaaattggcattgcgattcccaatggctgggggacagagtcatcaccaccagcacccgaacctgggccctgcccacctacaacaatcacctctacaagcaaatctccaacagcacatctggaggatcttcaaatgacaacgcctacttcggctacagcaccccctggaggtattttgacttcaacagattccactgccacttctcaccacgtgactggcagcgactcatcaacaactggggattccggcctaagcgactcaacttcaagctcttcaacattcaggtcaaagaggttacggacaacaatggagtcaagaccatcgccaataaccttaccagcacggtccaggccttcacggactcagactatcagctcccgtacgtgctcgggtcggctcacgagggctgcctcccgccgttcccagcggacgttttcatgattcctcagtacgggtatctgacgcttaatgatggaagccaggccgtgggtcgttcgtccttttactgcctggaatatttcccgtcgcaaatgctaagaacgggtaacaacttccagttcagctacgagtttgagaacgtacctttccatagcagctacgctcacagccaaagcctggaccgactaatgaatccactcatcgaccaatacttgtactatctctcaaagactattaacggttctggacagaatcaacaaacgctaaaattcagtgtggccggacccagcaacatggctgtccagggaagaaactacatacctggacccagctaccgacaacaacgtgtctcaaccactgtgactcaaaacaacaacagcgaatttgcttggcctggagcttcttcttgggctctcaatggacgtaatagcttgatgaatcctggacctgctatggccagccacaaagaaggagaggaccgtttctttcctttgtctggatctttaatttttggcaaacaaggaactggaagagacaacgtggatgcggacaaagtcatgataaccaacgaagaagaaattaaaactactaacccggtagcaacggagtcctatggacaagtggccacaaaccaccagagtgcccaagcacaggcgcagaccggctgggttcaaaaccaaggaatacttccgggtatggtttggcaggacagagatgtgtacctgcaaggacccatttgggccaaaattcctcacacggacggcaactttcacccttctccgctgatgggagggtttggaatgaagcacccgcctcctcagatcctcatcaaaaacacacctgtacctgcggatcctccaacggccttcaacaaggacgagctgaactctttcatcacccagtattctactggccaagtcagcgtggagatcgagtgggagctgcagaaggaaaacagcaagcgctggaacccggagatccagtacacttccaactattacaagtctaataatgttgaatttgctgttaatactgaaggtgtatatagtgaaccccgccccattggcaccagatacctgactcgtaatctg

SEQ ID NO: 618 - DNA, 2205 bp, Artificial Sequence
  Description of Artificial Sequence: Synthetic polynucleotide
atggctgccgatggttatcttccagattggctcgaggacaaccttagtgaaggaattcgcgagtggtgggctttgaaacctggagcccctcaacccaaggcaaatcaacaacatcaagacaacgctcgaggtcttgtgcttccgggttacaaataccttggacccggcaacggactcgacaagggggagccggtcaacgcagcagacgcggcggccctcgagcacgacaaggcctacgaccagcagctcaaggccggagacaacccgtacctcaagtacaaccacgccgacgccgagttccaggagcggctcaaagaagatacgtcttttgggggcaacctcgggcgagcagtcttccaggacaaaaagaggcttcttgaacctcttggtctggttgaggaagcggctaagacggctcctggaaagaagaggcctgtagagcagtctcctcaggaaccggactcctccgcgggtattggcaaatcgggtgcacagcccgctaaaaagagactcaatttcggtcagactggcgacacagagtcagtcccagaccctcaaccaatcggagaacctcccgcagccccctcaggtgtgggatctcttacaatggcttcaggtggtggcgcaccagtggcagacaataacgaaggtgccgatggagtgggtagttcctcgggaaattggcattgcgattcccaatggctgggggacagagtcatcaccaccagcacccgaacctgggccctgcccacctacaacaatcacctctacaagcaaatctccaacagcacatctggaggatcttcaaatgacaacgcctacttcggctacagcaccccctgggggtattttgacttcaacagattccactgccacttctcaccacgtgactggcagcgactcatcaacaactggggattccggcctaagcgactcaacttcaagctcttcaacattcaggtcaaagaggttacggacaacaatggagtcaagaccatcgccaataaccttaccagcacggtccaggtcttcacggactcagactatcagctcccgtacgtgctcgggtcggctcacgagggctgcctcccgccgttcccagcggacgttttcatgattcctcagtacgggtatctgacgcttaatgatggaagccaggccgtgggtcgttcgtccttttactgcctggaatatttcccgtcgcaaatgctaagaacgggtaacaacttccaattcagctacgagtttgagaacgtacctttccatagcagctacgctcacagccaaagcctggaccgactaatgaatccactcatcgaccaatacttgtactatctctcaaagactattaacggttctggacagaatcaacaaacgctaaaattcagtgtggccggacccagcaacatggctgtccagggaagaaactacatacctggacccagctaccgacaacaacgtgtctcaaccactgtgactcaaaacaacaacagcgaatttgcttggcctggagcttcttcttgggctctcaatggacgtaatagcttgatgaatcctggacctgctatggccagccacaaagaaggagaggaccgtttctttcctttgtctggatctttaatttttggcaaacaaggaactggaagagacaacgtggatgcggacaaagtcatgataaccaacgaagaagaaattaaaactactaacccggtagcaacggagtcctatggacaagtggccacaaaccaccagagtgcccaagcacaggcgcagaccggctgggttcaaaaccaaggaatacttccgggtatggtttggcaggacagagatgtgtacctgcaaggacccatttgggccaaaattcctcacacggacggcaactttcacccttctccgctgatgggagggtttggaatgaagcacccgcctcctcagatcctcatcaaaaacacacctgtacctgcggatcctccaacggccttcaacaaggacaagctgaactctttcatcacccagtattctactggccaagtcagcgtggagatcgagtgggagctgcagaaggaaaacagcaagcgctggaacccggagatccagtacacttccaactattacaagtctaataatgttgaatttgctgttaatactgaaggtgtatatagtgaaccccgccccattggcaccagatacctgactcgtaatctg

SEQ ID NO: 619 - DNA, 2208 bp, Artificial Sequence
  Description of Artificial Sequence: Synthetic polynucleotide
atggctgccgatggttatcttccagattggctcgaggacaaccttagtgaaggaattcgcgagtggtgggctttgaaacctggagcccctcaacccaaggcaaatcaacaacatcaagacaacgctcgaggtcttgtgcttccgggttacaaataccttggacccggcaacggactcgacaagggggagccggtcaacgcagcagacgcggcggccctcgagcacgacaaggcctacgaccagcagctcaaggccggagacaacccgtacctcaagtacaaccacgccgacgccgagttccaggagcggctcaaagaagatacgtcttttgggggcaacctcgggcgagcagtcttccaggccaaaaagaggcttcttgaacctcttggtctggttgaggaagcggctaagacggctcctggaaagaagaggcctgtagagcagtctcctcaggaaccggactcctccgcgggtattggcaaatcgggtgcacagcccgctaaaaagagactcaatttcggtcagactggcgacacagagtcagtcccagaccctcaaccaatcggagaacctcccgcagccccctcaggtgtgggatctcttacaatggcttcaggtggtggcgcaccagtggcagacaataacgaaggtgccgatggagtgggtagttcctcgggaaattggcattgcgattcccaatggctgggggacagagccatcaccaccagcacccgaacctgggccctgcccacctacaacaatcacctctacaagcaaatctccaacagcacatctggaggatcttcaaatgacaacgcctacttcggctacagcaccccctgggggtattttgacttcaacagattccactgccacttctcaccacgtgactggcagcggctcatcaacaacaactggggattccggcctaagcgactcaacttcaagctcttcaacattcaggtcaaagaggttacggacaacaatggagtcaagaccatcgccaataaccttaccagcacggtccaggtcttcacggactcagactatcagctcccgtacgtgctcgggtcggctcacgagggctgcctcccgccgttcccagcggacgttttcatgattcctcagtacgggtatctgacgcttaatgatggaagccaggccgtgggtcgttcgtccttttactgcctggaatatttcccgtcgcaaatgctaagaacgggtaacaacttccagttcagctacgagtttgagaacgtacctttccatagcagctacgctcacagccaaagcctggaccgactaatgaatccactcatcgaccaatacttgtactatctctcaaagactattaacggttctggacagaatcaacaaacgctaaaattcagtgtggccggacccagcaacatggctgtccagggaagaaactacatacctggacccagctaccgacaacaacgtgtctcaaccactgtgactcaaaacaacaacagcgaatttgcttggcctggagcttcttcttgggctctcaatggacgtaatagcttgatgaatcctggacctgctatggccagccacaaagaaggagaggaccgtttctttcctttgtctggatctttaatttttggcaaacaaggaactggaagagacaacgtggatgcggacaaagtcatgacaaccaacgaagaagaaattaaaactactaacccggtagcaacggagtcctatggacaagtggccacaaaccaccagagtgcccaagcacaggcgcagaccggctgggttcaaaaccaaggaatacttccgggtatggtttggcaggacagagatgtgtacctgcaaggacccatttgggccaaaattcctcacacggacggcaactttcacccttctccgctgatgggagggtttggaatgaagcacccgcctcctcagatcctcatcaaaaacacacctgtacctgcggatcctccaacggccttcaacaaggacaagctgaactctttcatcacccagtattctactggccaagtcagcgtggagatcgagtgggagctgcagaaggaaaacagcaagcgctggaacccggagatccagtacacttccaactattacaagtctaataatgttgaatttgctgttaatactgaaggtgtatatagtgaaccccgccccattggcaccagatacctgactcgtaatctg

SEQ ID NO: 620 - DNA, 2208 bp, Artificial Sequence
  Description of Artificial Sequence: Synthetic polynucleotide
atggctgccgatggttatcttccagattggctcgaggacaaccttagtgaaggaattcgcgagtggtgggctttgaaacctggagcccctcaacccaaggcaaatcaacaacatcaagacaacgctcgaggtcttgtgcttccgggttacaaataccttggacccggcaacggactcgacaagggggagccggtcaatgcagcagacgcggcggccctcgagcacgacaaggcctacgaccagcagctcaaggccggagacaacccgtacctcaagtacaaccacgccgacgccgagttccaggagcggctcaaagaagatacgtcttttgggggcaacctcgggcgagcagtcttccagaccaaaaagaggcttcttgaacctcttggtctggttgaggaagcggctaagacggctcctggaaagaagaggcctgtagagcagtctcctcaggaaccgggctcctccgcgggtattggcaaatcgggtgcacagcccgctaaaaagagactcaatttcggtcagactggcgacacagagtcagtcccagaccctcaaccaatcggagaacctcccgcagccccctcaggtgtgggatctcttacaatggcttcaggtggtggcgcaccagtggcagacaataacgaaggtgccgatggagtgggtagttcctcgggaaattggcattgcgattcccaatggctgggggacagagtcatcaccaccagcacccgaacctgggccctgcccacctacaacaatcacctctacaagcaaatctccaacagcacatctggaggatcttcaaatgacaacgcctacttcggctacagcaccccctgggggtattttgacttcaacagattccactgccacttctcaccacgtgactggcagcgactcatcaacaacaactggggattccggcctaagcgactcaacttcaagctcttcaacattcaggtcaaagaggttacggacaacaatggagtcaagaccatcgccaataaccttaccagcacggtccaggtcttcacggactcagactatcagctcccgtacgtgctcgggtcggctcacgagggctgcctcccgccgttcccagcggacgttttcatgattcctcagtacgggtatctgacgcttaatgatggaagccaggccgtgggtcgttcgtccttttactgcctggaatatttcccgtcgcaaatgctaagaacgggtaacaacttccagttcagctacgagtttgagaacgtacctttccatagcagctacgctcacagccaaagcctggaccgactaatgaatccactcatcgaccaatacttgcactatctctcaaagactattaacggttctggacagaatcaacaaacgctaaaattcagtgtggccggacccagcaacatggctgtccagggaagaaactacatacctggacccagctaccgacaacaacgtgtctcaaccactgtgactcaaaacaacaacagcgaatttgcttggcctggagcttcttcttgggctctcaatggacgtaatagcttgatgaatcctggacctgctatggccagccacaaagaaggagaggaccgtttctttcctttgtctggatctttaatttttggcaaacaaggaactggaagagacaacgtggatgcggacaaagtcatgataaccaacgaagaagaaattaaaactactaacccggtagcaacggagtcctatggacaagtggccacaaaccaccagagtgcccaagcacaggcgcagaccggctgggttcaaaaccaaggaatacttccgggtatggtttggcaggacagagatgtgtacctgcaaggacccatttgggccaaaattcctcacacggacggcaactttcacccttctccgctgatgggagggtttggaatgaagcacccgcctcctcagatcctcatcaaaaacacacctgtacctgcggatcctccaacggccttcaacaaggacaagctgaactctttcatcacccagtattctactggccaagtcagcgtggagatcgagtgggagctgcagaaggaaaacagcaagcgctggaacccggagatccagtacacttccaactattacaagtctaataatgttgaatttgctgttaatactgaaggtgtatatagtgaaccccgccccattggcaccagatacctgactcgtaatctg

SEQ ID NO: 621 - DNA, 2208 bp, Artificial Sequence
  Description of Artificial Sequence: Synthetic polynucleotide
atggctgccgatggttattttccagattggctcgaggacaaccttagtgaaggaattcgcgagtggtgggctttgaaacctggagcccctcaacccaaggcaaatcaacaacatcaagacaacgctcgaggtcttgtgcttccgggttacaaataccttggacccggcaacggactcgacaagggggagccggtcaacgcagcagacgcggcggccctcgagcacgacaaggcctacgaccagcagctcaaggccggagacaacccgtacctcaagtacaaccacgccgacgccgagttccaggagcggctcaaagaagatacgtcttttgggggcaacctcgggcgagcagtcttccaggccaaaaagaggcttcttgaacctcttggtctggttgaggaagcggctaagacggctcctggaaagaagaggcctgtagagcagtctcctcaggaaccggactcctccgcgggtattggcaaatcgggtgcacagcccgctaaaaagagactcaatttcggtcagactggcgacacagagtcagtcccagaccctcaaccaatcggagaatctcccgcagccccctcaggtgtgggatctcttacaatggcttcaggtggtggcgcaccagtggcagacaataacgaaggtgccgatggagtgggtagttcctcgggaaattggcattgcgattcccaatggctgggggacagagtcatcaccaccagcacccgaacctgggccctgcccacctacaacaatcacctctacaagcaaatctccaacagcacatctggaggatcttcaaatgacaacgcctacttcggctacagcaccccctgggggtattttgacttcaacagattccactgccacttctcaccacgtgactggcagcgactcatcaacaacaactggggattccggcctaagcgactcaacttcaagctcttcaacattcaggtcaaagaggttacggacaacaatggagtcaagaccatcgccaataaccttaccagcacggtccaggtcttcacggactcagactatcagctcccgtacgtgctcgggtcggctcacgagggctgcctcccgccgttcccagcggacgttttcatgattcctcagtacgggtatctgacgcttaatgatggaagccaggccgtgggtcgttcgtccttttactgcctggaatatctcccgtcgcaaatgctaagaacgggtaacaacttccagttcagctacgagtttgagaacgtacctttccatagcagctacgctcacagccaaagcctggaccgactaatgaatccactcatcgaccaatacttgcactatctctcaaagactattaacggttctggacagaatcaacaaacgctaaaattcagtgtggccggacccagcaacatggctgtccagggaagaaactacatacctggacccagctaccgacaacaacgtgtctcaaccactgtgactcaaaacaacaacagcgaatttgcttggcctggagcttcttcttgggctctcaatggacgtaatagcttgatgaatcctggacctgctgtggccagccacaaagaaggagaggaccgtttctttcctttgtctggatctttaatttttggcaaacaaggaactggaagagacaacgtggatgcggacaaagtcatgataaccaacgaagaagaaattaaaactactaacccggtagcaacggagtcctatggacaagtggccacaaaccaccagagtgcccaagcacaggcgcagaccggctgggttcaaaaccaaggaatacttccgggtatggtttggcaggacagagatgtgtacctgcaaggacccatttgggccaaaattcctcacacggacggcaactttcacccttctccgctgatgggagggtttggaatgaagcacccgcctcctcagatcctcatcaaaaacacacctgtacctgcggatcctccaacggccttcaacaaggacaagctgaactctttcatcacccagtattctactggccaagtcagcgtggagatcgagtgggagctgcagaaggaaaacagcaagcgctggaacccggagatccagtacacttccaactattacaagtctaataatgttgaatttgctgttaatactgaaggtgtatatagtgaaccccgccccattggcaccagatacctgactcgtaatctg

SEQ ID NO: 622 - DNA, 2208 bp, Artificial Sequence
  Description of Artificial Sequence: Synthetic polynucleotide
atggctgccgatggttatcttccagattggctcgaggacaaccttagtgaaggaattcgcgagtggtgggctttgaaacctggagcccctcaacccaaggcaaatcaacaacatcaagacaacgctcgaggtcttgtgcttccgggttacaaataccttggacccggcaacggactcgacaagggggagccggtcaacgcagcagacgcggcggccctcgagcacgacaaggcctacgaccagcagctcaaggccggagacaacccgtacctcaagtacaaccacgccgacgccgagttccaggagcggctcaaagaagatacgtcttttgggggcaacctcgggcgagcagtcttccaggccaaaaagaggcttcttgaacctcttggtccggttgaggaagcggctaagacggctcctggaaagaagaggcctgtagagcagtctcctcaggaaccggactcctccgcgggtattggcaaatcgggtgcacagcccgctaaaaagagactcaatttcggtcagactggcgacacagagtcagtcccagaccctcaaccaatcggagaacctcccgcagccccctcaggtgtgggatctcttacaatggcttcaggtggtggcgcaccagtggcagacaataacgaaggtgccgatggagtgggtagttcctcgggaaattggcattgcgattcccaatggctgggggacagagtcatcaccaccagcacccgaacctgggccctgcccacctacaacaatcacctctacaagcaaatctccaacagcacatctggaggatcttcaaatgacaacgcctacttcggctacagcaccccctgggggtattttgacttcaacagattccactgccacttctcaccacgtgactggcagcgactcatcaacaacaactggggattccggcctaagcgactcaacttcaagctcttcaacattcaggtcaaagaggttacggacaacaatggagtcaagaccatcgccaataaccttaccagcacggtccaggtcttcacggactcagactatcagctcccgtacgtgctcgggtcggctcacgagggctgcctcccgccgttcccagcggacgttttcatgattcctcagtacgggtatctgacgcttaatgatggaagccaggccgtgggtcgttcgtccttttactgcctggaatatttcccgtcgcaaatgctaagaacgggtaacaacttccagttcagctacgagtttgagaacgtacctttccatagcagctacgctcacagccaaagcctggaccgactaatgaatccactcatcgaccaatacttgtactatctctcaaagactattaacggttctggacagaatcaacaaacgctaaaattcagtgtggccggacccagcaacatggctgtccagggaagaaactacatacctggacccagctaccgacaacaacgtgtctcaaccactgtgactcaaaacaacaacagcgaatttgcttggcctggagcttcttcttgggctctcaatggacgtaatagcttgatgaatcctggacctgctatggccagccacaaagaaggagaggaccgtttctttcctttgtctggatctttaatttttggcaaacaaggaactggaagagacaacgtggatgcggacaaagtcatgataaccaacgaagaagaaattaaaactactaacccggtagcaacggagtcctatggacaagcggccacaaaccaccagagtgcccaagcacaggcgcagaccggctgggttcaaaaccaaggaatacttccgggtatggtttggcaggacagagatgtgtacctgcaaggacccatttgggccaaaattcctcacacggacggcaactttcacccttctccgctgatgggagggtttggaatgaagcacccgcctcctcagatcctcatcaaaaacacacctgtacctgcggatcctccaacggccttcaacaaggacaagctgaactctttcatcacccagtattctactggccaagtcagcgtggagatcgagtgggagctgcagaaggaaaacagcaagcgctggaacccggagatccagtacacttccaactattacaagtctaataatgttgaatttgctgttaatactgaaggtgtatatagtgaaccccgccccattggcaccagatacctgactcgtaatctg

SEQ ID NO: 623 - DNA, 2208 bp, Artificial Sequence
  Description of Artificial Sequence: Synthetic polynucleotide
atggctgccgatggttatcttccagattggctcgaggacaaccttagtgaaggaattcgcgagtggtgggctttgaaacctggagcccctcaacccaaggcaaatcaacaacatcaagacaacgctcggggtcttgtgcttccgggttacaaataccttggacccggcaacggactcgacaagggggagccggtcaacgcagcagacgcggcggccctcgagcacgacaaggcctacgaccagcagctcaaggccggagacaacccgtacctcaagtacaaccacgccgacgccgagttccaggagcggctcaaagaagatacgtcttttgggggcaacctcgggcgagcagtcttccaggccaaaaagaggcttcttgaacctcttggtccggttgaggaagcggctaagacggctcctggaaagaagaggcctgtagagcagtctcctcaggaaccggactcctccgcgggtattggcaaatcgggtgcacagcccgctaaaaagagactcaatttcggtcagactggcgacacagagtcagtcccagaccctcaaccaatcggagaacctcccgcagccccctcaggtgtgggatctcttacaatggcttcaggtggtggcgcaccagtggcagacaataacgaaggtgccgatggagtgggtagttcctcgggaaattggcattgcgattcccaatggctgggggacagagtcatcaccaccagcacccgaacctgggccctgcccacctacaacaatcacctctacaagcaaatctccaacagcacatctggaggatcttcaaatgacaacgcctacttcggctacagcaccccctgggggtattttgacttcaacagattccactgccacttctcaccacgtgactggcggcgactcatcaacaacaactggggattccggcctaagcgactcaacttcaagctcttcaacattcaggtcaaagaggttacggacaacaatggagtcaagaccatcgccaataaccttaccagcacggtccaggtcttcacggactcagactatcagctcccgtacgtgctcgggtcggctcacgagggctgcctcccgccgttcccagcggacgttttcatgattcctcagtacgggtatctgacgcttaatgatggaagccaggccgtgggtcgttcgtccttttactgcctggaatatttcccgtcgcaaatgctaagaacgggtaacaacttccagttcagctacgagtttgagaacgtacctttccatagcagctacgctcacagccaaagcctggaccgactaatgaatccactcatcgaccaatacttgtactatctctcaaagactattaacggttctggacagaatcaacaaacgctaaaattcagtgtggccggacccagcaacatggctgtccagggaagaaactacatacctggacccagctaccgacaacaacgtgtctcaaccactgtgactcaaaacaacaacagcgaatttgcttggcctggagcttcttcttgggctctcaatggacgtaatagcttgatgaatcctggacctgctatggccagccacaaagaaggagaggaccgtttctttcctttgtctggatctttaatttttggcaaacaaggaactggaagagacaacgtggatgcggacaaagtcatgataaccaacgaagaagaaattaaaactactaacccggtagcaacggagtcctatggacaagtggccacaaaccaccagagtgcccaagcacaggcgcagaccggctgggttcaaaaccaaggaatacttccgggtatggtttggcaggacagagatgtgtacctgcaaggacccatttgggccaaaattcctcacacggacggcaactttcacccttctccgctgatgggagggtttggaatgaagcacccgcctcctcagatcctcatcaaaaacacacctgtacctgcggatcctccaacggccttcaacaaggacaagctgaactctttcatcacccagtattctactggccaagtcagcgtggagatcgagtgggagctgcagaaggaaaacagcaagcgctggaacccggagatccagtacacttccaactattacaagtctaataatgttgaatttgctgttaatactgaaggtgtatatagtgaaccccgccccattggcaccagatacctgactcgtaatctg

SEQ ID NO: 624 - DNA, 2208 bp, Artificial Sequence
  Description of Artificial Sequence: Synthetic polynucleotide
atggctgccgatggttatcttccagattggctcgaggacaaccttagtgaaggaattcgcgagtggtgggctttgaaacctggagcccctcaacccaaggcaaatcaacaacatcaagacaacgctcgaggtcttgtgcttccgggttacaaataccttggacccggcaacggactcgacaagggggagccggtcaacgcagcagacgcggcggccctcgagcacgacaaggcctacgaccagcagctcaaggccggagacaacctgtacctcaagtacaaccacgccgacgccgagttccaggagcggctcaaagaagatacgtcttttgggggcaacctcgggcgagcagtcttccaggccaaaaagaggcttcttgaacctcttggtctggttgaggaagcggctaagacggctcctggaaagaagaggcctgtagagcagtctcctcaggaaccggactcctccgcgggtattggcaaatcgggtgcacagcccgctaaaaagagactcaatttcggtcagactggcgacacagagtcagtcccagaccctcaaccaatcggagaacctcccgcagccccctcaggtgtgggatctcttacaatggcttcaggtggtggcgcaccagtggcagacaataacgaaggtgccgatggagtgggtagttcctcgggaaattggcattgcgattcccaatggctgggggacagagtcatcaccaccagcacccgaacctgggccctgcccacctacaacaatcacctctacaagcaaatctccaacagcacatctggaggatcttcaaatgacaacgcctacttcggctacagcaccccctgggggtattttgacttcaacagattccactgccacttctcaccacgtgactggcagcgactcatcaacaacaactggggattccggcctaagcgactcaacttcaagctcttcaacattcaggtcaaagaggttacggacaacaatggagtcaagaccatcgccaataaccttaccagcacggtccaggtcttcacggactcagactatcagctcccgtacgtgctcgggtcggctcacgagggctgcctcccgccgttcccagcggacgttttcatgattcctcagtacgggtatctgacgcttaatgatggaagccaggccgtgggtcgttcgtccttttactgcctggaatatttcccgtcgcaaatgctaagaacgggtaacaacttccagttcagctacgagtttgagaacgtacctttccatagcagctacgctcacagccaaagcctggaccgactaatgaatccactcatcgaccaatacttgcactatctctcaaagactattaacggttctggacagaatcaacaaacgctaaaattcagtgtggccggacccagcaacatggctgtccagggaagaaactacatacctggacccagctaccgacaacaacgtgtctcaaccactgtgactcaaaacaacaacagcgaatttgcttggcctggagcttcttcttgggctctcaatggacgtaatagcttgatgaatcctggacctgctatggccagccacaaagaaggagaggaccgtttctttcctttgtctggatctttaatttttggcaaacaaggaactggaagagacaacgtggatgcggacaaagtcatgataaccaacgaagaagaaattaaaactactaacccggtagcaacggagtcctatggacaagtggccacaaaccaccagagtgcccaagcacaggcgcagaccggctgggttcaaaaccaaggaatacttccgggtatggtttggcaggacagagatgtgtacctgcaaggacccatttgggccaaaattcctcacacggacggcaactttcacccttctccgctgatgggagggtttggaatgaagcacccgcctcctcagatcctcatcaaaaacacacctgtacctgcggatcctccaacggccttcaacaaggacaagctgaactctttcatcacccagtattctactggccaagtcagcgtggagatcgagtgggagctgcagaaggaaaacagcaagcgctggaacccggagatccagtacacttccaactattacaagtctaataatgttgaatttgctgttaatactgaaggtgtatatagtgaaccccgccccattggcaccagatacctgactcgtaatctg

SEQ ID NO: 625 - DNA, 2208 bp, Artificial Sequence
  Description of Artificial Sequence: Synthetic polynucleotide
atggctgccgatggttatcttccagattggctcgaggacaaccttagtgaaggaattcgcgagtggtgggctttgaaacctggagcccctcaacccaaggcaaatcaacaacatcaagacaacgctcgaggtcttgtgcttccgggttacaaataccttggacccggcaacggactcgacaagggggagccggtcaacgcagcagacgcggcggccctcgagcacgacaaggcctacgaccagcagctcaaggccggagacaacccgtacctcaagtacaaccacgccgacgccgagttccaggagcggctcaaagaagatacgtcttttgggggcaacctcgggcgagcagtcttccaggccaaaaagaggcttcttgaacctcttggtctggttgaggaagcggctaagacggctcctggaaagaagaggcctgtagagcagtctcctcaagaaccggactcctccgcgggtattggcaaatcgggtgcacagcccgctaaaaagagactcaatttcggtcagactggcgacacagagtcagtcccagaccctcaaccaatcggagaacctcccgcagccccctcaggtgtgggatctcttacaatggcttcaggtggtggcgcaccagtggcagacaataacgaaggtgccgatggagtgggtagttcctcgggaaattggcattgcgattcccaatggctgggggacagagtcatcaccaccagcacccgaacctgggccctgcccacctacaacaatcacctctacaagcaaatctccaacagcacatctggaggatcttcaaatgacaacgcctacttcggctacagcaccccctgggggtattttgacttcaacagattccactgccacttctcaccacgtgactggcagcgactcatcaacaacaactggggattccggcctaagcgactcaacttcaagctcttcaacattcaggtcaaagaggttacggacaacaatggagtcaagaccatcgccaataaccttaccagcacggtccaggtcttcacggactcagactatcagctcccgtacgtgctcgggtcggctcacgagggctgcctcccgccgttcccagcggacgttttcatgattcctcagtacgggtatctgacgcttaatgatggaagccaggccgtgggtcgttcgtccttttactgcctggaatatttcccgtcgcaaatgctaagaacgggtaacaacttccagttcagctacgagtttgagaacgtacctttccatagcagctacgctcacagccaaagcctggaccgactaatgaatccactcatcgaccaatacttgcactatctctcaaagactattaacggttctggacagaatcaacaaacgctaaaattcagtgtggccggacccagcaacatggctgtccagggaagaaactacatacctggacccagctaccgacaacaacgtgtctcaaccactgtgactcaaaacaacaacagcgaatttgcttggcctggagcttcttcttgggctctcaatggacgtaatagcttgatgaatcctggacctgctatggccagccacaaagaaggagaggaccgtttctttcctttgtctggatctttaatttttggcaaacaaggaactggaagagacaacgtggatgcggacaaagtcatgataaccaacgaagaagaaattaaaactactaacccggtagcaacggagtcctatggacaagtggccacaaaccaccagagtgcccaagcacaggcgcagaccggctgggttcaaaaccaaggaatacttccgggtatggtttggcaggacagagatgtgtacctgcaaggacccatttgggccaaaattcctcacacggacggcaactttcacccttctccgctgatgggagggtttggaatgaagcacccgcctcctcagatcctcatcaaaaacacacctgtacctgcggatcctccaacggccttcaacaaggacaagctgaactctttcatcacccagtattctactggccaagtcagcgtggagatcgagtgggagctgcagaaggaaaacagcaagcgctggaacccggagatccagtacacttccaactattacaagtctaataatgttgaatttgctgttaatactgaaggtgtatatagtgaaccccgccccattggcaccagatacctgactcgtaatctg

SEQ ID NO: 626 - DNA, 2208 bp, Artificial Sequence
  Description of Artificial Sequence: Synthetic polynucleotide
  modified_base (1325)..(1325): a, c, g, or t
atggctgccgatggttatcttccagattggctcgaggacaaccttagtgaaggaattcgcgagtggtgggctttgaaacctggagcccctcaacccaaggcaaatcaacaacatcaagacaacgctcgaggtcttgtgcttccgggttacaaataccttggacccggcaacggactcgacaagggggagccggtcaacgcagcagacgcggcggccctcgagcacgacaaggcctacgaccagcagctcaaggccggagacaacccgtacctcaagtacaaccacgccgacgccgagttccaggagcggctcaaagaagatacgtcttttgggggcaacctcgggcgagcagtcttccaggccaaaaagaggcttcttgaacctcttggtctggttgaggaagcggctaagacggctcctggaaagaagaggcctgtagagcagtctcctcaggaaccggactcctccgcgggtattggcaaatcgggtgcacagcccgctaaaaagagactcaatttcggtcagactggcgacacagagtcagtcccagaccctcaaccaatcggagaacctcccgcagccccctcaggtgtgggatctcttacaatggcttcaggtggtggcgcaccagtggcagacaataacgaaggtgccgatggagtgggtagttcctcgggaaattggcattgcgattcccaatggctgggggacagagtcatcaccaccagcacccgaacctgggccctgcccacctacaacaatcacctctacaagcaaatctccaccagcacatctggaggatcttcaaatgacaacgcctacttcggctacagcaccccctgggggtattttgacttcaacagattccactgccacttctcaccacgtgactggcagcgactcatcaacaacaactggggattccggcctaagcgactcaacttcaagctcttcaacattcaggtcaaagaggttacggacaacaatggagtcaagaccatcgccaataaccttaccagcacggtccaggtcttcacggactcagactatcagctcccgtacgtgctcgggtcggctcacgagggctgcctcccgccgttcccagcggacgttttcatgattcctcagtacgggtatctgacgcttaatgatggaagccaggccgtgggtcgttcgtccttttactgcctggaatatttcccgtcgcaaatgctaagaacgggtaacaacttccagttcagctacgagtttgagaacgtacctttccatagcagctacgctcacagccaaagcctggaccgactaatgaatccactcatcgaccnatacttgcactatctctcaaagactattaacggttctggacagaatcaacaaacgctaaaattcagtgtggccggacccagcaacatggctgtccagggaagaaactacatacctggacccagctaccgacaacaacgtgtctcaaccactgtgactcaaaacaacaacagcgaatttgcttggcctggagcttcttcttgggctctcaatggacgtaatagcttgatgaatcctggacctgctatggccagccacaaagaaggagaggaccgtttctttcctttgtctggatctttaatttttggcaaacaaggaactggaagagacaacgtggatgcggacaaagtcatgataaccaacgaagaagaaattaaaactactaacccggtagcaacggagtcctatggacaagtggccacaaaccaccagagtgcccaagcacaggcgcagaccggctgggttcaaaaccaaggaatacttccggatatggtttggcaggacagagatgtgtacctgcaaggacccatttgggccaaaattcctcacacggacggcaactttcacccttctccgctgatgggagggtttggaatgaagcacccgcctcctcagatcctcatcaaaaacacacctgtacctgcggatcctccaacggccttcaacaaggacaagctgaactctttcatcacccagtattctactggccaagtcagcgtggagatcgagtgggagctgcagaaggaaaacagcaagcgctggaacccggagatccagtacacttccaactattacaagtctaataatgttgaatttgctgttaatactgaaggtgtatatagtgaaccccgccccattggcaccagatacctgactcgtaatctg

SEQ ID NO: 627 - DNA, 2208 bp, Artificial Sequence
  Description of Artificial Sequence: Synthetic polynucleotide
atggctgccgatggttatcttccagattggctcgaggacaaccttagtgaaggaattcgcgagtggtgggctttgaaacctggagcccctcaacccaaggcaaatcaacaacatcaagacaacgctcgaggtcttgtgcttccgggttacaaataccttggacccggcaacggactcgacaagggggagccggtcaacgcagcagacgcggcggccctcgagcacgacaaggcctacgaccagcagctcaaggccggagacaacccgtacctcaagtacaaccacgccgacgccgagttccaggagcggctcaaagaagatacgtcttttgggggcaacctcgggcgagcagtcttccaggccaaaaagaggcttcttgaacctcttggtctggttgaggaagcggctaagacggctcctggaaagaagaggcctgtagagcagtctcctcaggaaccggactcctccgcgggtattggcaaatcgggtgcacagcccgctaaaaagagactcaatttcggtcagactggcgacacagagtcagtcccagaccctcaaccaatcggagaacctcccgcagccccctcaggtgtgggatctcttacaatggcttcaggtggtggcgcaccagtggcagacaataacgaaggtgccgatggagtgggtagttcctcgggaaattggcattgcgattcccaatggctgggggacagagtcatcaccaccagcacccgaacctgggccctgcccacctacaacaatcacctctacaagcaaatctccaacagcacatctggaggatcttcaaatgacaacgcctacttcggctacagcaccccctgggggtattttgacttcaacagattccactgccacttctcaccacgtgactggcagcgactcatcaacaacaactggggattccggcctaagcgactcaacttcaagctcttcaacattcaggtcaaagaggttacggacaacaatggagtcaagaccatcgccaataaccttaccagcacggtccaggtcttcacggactcagactatcagctcccgtacgtgctcgggtcggctcacgagggctgcctcccgccgttcccagcggacgttttcatgattcctcagtacgggtatctgacgcttaatgatggaagccaggccgtgggtcgttcgtccttttactgcctggaatatttcccgtcgcaaatgctaagaacgggtaacaacttccagttcagctacgagtttgagaacgtacctttccatagcagctacgctcacagccaaagcctggaccgactaatgaatccactcatcgaccaatacttgcactatctctcaaagactattaacggttctggacagaatcaacaaacgctaaaattcagtgtggccggacccagcaacatggctgtccagggaagaaactacatacctggacccagctaccgacaacaacgtgtctcaaccactgtgactcaaaacaacaacagcgaatttgcttggcctggagcttcttcttgggctctcaatggacgtaatagcttgatgaatcctggacctgctatggccagctacaaagaaggagaggacagtttctttcctttgtctggatctttaatttttggcaaacaaggaactggaagagacaacgtggatgcggacaaagtcatgataaccaacgaagaagaaattaaaactactaacccggtagcaacggagtcctatggacaagtggccacaaaccaccagagtgcccaagcacaggcgcagaccggctgggttcaaaaccaaggaatacttccgggtatggtttggcaggacagagatgtgtacctgcaaggacccatttgggccaaaattcctcacacggacggcaactttcacccttctccgctgatgggagggtttggaatgaagcacccgcctcctcagaccctcatcaaaaacacacctgtacctgcggatcctccaacggccttcaacaaggacaagctgaactctttcatcacccagtattctactggccaagtcagcgtggagatcgagtgggagctgcagaaggaaaacagcaagcgctggaacccggagatccagtacacttccaactattacaagtctaataatgttgaatttgctgttaatactgaaggtgtatatagtgaaccccgccccattggcaccagatacctgactcgtaatctg

SEQ ID NO: 628 - DNA, 2208 bp, Artificial Sequence; identical to SEQ ID NO: 611
  Description of Artificial Sequence: Synthetic polynucleotide

SEQ ID NO: 629 - DNA, 2208 bp, Artificial Sequence
  Description of Artificial Sequence: Synthetic polynucleotide
atggctgccgatggttatcttccagattggctcgaggacaaccttagtgaaggaattcgcgagtggtgggctttgaaacctggagcccctcaacccagggcaaatcaacaacatcaagacaacgctcgaggtcttgtgcttccgggttacaaataccttggacccggcaacggactcgacaagggggagccggtcaacgcagccgacgcggcggccctcgagcacgacaaggcctacgaccagcagctcaaggccggagacaacccgtacctcaagtacaaccacgccgacgccgagttccaggagcggctcaaagaagatacgtcttttgggggcaacctcgggcgagcagtcttccaggccaaaaagaggcttcttgaacctcttggtctggttgaggaagcggctaagacggctcctggaaagaagaggcctgtagagcagtctcctcaggaaccggactcctccgcgggtattggcaaatcgggtgcacagcccgctaaaaagagactcaatttcggtcagactggcgacacagagtcagtcccagaccctcaaccaatcggagaacctcccgcagccccctcaggtgtgggatctcttacaatggcttcaggtggtggcgcaccagtggcagacaataacgaaggtgccgatggagtgggtagttcctcgggaaattggcattgcgattcccaatggctgggggacagagtcatcaccaccagcacccgaacctgggccctgcccacctacaacaatcacctctacaagcaaatctccaacagcacatctggaggatcttcaaatgacaacgcctacttcggctacagcaccccctgggggtattttgacttcaacagattccactgccacttctcaccacgtgactggcagcgactcatcaacaacaactggggattccggcctaagcgactcaacttcaagctcttcaacattcaggtcaaagaggttacggacaacaatggagtcaagaccatcgccaataaccttaccagcacggtccaggtcttcacggactcagactgtcagctcccgtacgtgctcgggtcggctcacgagggctgcctcccgccgttcccagcggacgttttcatgattcctcagtacgggtatctgacgcttaatgatggaagccaggccgtgggtcgttcgtccttttactgcctggaatatttcccgtcgcaaatgctaagaacgggtaacaacttccagttcagctacgagtttgagaacgtacctttccatagcagctacgctcacagccaaagcctggaccgactaacgaatccactcatcgaccaatacttgtactatctctcaaagactattaacggttctggacagaatcaacaaacgctaaaattcagtgtggccggacccagcaacatggctgtccagggaagaaactacatacctggacccagctaccgacaacaacgtgtctcaaccactgtgactcaaaacaacaacagcgaatttgcttggcctggagcttcttcttgggctctcaatggacgtaatagcttgatgaatcctggacctgctatggccagccacaaagaaggagaggaccgtttctttcctttgtctggatctttaatttttggcaaacaaggaactggaagagacaacgtggatgcggacaaagtcatgataaccaacgaagaagaaattaaaactactaacccggtagcaacggagtcccatggacaagtggccacaaaccaccagagtgcccaagcacaggcgcagaccggctgggttcaaaaccaaggaatacttccgggtatggtttggcaggacagagatgtgtacctgcaaggacccatttgggccaaaattcctcacacggacggcaactttcacccttctccgctgatgggagggtttggaatgaagcacccgcctcctcagatcctcatcaaaaacacacctgtacctgcggatcctccaacggccttcaacaaggacaagctgaactctttcatcacccagtattctactggccaagtcagcgtggagatcgagtgggagctgcagaaggaaaacagcaagcgctggaacccggagatccagtacacttccaactattacaagtctaataatgttgaatttgctgttaatactgaaggtgtatatagtgaaccccgccccattggcaccagatacctgactcgtaatctg

SEQ ID NO: 630 - DNA, 2208 bp, Artificial Sequence
  Description of Artificial Sequence: Synthetic polynucleotide
atggctgccgatggttatcttccagattggctcgaggacaaccttagtgaaggaattcgcgagtggtgggctttgaaacctggagcccctcaacccaaggcaaatcaacaacatcaagacaacgctcgaggtcttgtgcttccgggttacaaataccttggacccggcaacggactcgacaagggggagccggtcaacgcagcagacgcggcggccctcgagcacgacaaggcctacgaccagcagctcaaggccggagacaacccgtacctcaagtacaaccacgccgacgccgagttccaggagcggctcaaagaagatacgtcttttgggggcaacctcgggcgagcagtcttccaggccaaaaagaggcttcttgaacctcttggtctggttgaggaagcggctaagacggctcctggaaagaagaggcctgtagagcagtctcctcaggaaccggactcctccgcgggtattggcaaatcgggtgcacagcccgctaagaagagactcaatttcggtcagactggcgacacagagtcagtcccagaccctcaaccaatcggagaacctcccgcagccccctcaggtgtgggatctcttacaatggcttcaggtggtggcgcaccagtggcagacaataacgaaggtgccgatggagtgggtagttcctcgggaaattggcattgcgattcccaatggctgggggacagagtcatcaccaccagcacccgaacctgggccctgcccacctacaacaatcacctctacaagcaaatctccaacagcacatctggaggatcttcaaatgacaacgcctacttcggctacagcaccccctgggggtattttgacttcaacagattccactgccacttctcaccacgtgactggcagcgactcatcaacaacaactggggattccggcctaagcgactcaacttcaagctcttcaacattcaggtcaaagaggttacggacaacaatggagtcaagaccatcgccaataaccttaccagcacggtccaggtcttcacggactcagactatcagctcccgtacgtgctcgggtcggctcacgagggctgcctcccgccgttcccagcggacgttttcatgattcctcagtacgggtatctgacgcttaatgatggaagccaggccgtgggtcgttcgtccttttactgcctggaatatttcccgtcgcaaatgctaagaacgggtaacaacttccagttcagctacgagtttgagaacgtacctttccatagcagctacgctcacagccaaagcctggaccgactaatgaatccacccatcgaccaatacttgtactatctctcaaagactattaacggttctggacagaatcaacaaacgctaaaattcagtgtggccggacccagcaacatggctgtccagggaagaaactacatacctggacccagctaccgacaacaacgtgtctcaaccactgtgactcaaaacaacaacagcgaatttgcttggcctggagcttcttcttgggctctcaatggacgtaatagcttgatgaatcctggacctgctatggccagccacaaagaaggagaggaccgtttctttcctttgtctggatctttaatttttggcaaacaaggaactggaagagacaacgtggatgcggacaaagtcatgataaccaacgaagaagaaattaaaactactaacccggtagcaacggagtcctatggacaagtggccacaaaccaccagagtgcccaagcacaggcgcagaccggctgggttcaaaaccaaggaatacttccgggtatggtttggcaggacagagatgtgtacctgcaaggacccatttgggccaaaattcctcacacggacggcaactttcacccttctccgctgatgggagggtttggaatgaagcacccgcctcctcagatcctcatcaaaaacacacctgtacctgcggatcctccaacggccttcaacaaggacaagctgaactctttcatcacccagtattctactggccaagtcagcgtggagatcgagtgggagctgcagaaggaaaacagcaagcgctggaacccggagatccagtacacttccaactattacaagtctaataatgttgaatttgctgttaatactgaaggtgtatatggtgaaccccgccccattggcaccagatacctgactcgtaatctg

SEQ ID NO: 631 - DNA, 2208 bp, Artificial Sequence
  Description of Artificial Sequence: Synthetic polynucleotide
atggctgccgatggttatcttccagattggctcgaggacaaccttagtgaaggaattcgcgagtggtgggctttgaaacctggagcccctcaacccaaggcaaatcaacaacatcaagacaacgctcgaggtcttgtgcttccgggttacaaataccttggacccggcaacggactcgacaagggggagccggtcaacgcagcagacgcggcggccctcgagcacgacaaggcctacgaccagcagctcaaggccggagacaacccgtacctcaagtacaaccacgccgacgccgagttccaggagcggctcaaagaagatacgtcttttgggggcaacctcgggcgagcagtcttccaggccaaaaagaggcttcttgaacctcttggtctggttgaggaagcggctaagacggctcctggaaagaagaggcctgtagagcagtctcctcaggaaccggactcctccgcgggtattggcaaatcgggtgcacagcccgctaaaaagagactcaatttcggtcagactggcgacacagagtcagtcccagaccctcaaccaatcggagaacctcccgcagccccctcaggtgtgggatctcttacaatggcttcaggtggtggcgcaccagtggcagacaataacgaaggtgccgatggagtgggtagttcctcgggaaattggcattgcgattcccaatggctgggggacagagtcatcaccaccagcacccgaacctgggccctgcccacctacaacaatcacctctacaagcaaatctccaacagcacatctggaggatcttcaaatgacaacgcctacttcggctacagcaccccctgggggtattttgacttcaacagattccactgccacttctcaccacgtgaccggcagcgactcatcaacaacaactggggattccggcctaagcgactcaacttcaagctcttcaacattcaggtcaaagaggttacggacaacaatggagtcaagaccatcgccaataaccttaccagcacggtccaggtcttcacggactcagactatcagctcccgtacgtgctcgggtcggctcacgagggctgcctcccgccgttcccagcggacgttttcatgattcctcagtacgggtatctgacgcttaatgatggaagccaggccgtgggtcgttcgtccttttactgcctggaatatttcccgtcgcaaatgctaagaacgggtaacaacttccagttcagctacgagtttgagaacgtacctttccatagcagctacgctcacagccaaagcctggaccgactaatgaatccactcatcgaccaatacttgtactatctctcaaagactattaacggttctggacagaatcaacaaacgctaaaattcagtgtggccggacccagcaacatggctgtccagggaagaaactacatacctggacccagctaccgacaacaacgtgtctcaaccactgtgactcaaaacaacaacagcgaatttgcttggcctggagcttcttcttgggctctcaatggacgtaatagcttgatgaatcctggacctgctatggccagccacaaagaaggagaggaccgtttctttcctttgtctggatctttaatttttggcaaacaaggaactggaagagacaacgtggatgcggacaaagtcatgataaccaacgaagaagaaattaaaactactaacccggtagcaacggagtcctatggacaagtggccacaaaccaccagagtgcccaagcacaggcgcagaccggctgggttcaaaaccaaggaatacttccgggtatggtttggcaggacagagatgtgtacctgcaaggacccatttgggccaaaattcctcacacggacggcaactttcacccttctccgctgatgggagggtttggaatgaagcacccgcctcctcagatcctcatcaaaaacacacctgtacctgcggatcctccaacggccttcaacaaggacaagctgaactctttcatcacccagtattctactggccaagtcagcgtggagatcgagtgggagctgcagaaggaaaacagcaagcgctggaacccggagatccagtacacttccaactattacaagtctaataatgttgaatttgctgttaatactgaaggtgtatatagtgaaccccgccccattggcaccagatacctgactcgtaatctg

SEQ ID NO: 632 - DNA, 2208 bp, Artificial Sequence
  Description of Artificial Sequence: Synthetic polynucleotide
atggctgccgatggttatcttccagattggctcgaggacaaccttagtgaaggaattcgcgagtggtgggctttgaaacctggagcccctcaacccaaggcaaatcaacaacatcaagacaacgctcgaggtcttgtgcttccgggttacaaataccttggacccggcaacggactcgacaagggggagccggtcaacgcagcagacgcggcagccctcgagcacgacaaggcctacgaccagcagctcaaggccggagacaacccgtacctcaagtacaaccacgccgacgccgagttccaggagcggctcaaagaagatacgtcttttgggggcaacctcgggcgagcagtcttccaggccaaaaagaggcttcttgaacctcttggtctggttgaggaagcggctaagacggctcctggaaagaagaggcctgtagagcagtctcctcaggaaccggactcctccgcgggtattggcaaatcgggtgcacagcccgctaaaaagagactcaatttcggtcagactggcgacacagagtcagtcccagaccctcaaccaatcggagaacctcccgcagccccctcaggtgtgggatctcttacaatggcttcaggtggtggcgcaccagtggcagacaataacgaaggtgccgatggagtgggtagttcctcgggaaattggcattgcaattcccaatggctgggggacagagtcatcaccaccagcacccgaacctgggccctgcccacctacaacaatcacctctacaagcaaatctccaacagcacatctggaggatcttcaaatgacaacgcctacttcggctacagcaccccctgggggtattttgacttcaacagattccactgccacttctcaccacgtgactggcagcgactcatcaacaacaactggggattccggcctaagcgactcaacttcaagctcttcaacattcaggtcaaagaggttacggacaacaatggagtcaagaccatcgccaataaccttaccagcacggtccaggtcttcacggactcagactatcagctcccgtacgtgctcgggtcggctcacgagggctgcctcccgccgttcccagcggacgttttcatgattcctcagtacgggtatctgacgcttaatgatggaagccaggccgtgggtcgttcgtccttttactgcctggaatatttcccgtcgcaaatgctaagaacgggtaacaacttccagttcagctacgagtttgagaacgtacctttccatagcagctacgctcacagccaaagcctggaccgactaatgaatccactcatcgaccaatacttgtactatctctcaaagactattaacggttctggacagaatcaacaaacgctaaaattcagtgtggccggacccggcaacatggctgtccagggaagaaactacatacctggacccagctaccgacaacaacgtgtctcaaccactgtgactcaaaacaacaacagcgaatttgcttggcctggagcttcttcttgggctctcaatggacgtaatagcttgatgaatcctggacctgctatggccagccacaaagaaggagaggaccgtttctttcctttgtctggatctttaatttttggcaaacaaggaactggaagagacaacgtggatgcggacaaagtcatgataaccaacgaagaagaaattaaaactactaacccggtagcaacggagtcctatggacaagtggccacaaaccaccagagtgcccaagcacaggcgcagaccggctgggttcaaaaccaaggaatacttccgggtatggtttggcaggacagagatgtgtacctgcaaggacccatttgggccaaaattcctcacacggacggcaactttcacccttctccgctgatgggagggtttggaatgaagcacccgcctcctcagatcctcatcaagaacacacctgtacctgcggatcctccaacggccttcaacaaggacaagctgaactctttcatcacccagtattctactggccaagtcagcgtggagatcgagtgggagctgcagaaggaaaacagcaagcgctggaacccggagatccagtacacttccaactattacaagtctaataatgttgaatttgctgttaatactgaaggtgtatatagtgaaccccgccccattggcaccagatacctgactcgtaatctg

SEQ ID NO: 633 - DNA, 2208 bp, Artificial Sequence
  Description of Artificial Sequence: Synthetic polynucleotide
atggctgccgatggttatcttccagattggctcgaggacaaccttagtgaaggaattcgcgagtggtgggctttgaaacctggagcccctcaacccaaggcaaatcaacaacatcaagacaacgctcgaggtcttgtgcttccgggttacagataccttggacccggcaacggactcgacaagggggagccggtcaacgcagcagacgcggcggccctcgagcacgacaaggcctacgaccagcagctcaaggccggagacaacccgtacctcaagtacaaccacgccgacgccgagttccaggagcggctcaaagaagatacgtcttttgggggtaacctcgggcgagcagtcttccaggccaaaaagaggcttcttgaacctcttggtctggttgaggaagcggctaagacggctcctggaaagaagaggcctgtagagcagtctcctcaggaaccggactcctccgcgggtatcggcaaatcgggtgcacagcccgctaaaaagagactcaatttcggtcagactggcgacacagagtcagtcccagaccctcaaccaatcggagaacctcccgcagccccctcaggtgtgggatctcttacaatggcttcaggtggtggcgcaccagtggcagacaataacgaaggtgccgatggagtgggtagttcctcgggaaattggcattgcgattcccaatggctgggggacagagtcatcaccaccagcacccgaacctgggccctgcccacctacaacaatcacctctacaagcaaatctccaacagcacatctggaggatcttcaaatgacaacgcctacttcggctacagcaccccctgggggtattttgacttcaacagattccactgccacttctcaccacgtgactggcagcgactcatcaacaacaactggggattccggcctaagcgactcaacttcaagctcttcaacattcaggtcaaagaggttacggacaacaatggagtcaagaccgtcgccaataaccttaccagcacggtccaggtcttcacggactcagactatcagctcccgtacgtgctcgggtcggctcacgagggctgcctcccgccgttcccagcggacgttttcatgattcctcagtacgggtatctgacgcttaatgatggaagccaggccgtgggtcgttcgtccttttactgcctggaatatttcccgtcgcaaatgctaagaacgggtaacaacttccagttcagctacgagtttgagaacgtacctttccatagcagctacgctcacagccaaagcctggaccgactaatgaatccactcatcgaccaatacttgtactatctctcaaagactattaacggttctggacagaatcaacaaacgctaaaattcagtgtggccggacccagcaacatggctgtccagggaagaaactacatacctggacccagctaccgacaacaacgtgtctcaaccactgtgactcaaaacaacaacagcgaatttgcttggcctggagcttcttcttgggctctcaatggacgtaatagcttgatgaatcctggacctgctatggccagccacaaagaaggagaggaccgtttctttcctttgtctggatctttaatttttggcaaacaaggaactggaagagacaacgtggatgcggacaaagtcatgataaccaacgaagaagaaattaaaactactaacccggtagcaacggagtcctatggacaagtggccacaaaccaccagagtgcccaagcacaggcgcagaccggctgggttcaaaaccaaggaatacttccgggtatggtttggcaggacagagatgtgtacctgcaaggacccatttgggccaaaattcctcacacggacggcaactttcacccttctccgctgatgggagggtttggaatgaagcacccgcctcctcagatcctcatcaaaaacacacctgtacctgcggatcctccaacggccttcaacaaggacaagctgaactctttcatcacccagtattctactggccaagtcagcgtggagatcgagtgggagctgcagaaggaaaacagcaagcgctggaacccggagatccagtacacttccaactattacaagtctaataatgttgaatttgctgttaatactgaaggtgtatatagtggaccccgccccattggcaccagatacctgactcgtaatctg

SEQ ID NO: 634 - DNA, 2208 bp, Artificial Sequence
  Description of Artificial Sequence: Synthetic polynucleotide
atggctgccgatggttatcttccagattggctcgaggacaaccttagtgaaggaattcgcgagtggtgggctttgaaacctggagcccctcaacccaaggcaaatcaacaacatcaagacaacgctcgaggtcttgtgcttccgggttacaaataccttggacccggcaacggactcgacaagggggagccggtcaacgcagcagacgcggcggccctcgagcacgacaaggcctacgaccagcagctcaaggccggagacaacccgtacctcaagtacaaccacgccgacgccgagttccaggagcggctcaaagaagatacgtcttttgggggcaacctcgggcgagcagtcttccaggccaaaaagaggcttcttgaacctcttggtctggttgaggaagcggctaagacggctcctggaaagaagaggcctgtagagcagtctcctcaggaaccggactcctccgcgggtattggcaaatcgggtgcacagcccgctaaaaagagactcaatttcggtcagactggcgacacagagtcagtcccagaccctcaaccaatcggagaacctcccgcagccccctcaggtgtgggatctcttacaatggcttcaggtggtggcgcaccagtggcagacaataacgaaggtgccgatggagtgggtagttcctcgggaaattggcattgcgattcccaatggctgggggacagagtcatcaccaccagcacccgaacctgggccctgcccacctacaacaatcacctctacaagcaaatctccaacagcacatctggaggatcttcaaatgacaacgcctacttcggctacagcaccccctgggggtattttgacttcaacagattccactgccacttctcaccacgtgactggcagcgactcatcaacaacaactggggattccggcctaagcgactcaacttcaagctcttcaacattcaggtcaaagaggttacggacaacaatggagtcaagaccatcgccaataaccttaccagcacggtccaggtcttcacggactcagactatcagctcccgtacgtgctcgggtcggctcacgagggctgcctcccgccgttcccagcggacgttttcatgattcctcagtacgggtatctgacgcttaatgatggaagccaggccgtgggtcgttcgtccttttactgcctggaatatttcccgtcgcaaatgctaagaacgggtaacaacttccagttcagctacgagtttgagaacgtacctttccatagcagctacgctcacagccaaagcctggaccgactaatgaatccactcatcgaccaatacttgtactatctctcaaagactattaacggttctggacagaatcaacaaacgctaaaattcagtgtggccggacccagcaacatggctgtccagggaagaaactacatacctggacccagctaccgacaacaacgtgtctcaaccactgtgactcaaaacaacaacagcgaatttgcttggcctggagcttcttcttgggctctcaatggacgtaatagcttgatgaatcctggacctgctatggccagccacaaagaaggagaggaccgtttctttcctttgtctggatctttaatttttggcaaacaaggaactggaagagacaacgtggatgcggacaaagtcatgataaccaacgaagaagaaattaaaactactaacccggtagcaacggagtcctatggacaagtggccacaaaccaccagagtgcccaagcacaggcgcagaccggctgggttcaaaaccaaggaatacttccgggtatggtttggcaggacagagatgtgtacctgcaaggacccatttgggccaaaattcctcacacggacggcaactttcacccttctccgctgatgggagggtttggaatgaagcacccgcctcctcagatcctcatcaaaaacacacctgtacctgcggatcctccaacggccttcaacaaggacaagctgaactctttcatcacccagtattctactggccaagtcagcgtggagatcgagtgggagctgcagaaggaaaacagcaagcgctggaacccggagatccagtacacttccaactattacaagtctaataatgttgaatttgctgttaatactgaaggtgtatatagtgaaccccgccccattggcaccagatacctgactcgtaatctg

SEQ ID NO: 635 - DNA, 2208 bp, Artificial Sequence
  Description of Artificial Sequence: Synthetic polynucleotide
atggctgccgatggttatcttccagattggctcgaggacaaccttagtgaaggaattcgcgagtggtgggctttgaaacctggagcccctcaacccaaggcaaatcaacaacgtcaagacaacgctcgaggtcttgtgcttccgggttacaaataccttggacccggcaacggactcgacaagggggagccggtcaacgcagcagacgcggcggccctcgagcacgacaaggcctacgaccagcagctcaaggccggaggcaacccgtgcctcaagtacaaccacgccgacgccgagttccaggagcggctcaaagaagatacgtcttttgggggcaacctcgggcgagcagtcttccaggccaaaaagaggcttcttgaacctcttggtctggttgaggaagcggctaagacggctcctggaaagaagaggcctgtagagcagtctcctcaggaaccggactcctccgcgggtattggcagatcgggtgcacagcccgctaaaaagagactcaatttcggtcagactggcgacacagagtcagtcccagaccctcaaccaatcggagaacctcccgcagccccctcaggtgtgggatctcttacaatggcttcaggtggtggcgcaccagtggcagacaataacgaaggtgccgatggagtgggtagttcctcgggaaattggcattgcgattcccaatggctgggggacagagtcatcaccaccagcacccgaacctgggccctgcccacctacaacaatcacctctacaagcaaatctccaacagcacatctggaggatcttcaaatgacaacgcctacttcggctacagcaccccctgggggtattttgacttcaacagattccactgccacttctcaccacgtgactggcagcgactcatcaacaacaactggggattccggcctaagcgactcaacttcaagctcttcaacattcaggtcaaagaggttacggacaacaatggagtcaaggccatcgccaataaccttaccagcacggtccaggtcttcacggactcagactatcagctcccgtacgtgctcgggtcggctcacgagggctgcctcccgccgttcccagcggacgttttcatgattcctcagtacgggtatctgacgcttaatgatggaagccaggccgtgggtcgttcgtccttttactgcctggaatatttcccgtcgcaaatgctaagaacgggtaacaacttccagttcagctacgagtttgagaacgtacctttccatagcagctacgctcacagccaaagcctggaccgactaatgaatccactcatcgaccaatacttgtactatctctcaaagactattgacggttctggacagaatcaacaaacgctaaaattcagtgtggccggacccagcaacatggctgtccagggaagaaactacatacctggacccagctaccgacaacaacgtgtctcaaccactgtgactcaaaacaacaacagcgaatttgcttggcctggagcttcttcttgggctctcaatggacgtaatagcttgatggatcctggacctgctatggccagccacaaagaaggagaggaccgtttctttcctttgtctggatctttaatttttggcaaacaaggaactggaagagacaacgtggatgcggacaaagtcatgataaccaacgaagaagaaattaaaactactaacccggtagcaacggagtcctatggacaagtggccacaaaccaccagagtgcccaagcacaggcgcagaccggctgggttcaaaaccaaggaatacttccgggtatggtttggcaggacagagatgtgtacctgcaaggacccatttgggccaaaattcctcacacgggcggcaactttcacccttctccgctgatgggagggtttggaatgaagcacccgcctcctcagatcctcatcaaaaacacacctgtacctgcggatcctccaacggccttcaacaaggacaagctgaactctttcatcacccagtattctactggccaagtcagcgtggagatcgagtgggagctgcagaaggaaaacagcaagcgctggaacccggagatccagtacacttccaactattacaagtctaataatgttgaatttgctgttaatactgaaggtgtatatagtgaaccccgccccattggcaccagatacctgactcgtaatctg

SEQ ID NO: 636 - DNA, 2208 bp, Artificial Sequence
  Description of Artificial Sequence: Synthetic polynucleotide
atggctgccgatggttatcttccagattggctcgaggacaaccttagtgaaggaattcgcgagtggtgggctttgaaacctggagcccctcaacccaaggcaaatcaacaacatcaagacaacgctcgaggtcttgtgcttccgggttacaaataccttggacccggcaacggactcgacaagggggagccggtcaacgcagcagacgcggcggccctcgagcacgacaaggcctacgaccagcagctcaaggccggagacaacccgtacctcaagtacaaccacgccgacgccgagttccaggagcggctcaaagaagatacgtcttttgggggcaacctcgggcgagcagtcttccaggccaaaaagaggcttcttgaacctcttggtctggttgaggaagcggctaagacggctcctggaaagaagaggcctgtagagcagtctcctcaggaaccggactcctccgcgggtattggcaaatcgggtgcacagcccgctaaaaagagactcaatttcggtcagactggcgacacagagtcagtcccagaccctcaaccaatcggagaacctcccgcagccccctcaggtgtgggatctcttacaatggcttcaggtggtggcgcaccagtggcagacaataacgaaggtgccgatggagtgggtagttcctcgggaaattggcattgcgattcccaatggctgggggacagagtcatcaccaccagcacccgaacctgggccctgcccacctacaacaatcacctctacaagcaaatctccaacagcacatctggaggatcttcaaatgacaacgcctacttcggctacagcaccccctgggggtattttgacttcaacagattccactgccacttctcaccacgtgactggcagcgactcatcaacaacaactggggattccggcctaagcgactcaacttcaagctcttcaacattcaggtcaaagaggttacggacaacaatggagtcaagaccatcgccaataaccttaccagcacggtccaggtcttcacggactcagactatcagctcccgtacgtgctcgggtcggctcacgagggctgcctcccgccgttcccagcggacgttttcatgattcctcagtacgggtatctgacgcttaatgatggaagccaggccgtgggtcgttcgtccttttactgcctggaatatttcccgtcgcaaatgctaagaacgggtaacaacttccagttcagctacgagtttgagaacgtacctttccatagcagctacgctcacagccaaagcctggaccgactaatgaatccactcatcgaccaatacttgtactatctctcaaagactattaacggttctggacagaatcaacaaacgctaaaattcagtgtggccggacccagcaacatggctgtccagggaagaaactacatacctggacccagctaccgacaacaacgtgtctcaaccactgtgactcaaaacaacaacagcgaatttgcttggcctggagcttcttcttgggctctcaatggacgtaatagcttgatgaatcctggacctgctatggccagccacaaagaaggagaggaccgtttctttcctttgtctggatctttaatttttggcaaacaaggaactggaagagacaacgtggatgcggacaaagtcatgataaccaacgaagaagaaattaaaactactaacccggtagcaacggagtcctatggacaagtggccacaaaccaccagagtgcccaagcacaggcgcagaccggctgggttcaaaaccaaggaatacttccgggtatggtttggcaggacagagatgtgtacctgcaaggacccatttgggccaaaattcctcacacggacggcaactttcacccttctccgctgatgggagggtttggaatgaagcacccgcctcctcagatcctcatcaaaaacacacctgtacctgcggatcctccaacggccttcaacaaggacaagctgaactctttcatcacccagtattctactggccaagtcagcgtggagatcgagtgggagctgcagaaggaaaacagcaagcgctggaacccggagatccagtacacttccaactattacaagcctaataatgttgaatttgctgttaatactgaaggtgtatatagtgaaccccgccccattggcaccagatacctgactcgtaatctg

SEQ ID NO: 637 - DNA, 2208 bp, Artificial Sequence
  Description of Artificial Sequence: Synthetic polynucleotide
atggctgccgatggttatcttccagattggctcgaggacaaccttagtgaaggaattcgcgagtggtgggctttgaaacctggagcccctcaacccaaggcaaatcaacaacatcaagacaacgctcgaggtcttgtgcttccgggttacaaataccttggacccggcaacggactcgacaagggggagccggtcaacgcagcagacgcggcggccctcgagcacaacaaggcctacgaccagcagctcaaggccggagacaacccgtacctcaagtgcaaccacgccgacgccgagttccaggagcggctcaaagaagatacgtcttttgggggcaacctcgggcgagcagtcttccaggccaaaaagaggcctcttgaacctcttggtctggttgaggaagcggctaagacggctcctggaaagaagaggcctgtagagcagtctcctcaggaaccggactcctccgcgggtattggcaaatcgggtgcacagcccgctaaaaagagactcaatttcggtcagactggcgacacagagtcagtcccagaccctcaaccaatcggagaacctcccgcagccccctcaggtgtgagatctcttacaatggcttcaggtggtggcgcaccagtggcagacaataacgaaggtgccgatggagtgggtagttcctcgggaaattggcattgcgattcccaatggctgggggacagagtcatcaccaccagcacccgaacctgggccctgcccacctacaacaatcacctctacaagcaaatctccaacagcacatctggaggatcttcaaatgacaacgcctacctcggctacagcaccccctgggggtattttgacttcaacagattccactgccacttctcaccacgtgactggcagcgactcatcaacaacaactggggattccggcctaagcgactcaacttcaagctcttcaacattcaggtcaaagaggttacggacaacaatggagtcaagaccatcgccaataaccttaccagcacggtccaggtcttcacggactcagactatcagctcccgtacgtgctcgggtcggctcacgagggctgcctcccgccgttcccagcggacgttttcatgattcctcagtacgggtatctgacgcttaatgatggaagccaggccgtgggtcgttcgtccttttactgcctggaatatttcccgtcgcaaatgctaagaacgggtaacaacttccagttcagctacgagtttgagaacgtacctttccatagcagctacgctcacagccaaagcctggaccgactaatgaatccactcatcgaccaatacttgtactatctctcaaagactattaacggttctggacagaatcaacaaacgctaaaattcagtgtggccggacccagcaacatggctgtccagggaagaaactacatacctggacccagctaccgacaacaacgtgtctcaaccactgtgactcaaaacaacaacagcgaatttgcttggcctggagcttcttcttgggctctcaatggacgtaatagcttgatgaatcctggacctactatggccagccacaaagaaggagaggaccgtttctttcctttgtctggatctttaatttttggcaaacaaggaactggaagagacaacgtggatgcggacaaagtcatgataaccaacgaagaagaaattaaaactactaacccggtagcaacggagtcctatggacaagtggccacaaaccaccagagtgcccaagcacaggcgcagaccggctgggttcaaaaccaaggaatacttccgggtatggtttggcaggacagagatgtgtacctgcaaggacccatttgggccaaaattcctcacacggacggcaactttcacccttctccgctgatgggagggtttggaatgaagcacccgcctcctcagatcctcatcaaaaacacacctgtacctgcggatcctccaacggccttcaacaaggacaagctgaactctttcatcacccagtattctactggccaagtcagcgtggagatcgagtgggagctgcagaaggaaaacagcaagcgctggaacccggagatccagtacacttccaactattacaagtctaataatgttgaatttgctgttaatactgaaggtgtatatagtgaaccccgccccattggcaccagatacctgactcgtaatctg

SEQ ID NO: 638 - DNA, 2208 bp, Artificial Sequence
  Description of Artificial Sequence: Synthetic polynucleotide
atggctgccgatggttatcttccagattggctcgaggacaaccttagtgaaggaattcgcgagtggtgggctttgaaacctggagcccctcaacccaaggcaaatcaacaacatcaagacaacgctcgaggtcttgtgcttccgggttacaaataccttggacccggcaacggactcgacaagggggagccggtcaacgcagcagacgcggcggccctcgtgcacgacaaggcctacgaccagcagctcaaggccggagacaacccgtacctcaagtgcaaccacgccgacgccgagttccaggagcggctcaaagaagatacgtcttttgggggcaacctcgggcgagcagtcttccaggccaaaaagaggcttcttgaacctcttggtctggttgaggaagcggctaagacggctcctggaaagaagaggcctgtagagcagtctcctcaggaaccggactcctccgcgggtattggcaaatcgggtgcacagcccgctaaaaagagactcaatttcggtcagactggcgacacagagtcagtcccagaccctcaaccaatcggagaacctcccgcagccccctcaggtgtgggatctcttacaatggcttcaggtggtggcgcaccagtggcagacaataacgaaggtgccgatggagtgggtagttcctcgggaaattggcattgcgattcccaatggctgggggacagagtcatcaccaccagcacccgaacctgggccctgcccacctacaacaatcacctctacaagcaaatctccaacagcacatctggaggatcttcaaatgacaacgcctacctcggctacagcaccccctgggggtattttgacttcaacagattccactgccacttctcaccacgtgactggcagcgactcatcaacaacaactggggattccggcctaagcgactcaacttcaagctcttcaacattcaggtcaaagaggttacggacaacaatggagtcaagaccatcgccaataaccttaccagcacggtccaggtcttcacggactcagactatcagctcccgtacgtgctcgggtcggctcacgagggctgcctcccgccgttcccagcggacgttttcacgattcctcagtacgggtatctgacgcttaatgatggaagccaggccgtgggtcgttcgtccttttactgcctggaatatttcccgtcgcaaatgctaagaacgggtaacaacttccagttcagctacgagtttgagaacgtacctttccatagcagctacgctcacagccaaagcctggaccgactaatgaatccactcatcgaccaatacttgtactatctctcaaagactattaacggttctggacagaatcaacaaacgctaaaattcagtgtggccggacccagcaacatggctgtccagggaagaaactacatacctggacccagctaccgacaacaacgtgtctcaaccactgtgactcaaaacaacaacagcgaatttgcttggcctggagcttcttcttgggctctcaatggacgtaatagcttgatgaatcctggacctgctatggccagccacaaagaaggagaggaccgtttctttcctttgtctggatctttaatttttggcaaacaaggaactggaagagacaacgtggatgcggacaaagtcatgataaccaacgaagaagaaattaaaactactaacccggtagcaacggagtcctatggacaagtggccacaaaccaccagagtgcccaagcacaggcgcagaccggctgggttcaaaaccaaggaatacttccgggtatggtttggcaggacagagatgtgtacctgcaaggacccatttgggccaaaattcctcacacggacggcaactttcacccttctccgctgatgggagggtttggaatgaagcacccgcctcctcagatcctcatcaaaaacacacctgtacctgcggatcctccaacggccttcaacaaggacaagctgaactctttcatcacccagtattctactggccaagtcagcgtggagatcgagtgggagctgcagaaggaaaacagcaagcgctggaacccggagatccagtacacttccaactattacaagtctaataatgttgaatttgctgttaatactgaaggtgtatatagtgaaccccgccccattgggccccgatacctgactcgtaatttt

SEQ ID NO: 639 - DNA, 2208 bp, Artificial Sequence
  Description of Artificial Sequence: Synthetic polynucleotide
atggctgccgatggttatcttccagattggctcgaggacaaccttagtgaaggaattcgcgagtggtgggctttgaaacctggagcccctcaacccaaggcaaatcaacaacatcaagacaacgctcgaggtcttgtgcttccgggttacaaataccttggacccggcaacggactcgacaagggggagccggtcaacgcagcagacgcggcggccctcgagcacaacaaggcctacgaccagcagctcaaggccggagacaacccgtacctcaagtgcaaccacgccgacgccgagttccaggagcggctcaaagaagatacgtcttttgggggcaacctcgggcgagcagtcttccaggccaaaaagaggcttcttgaacctcttggtctggttgaggaagcggctaagacggctcctggaaagaagaggcctgtagagcagtctcctcaggaaccggactcctccgcgggtattggcaaatcgggtgcacagcccgctaaaaagagactcaatttcggtcagactggcgacacagagtcagtcccagaccctcaaccaatcggagaacctcccgcagccccctcaggtgtgagatctcttacaatggcttcaggtggtggcgcaccagtggcagacaataacgaaggtgccgatggagtgggtagttcctcgggaaattggcattgcgattcccaatggctgggggacagagtcatcaccaccagcacccgaacctgggccctgcccacctacaacaatcacctctacaagcaaatctccaacagcacatctggaggatcttcaaatgacaacgcctacctcggctacagcaccccctgggggtattttgacttcaacagattccactgccacttctcaccacgtgactggcagcgactcatcaacaacaactggggattccggcctaagcgactcaacttcaagctcttcaacattcaggtcaaagaggttacggacaacaatggagtcaagaccatcgccaataaccttaccagcacggtccaggtcttcacggactcagactatcagctcccgtacgtgctcgggtcggctcacgagggctgcctcccgccgttcccagcggacgttttcatgattcctcagtacgggtatctgacgcttaatgatggaagccaggccgtgggtcgttcgtccttttactgcctggaatatttcccgtcgcaaatgctaagaacgggtaacaacttccagttcagctacgagtttgagaacgtacctttccatagcagctacgctcacagccaaagcctggaccgactaatgaatccactcatcgaccaatacttgtactatctctcaaagactattaacggttctggacagaatcaacaaacgctaaaattcagtgtggccggacccagcaacatggctgtccagggaagaaactacatacctggacccagctaccgacaacaacgtgtctcaaccactgtgactcaaaacaacaacagcgaatttgcttggcctggagcttcttcttgggctctcaatggacgtaatagcttgatgaatcctggacctgctatggccagccacaaagaaggagaggaccgtttctttcctttgtctggatctttaatttttggcaaacaaggaactggaagagacaacgtggatgcggacaaagtcatgataaccaacgaagaagaaattaaaactactaacccggtagcaacggagtcctatggacaagtggccacaaaccaccagagtgcccaagcacaggcgcagaccggctgggttcaaaaccaaggaatacttccgggtatggtttggcaggacagagatgtgtacctgcaaggacccatttgggccaaaattcctcacacggacggcaactttcacccttctccgctgatgggagggtttggaatgaagcacccgcctcctcagatcctcatcaaaaacacacctgtacctgcggatcctccaacggccttcaacaaggacaagctgaactctttcatcacccagtattctactggccaagtcagcgtggagatcgagtgggagctgcagaaggaaaacagcaagcgctggaacccggagatccagtacacttccaactattacaagtctaataatgttgaatttgctgttaatactgaaggtgtatatagtgaaccccgccccattggcaccagatacctgactcgtaatctg

SEQ ID NO: 640 - DNA, 2208 bp, Artificial Sequence
  Description of Artificial Sequence: Synthetic polynucleotide
atggctgccgatggttatcttccagattggctcgaggacaaccttagtgaaggaattcgcgagtggtgggctttgaaacctggagcccctcaacccaaggcaaatcaacaacatcaagacaacgctcgaggtcttgtgcttccgggttacaaataccttggacccggcaacggactcgacaagggggagccggtcaacgcagcagacgcggcggccctcgagcacgacaaggcctacgaccagcagctcaaggccggagacaacccgtacctcaagtgcaaccacgccgacgccgagttccaggagcggctcaaagaagatacgtcttttgggggcaacctcgggcgagcagtcttccaggccaaaaagaggcttcttgaacctcttggtctggttgaggaagcggctaagacggctcctggaaagaagaggcctgtagagcagtctcctcaggaaccggactcctccgcgggtattggcaaatcgggtgcacagcccgctaaaaagagactcaatttcggtcagactggcgacacagagtcagtcccagaccctcaaccaatcggagaacctcccgcagccccctcaggtgtgggatctcttacaatggcttcaggcggtggcgcaccagtggcagacaataacgaaggtgccgatggagtgggtagttcctcgggaaattggcattgcgattcccaatggctgggggacagagtcatcaccaccagcacccgaacctgggccctgcccacctacaacaatcacctctacaagcaaatctccaacagcacatctggaggatcttcaaatgacaacgcctacctcggctacagcaccccctgggggtattttgacttcaacagattccactgccacttctcaccacgtgactggcagcgactcatcaacaacaactggggattccggcctaagcgactcaacttcgagctcttcaacattcaggtcaaagaggttacggacaacaatggagtcaagaccatcgccaataaccttaccagcacggtccaggtcttcacggactcagactatcagctcccgtacgtgctcgggtcggctcacgagggctgcctcccgccgttcccagcggacgttttcatgattcctcagtacgggtatctgacgcttaatgatggaagccaggccgtgggtcgttcgtccttttactgcctggaatatttcccgtcgcaaatgctaagaacgggtaacaacttccagtccagctacgagtttgagaacgtacctttccatagcagctacgctcacagccaaagcctggaccgactaatgaatccactcatcgaccaatacttgtactatctctcaaagactattaacggttctggacagaatcaacaaacgctaaaattcagtgtggccggacccagcaacatggctgtccagggaagaaactacatacctggacccagctaccgacaacaacgtgcctcaaccactgtgactcaaaacaacaacagcgaatttgcttggcctggagcttcttcttgggctctcaatggacgtaatagcttgatgaatcctggacctgctatggccagccacaaagaaggggaggaccgtttctttcctttgtctggatctttaatttttggcaaacaaggaactggaagagacaacgtggatgcggacaaagtcatgataaccaacgaagaagaaattaaaactactaacccggtagcaacggagtcctatggacaagtggccacaaaccaccagagtgcccaagcacaggcgcagaccggctgggttcaaaaccaaggaatacttccgggtatggtttggcaggacagagatgtgtacctgcaaggacccatttgggccaaaattcctcacacggacggcaactttcacccttctccgctgatgggagggtttggaatgaagcacccgcctcctcagatcctcatcaaaaacacacctgtacctgcggatcctccaacggccttcaacaaggacaagctgaactctttcatcacccagtattctactggccaagtcagcgtggagatcgagtgggagctgcagaaggaaaacagcaagcgctggaacccggagatccagtacacttccaactattacaagtctaataatgttgaatttgctgttaatactgaaggtgtatatagtgaaccccgccccattggcaccagatacctgactcgtaatctg

SEQ ID NO: 641 - DNA, 2208 bp, Artificial Sequence
  Description of Artificial Sequence: Synthetic polynucleotide
atggctgccgatggttatcttccagattggctcgaggacaaccttagtgaaggaattcgcgagtggtgggctttgaaacctggagcccctcaacccaaggcaaatcaacaacatcaagacaacgctcgaggtcttgtgcttccgggttacaaataccttggacccggcaacggactcgacaagggggagccggtcaacgcagcagacgcggcggccctcgagcacgacaaggcctacgaccagcagctcaaggccggagacaacccgtacctcaagtgcaaccacgccgacgccgagttccaggagcggctcaaagaagatacgtcttttgggggcaacctcgggcgagcagtcttccaggccaaaaagaggcttcttgaacctcttggtctggttgaggaagcggctaagacggctcctggaaagaagaggcctgtagagcagtctcctcaggaaccggactcctccgcgggtattggcaaatcgggtgcacagcccgctaaaaagagactcaatttcggtcagactggcgacacagagtcagtcccagaccctcaaccaatcggagaacctcccgcagcccccccaggtgtgggatctcttacaatggcttcaggtggtggcgcaccagtggcggacaataacgaaggtgccgatggagtgggtagttcctcgggaaattggcattgcgattcccaatggctgggggacagagtcatcaccaccagcacccgaacctgggccctgcccacctacaacaatcacctctacaagcaaatctccaacagcacatctggaggatcttcaaatgacaacgcctacctcggctacagcaccccctgggggtattttgacttcaacagattccactgccacttctcaccacgtgactggcagcgactcatcaacaacaactggggattccggcctaagcgactcaacttcaagctcttcaacattcaggtcaaagaggttacggacaacaatggagtcaagaccatcgccaataaccttaccagcacggtccaggtcttcacggactcagactatcagctcccgtacgtgctcgggtcggctcacgagggctgcctcccgccgttcccagcggacgttttcatgattcctcagtacgggtatctgacgcttaatgatggaagccaggccgtgggtcgttcgtccttttactgcctggaatatttcccgtcgcaaatgctaagaacgggtaacaacttccagttcagctacgagtttgagaacgtacctttccatagcagctacgctcacagccaaagcctggaccgactaatgaatccactcatcgaccaatacttgtactatctctcaaagactattagcggttctggacagaatcaacaaacgctaaaattcagtgtggccggacccagcaacatggctgtccagggaagaaactacatacctggacccagctaccgacaacaacgtgtctcaaccactgtgactcaaaacaacagcagcgaatttgcttggcctggagcttcttcttgggctctcaatggacgtaatagcttgatgaatcctggacctgctatggccagccacaaagaaggagaggaccgtttctttcctttgtctggatctttaatttttggcaaacaaggaactggaagagacaacgtggatgcggacaaagtcatgataaccaacgaagaagaaattaaaactactaacccggtagcaacggagtcctatggacaagtggccacaaaccaccagagtgcccaagcacaggcgcagaccggctgggttcaaaaccaaggaatactttcgggtatggtttggcaggacagagatgtgtacctgcaaggacccatttgggccaaaattcctcacacggacggcaactttcacccttctccgctgatgggagggtttggaatgaagcacccgcctcctcagatcctcatcaaaaacacacctgtacctgcggatcctccaacggccttcaacaaggacaagctgaactctttcatcacccagtattctactggccaagtcagcgtggagatcgagtgggagctgcagaaggaaaacagcaagcgctggaacccggagatccagtacacttccaactattacaagtctaataatgttgaatttgctgttaatactgaaggtgtatatagtgaaccccgccccattggcaccagatacctgactcgtaatctg

SEQ ID NO: 642 - DNA, 2208 bp, Artificial Sequence
  Description of Artificial Sequence: Synthetic polynucleotide
atggctgccgatggttatcttccagattggctcgaggacaaccttagtgaaggaattcgcgagtggtgggctttgaaacctggagcccctcaacccaaggcaaatcaacaacatcaagacaacgctcgaggtcttgtgcttccgggttacaaataccttggacccggcaacggactcgacaagggggagccggtcaacgcagcagacgcggcggccctcgagcacgacaaggcctacgaccagcagctcaaggccggagacaacccgtacctcaagtgcaaccacgccgacgccgagttccaggagcggctcaaagaagatacgtcttttgggggcaacctcgggcgagcagtcttccaggccaaaaagaggcttcttgaacctcttggtctggttgaggaagcggctaagacggctcctggaaagaagaggcctgtagagcagtctcctcaggaaccggactcctccgcgggtattggcaaatcgggtgcacagcccgctaaaaagagactcaatttcggtcagactggcgacacagagtcagtcccagaccctcaaccaatcggagaacctcccgcagccccctcaggtgtgggatctcttacaatggcttcaggtggtggcgcaccagtggcagacaataacgaaggtgccgatggagtgggtagttcctcgggaaattggcattgcgattcccaatggctgggggacagagtcatcaccaccagcacccgaacctgggccctgcccacctacaacaatcacctctacaagcaaatctccaacagcacatctggaggatcttcaaatgacaacgcctacctcggctacagcaccccctgggggtattttgacttcaacagattccactgccacttctcaccacgtgactggcagcgactcatcaacaacaactggggattccggcctaagcgactcaacttcaagctcttcaacattcaggtcaaagaggttacggacaacaatggagtcaagaccatcgccaataaccttaccagcacggtccaggtcttcacggactcagactatcagctcccgtacgtgctcgggtcggctcacgagggctgcctcccgccgttcccagcggacgttttcatgattcctcagtacgggtatctgacgcttaatgatggaagccaggccgtgggtcgttcgtccttttactgcctggaatatttcccgtcgcaaatgctaagaacgggtaacaacttccagttcagctacgagtttgagaacgtacctttccatagcagctacgctcacagccaaagcctggaccgactaatgaatccactcatcgaccaatacttgtactatctctcaaagactattaacggttctggacagaatcaacaaacgctaaaattcagtgtggccggacccagcaacatggctgtccagggaagaaactacatacctggacccagctaccgacaacaacgtgtctcaaccactgtgactcaaaacaacaacagcgaatttgcttggcctggagcttcttcttgggctctcaatggacgtaatagcttgatgaatcctggacctgctatggccagccacaaagaaggagaggaccgtttctttcctttgtctggatctttaatttttggcaaacaaggaactggaagagacaacgtggatgcggacaaagtcatgataaccaacgaagaagaaattaaaactactaacccggtagcaacggagtcctatggacaagtggccacaaaccaccagagtgcccaagcacaggcgcagaccggctgggttcaaaaccaaggaatacttccgggtatggtttggcaggacagagatgtgtacctgcaaggacccatttgggccaaaattcctcacacggacggcaactttcacccttctccgctgatgggagggtttggaatgaagcacccgcctcctcagatcctcatcaaaaacacacctgtacctgcggatcctccaacggccttcaacaaggacaagctgaactctttcatcacccagtattctactggccaagtcagcgtggagatcgagtgggagctgcagaaggaaaacagcaagcgctggaacccggagatccagtacacttccaactattacaagtctaataatgttgaatttgctgttaatactgaaggtgtatatagtgaaccccgccccattggcaccagatacctgactcgtaatctg

SEQ ID NO: 643 - DNA, 2208 bp, Artificial Sequence; identical to SEQ ID NO: 642
  Description of Artificial Sequence: Synthetic polynucleotide

SEQ ID NO: 644 - DNA, 2208 bp, Artificial Sequence
  Description of Artificial Sequence: Synthetic polynucleotide
atggctgccgatggttatcttccagattggctcgaggacaaccttagtgaaggaattcgcgagtggtgggctttgaaacctggagcccctcaacccaaggcaaatcaacaacatcaagacaacgctcgaggtcttgtgcttccgggttacaaataccttggacccggcaacggactcgacaagggggagccggtcaacgcagcagacgcggcggccctcgagcacgacaaggcctacgaccagcagctcaaggccggagacaacccgtacctcaagtgcaaccacgccgacgccgagttccaggagcggctcaaagaagatacgtcttttgggggcaacctcgggcgagcagtcttccaggccaaaaagaggcttcttgaacctcttggtctggttgaggaagcggctaagacggctcctggaaagaagaggcctgtagagcagtctcctcaggaaccggactcctccgcgggtattggcaaatcgggtgcacagcccgctaaaaagagactcaatttcggtcagactggcgacacagagtcagtcccagaccctcaaccaatcggagaacctcccgcagccccctcaggtgtgggatctcttacaatggcttcaggtggtggcgcaccagtggcagacaataacgaaggtgccgatggagtgggtagttcctcgggaaattggcattgcgattcccaatggctgggggacagagtcatcaccaccagcacccgaacctgggccctgcccacctacaacaatcacctctacaagcaaatctccaacagcacatctggaggatcttcaaatgacaacgcctacctcgactacagcaccccctgggggtattttgacttcaacagattccactgccacttctcaccacgtgactggcagcggctcatcaacaacaactggggattccggcctaagcgactcaacttcaagctcttcaacattcaggtcaaagaggttacggacaacaatggagtcaagaccatcgccaataaccttaccagcacggtccaggtcttcacggactcagactatcagctcccgtacgtgctcgggtcggctcacgagggctgcctcccgccgttcccagcggacgttttcatgattcctcagtacgggtatctgacgcttaatgatggaagccaggccgtgggtcgttcgtccttttactgcctggaatatttcccgtcgcaaatgctaagaacgggtaacaacttccagttcagctacgagtttgagaacgtacctttccatagcagctacgctcacagccaaagcctggaccgactaatgaatccactcatcgaccaatacttgtactatctctcaaagactattaacggttctggacagaatcaacaaacgctaaaattcagtgtggccggacccagcaacatggctgtccagggaagaaactacatacctggacccagctaccgacaacaacgtgtctcaaccactgtgactcaaaacaacaacagcgaatttgcttggcctggagcttcttcttgggctctcaatggacgtaatagcttgatgaatcctggacctgctatggccagccacaaagaaggagaggaccgtttctttcctttgtctggatctttaatttttggcaaacaaggaactggaagagacaacgtggatgcggacaaagtcatgataaccaacgaagaagaaattaaaactactaacccggtagcaacggagtcctatggacaagtggccacaaaccaccagagtgcccaagcacaggcgcagaccggctgggttcaaaaccaaggaatacttccgggtatggtttggcagggcagagatgtgtacctgcaaggacccatttgggccaaaattcctcacacggacggcaactttcacccttctccgctgatgggagggtttggaatgaagcacccgcctcctcagatcctcatcaaaaacacacctgtacctgcggatcctccaacggccttcaacaaggacaagctgaactctttcatcacccagtattctactggccaagtcagcgtggagatcgagtgggagctgcagaaggaaaacagcaagcgctggaacccggagatccagtacacttccaactattacaagtctaataatgttgaatttgctgttaatactgaaggtgtatatagtgaaccccgccccattggcaccagatacctgactcgtaatctg

SEQ ID NO: 645 - DNA, 2208 bp, Artificial Sequence; identical to SEQ ID NO: 642
  Description of Artificial Sequence: Synthetic polynucleotide

SEQ ID NO: 646 - DNA, 2208 bp, Artificial Sequence
  Description of Artificial Sequence: Synthetic polynucleotide
atggctgccgatggttatcctccagattggctcgaggacaaccttagtgaaggaattcgcgagtggtgggctttgaaacctggagcccctcaacccaaggcaaatcaacaacatcaagacaacgctcgaggtcttgtgcttccgggttacaaataccttggacccggcaacggactcgacaagggggagccggtcaacgcagcagacgcggcggccctcgagcacgacaaggcctacgaccagcagctcaaggccggggacaacccgcacctcaagtacaaccacgccgacgccgagttccaggagcggctcaaagaagatacgtcttttgggggcaacctcgggcgagcagtcttccaggccaaaaagaggcttcttgaacctcttggtctggttgaggaagcggctaagacggctcctggaaagaagaggcccgtagagcagtctcctcaggaaccggactcctccgcgggtattggcaaatcgggtgcacagcccgctaagaagagactcaatttcggtcagactggcgacactgagtcagtcccagaccctcaaccaatcggagaacctcccgcagccccctcaggtgtgggatctcttacaatggcttcaggtggtggcgcaccagtggcagacaataacgaaggtgccgatggagtgggtagttcctcgggaaattggcattgcgattcccaatggctgggggacagagtcatcaccaccagcacccgaacctgggccctgcccacctacaacaatcacctctacaagcaaatctccaacagcacatctggaggatcttcaaatgacaacgcctacttcggctacagcaccccctgggggtattttgacttcaacagattccactgccacttctcaccacgtgactggcagcgactcatcaacaacaactggggattccggcctaagcgactcaacttcaagctcttcaacattcaggtcaaagaggttacggacaacaatggagtcaagaccatcgccaataaccttaccagcacggtccaggtcttcacggactcagactatcagctcccgtacgtgctcgggtcggctcacgagggctgcctcccgccgttcccagcggacgttttcatgattcctcagtacgggtatctgacgcttaatgatggaagccaggccgtgggtcgttcgtccttttactgcctggaatatttcccgtcgcaaatgctaagaacgggtaacaacttccagttcagctacgagtttgagaacgtacctttccatagcagctacgctcacagccaaagcctggaccgactaatgaatccactcatcgaccaatacttgtactatctctcaaagactattaacggttctggacagaatcaacaaacgctaaaattcagtgtggccggacccagcaacatggctgtccagggaagaaactacatacctggacccagctaccgacaacaacgtgtctcaaccactgtgactcaaaacaacaacagcgaatttgcttggcctggagcttcttcttgggctctcaatggacgtaatagcttgatgaatcctggacctgctatggccagccacaaagaaggagaggaccgtttctttcctttgtctggatctttaatttttggcaaacaaggaactggaagagacaacgtggatgcggacaaagtcatgataaccaacgaagaagaaattaaaactactaacccggtagcaacggagtcctatggacaagtggccacaaaccaccagagtgcccaagcacaggcgcagaccggctgggttcaaaaccaaggaatacttccgggtatggtttggcaggacagagatgtgtacctgcaaggacccatttgggccaaaattcctcacacggacggcaactttcacccttctccgctgatgggagggtttggagtgaagcacccgcctcctcagatcctcatcaaaaacacacctgtacctgcggatcctccaacggccttcaacaaggacaggctgaactctttcatcacccagtattctactggccaagtcagcgtggagatcgagtgggagctgcagaaggaaaacagcaagcgctggaacccggagatccagtacacttccaactattacaagtctaataatgttgaatttgctgttaatactgaaggtgtatatagtgaaccccgccccattggcaccagatacctgactcgtaatctg

SEQ ID NO: 647 - DNA, 2208 bp, Artificial Sequence
  Description of Artificial Sequence: Synthetic polynucleotide
atggctgccgatggttatcttccagattggctcgaggacaaccttagtgaaggaattcgcgagtggtgggctttgaaacctggagcccctcaacccaaggcaaatcaacaacatcaagacaacgctcgaggtcttgtgcttccgggttacaaataccttggacccggcaacggactcgacaagggggagccggtcaacgcagcagacgcggcggccctcgagcacgacaaggcctacgaccagcagctcaaggccggagacaacccgtacctcaagtacaaccacgccgacgccgagttccaggagcggctcaaagaagatacgtcttttgggggcaacctcgggcgagcagtcttccaggccaaaaagaggcttcttgaacctcttggtctggttgaggaagcggctaagacggctcctggaaagaagaggcctgtagagcagtctcctcaggaaccggactcctccgcgggtattggcaaatcgggtgcacagcccgctaaaaagagactcaatttcggtcagactggcgacacagagtcagtcccagaccctcaaccaatcggagaacctcccgcagccccctcaggtgtgggatctcttacaatggcttcaggtggtggcgcaccagtggcggacaataacgaaggtgccgatggagtgggtagttcctcgggaaattggcattgcgattcccaatggctgggggacagagtcatcaccaccagcacccgaacctgggccctgcccacctacaacaatcacctctacaagcaaatctccaacagcacatctggaggatcttcaaatgacaacgcctacttcggctacagcaccccctgggggtattttgacttcaacagattccactgccacttctcaccacgtgactggcagcgactcatcaacaacaactggggattccggcctaagcgactcaacttcaagctcttcaacattcaggtcaaagaggttacggacaacaatggagtcaagaccatcgccaataaccttaccagcacggtccaggtcttcacggactcagactatcagctcccgtacgtgctcgggtcggctcacgagggctgcctcccgccgttcccagcggacgttttcatgattcctcagtacgggtatctgacgcttaatgatggaagccaggccgtgggtcgttcgtccttttactgcctggaatatttcccgtcgcaaatgctaagaacgggtaacaacttccagttcagctacgagtttgagaacgtacctttccatagcagctacgctcacagccaaagcctggaccgactaatgaatccactcatcgaccaatacttgtactatctctcaaagactattaacggttctggacagaatcaacaaacgctaaaattcagtgtggccggacccagcaacatggctgtccagggaagaaactacatacctggacccagctaccgacaacaacgtgtctcaaccactgtgactcaaaacaacaacagcgaatttgcttggcctggagcttcttcttgggctctcaatggacgtaatagtttgatgaatcctggacctgctatggccagccacaaagaaggagaggaccgtttctttcctttgtctggatctttaatttttggcaaacaaggaactggaagagacaacgtggatgcggacaaagtcatgataaccaacgaagaagaaattaaaactactaacccggtagcaacggagtcctatggacaagtggccacaaaccaccagagtgcccaagcacaggcgcagaccggctgggttcaaaaccaaggaatacttccgggtatggtttggcaggacagagatgtgtacctgcaaggacccatttgggccaaaattcctcacacggacggcaactttcacccttctccgctgatgggagggtttggagtgaagcacccgcctcctcagatcctcatcaaaaacacacctgtacctgcggatcctccaacggccttcaacaaggacaagctgaactctttcatcacccagtattctactggccaagtcagcgtggagatcgagtgggagctgcagaaggaaaacagcaagcgctggaacccggagatccagtacacttccaactattacaagtctaataatgttgaatttgctgttaatactgaaggtgtatatagtgaaccccgccccattggcaccagatacctgactcgtaatctg

SEQ ID NO: 648 - DNA, 2208 bp, Artificial Sequence
  Description of Artificial Sequence: Synthetic polynucleotide
atggctgccgatggttatcttccagattggctcgaggacaaccttagtgaaggaattcgcgagtggtgggctttgaaacctggagcccctcaacccaaggcaaatcaacaacatcaagacaacgctcgaggtcttgtgcttccgggttacaaataccttggacccggcaacggactcgacaagggggagccggtcaacgcagcagacgcggcggccctcgagcacgacaaggcctacgaccagcagctcaaggccggagacaacccgtacctcaagtacaaccacgccgacgccgagttccaggagcggctcaaagaagatacgtcttttgggggcaacctcgggcgagcagtcttccaggccaaaaagaggcttcttgaacctcttggtctggttgaggaagcggctaagacggctcctggaaagaagaggcctgtagagcagtctcctcaggaaccggactcctccgcgggtattggcaaatcgggtgcacagcccgctaaaaagagactcaatttcggtcagactggcgacacagagtcagtcccagaccctcaaccaatcggagaacctcccgcagccccctcaggtgtgggatctcttacaatggcttcaggtggtggcgcaccagtggcagacaataacgaaggtgccgatggagtgggtagttcctcgggaaattggcattgcgattcccaatggctgggggacagagtcatcaccaccagcacccgaacctgggccctgcccacttacaacaatcacctctacaagcaaatctccaacagcacatctggaggatcttcaaatgacaacgcctacttcggctacagcaccccctgggggtattttgacttcaacagattccactgccacttctcaccacgtgactggcagcgactcaccaacaacaactggggattccggcctaagcgactcaacttcaagctcttcaacattcaggtcaaagaggttacggacaacaatggagtcaagaccatcgccaataaccttaccagcacggtccaggtcttcacggactcagactatcagctcccgtacgtgctcgggtcggctcacgagggctgcctcccgccgttcccagcggacgttttcatgattcctcagtacgggtatctgacgcttaatgatggaagccaggccgtgggtcgttcgtccttttactgcctggaatatatcccgtcgcaaatgctaagaacgggtaacaacttccagttcagctacgagtttgagaacgtacctttccatagcagctacgctcacagccaaagcctggaccgactaatgaatccactcatcgaccaatacttgtactatctctcaaagactattaacggttctggacagaatcaacaaacgctaaaattcagtgtggccggacccagcaacatggctgtccagggaagaaactacatacctggacccagctaccgacaacaacgtgtctcaaccactgtgactcaaaacaacaacagcgaatttgcttggcctggagcttcttcttgggctctcaatggacgtaatagcttgatgaatcctggacctgctatggccagccacaaagaaggagaggaccgtttctttcctttgtctggatctttaatttttggcaaacaaggaactggaagagacaacgtggatgcggacaaagtcatgataaccaacgaagaagaaattaaaactactaacccggtagcaacggagtcctatggacaagtggccacaaaccaccagagtgcccaagcacaggcgcagaccggctgggttcaaaaccaaggaatacttccgggtatggtttggcaggacagagatgtgtacctgcaaggacccatttgggccaaaattcctcacacggacggcaactttcacccttctccgctgatgggagggtttggagtgaagcacccgcctcctcagatcctcatcaaaaacacacctgtacctgcggatcctccaacggccttcaacaaggacaagctgaactctttcatcacccagtattctactggccaagtcagcgtggagatcgagtgggagctgcagaaggaaaacagcaagcgctggaacccggagatccagtacacttccaactattacaagtctaataatgttgaatttgctgttaatactgaaggtgtatatagtgaaccccgccccattggcaccagatacctgactcgtaatctg

SEQ ID NO: 649 - DNA, 2208 bp, Artificial Sequence
  Description of Artificial Sequence: Synthetic polynucleotide
atggctgccgatggttatcttccagattggctcgaggacaaccttagtgaaggaattcgcgagtggtgggctttgaaacctggagcccctcaacccaaggcaaatcaacaacatcaagacaacgctcgaggtcttgtgcttccgggttacaaataccttggacccggcaacggactcgacaagggggagccggtcaacgcagcagacgcggcggccctcgagcacgacaaggcctacgaccagcagctcaaggccggagacaacccgtacctcaagtacaaccacgccgacgccgagttccaggagcggctcaaagaagatacgtcttttgggggcaacctcgggcgagcagtcttccaggccaaaaagaggcttcttgaacctcttggtctggttgaggaagcggctaagacggctcctggaaagaagaggcctgtagagcagtctcctcaggaaccggactcctccgcgggtattggcaaatcgggtgcacagcccgctaaaaagagactcaatttcggtcagactggcgacacagagtcagtcccagaccctcaaccaatcggagaacctcccgcagccccctcaggtgtgggatctcttacaatggcttcaggtggtggcgcaccagtggcagacaataacgaaggtgccgatggagtgggtagttcctcgggaaattggcattgcgattcccaatggctgggggacagagtcatcaccaccagcacccgaacctgggccctgcccacctacaacaatcacctctacaagcaaatctccaacagcacatctggaggatcttcaaatgacaacgcctacttcggctacagcaccccctgggggtattttgacttcaacagattccactgccacttctcaccacgtgactggcagcgactcatcaacaacaactggggattccggcctaagcgactcaacttcaagctcttcaacattcaggtcaaagaggttacggacaacaatggagtcaagaccatcgccaataaccttaccagcacggtccaggtcttcacggactcagactatcagctcccgtacgtgctcgggtcggctcacgagggctgcctcccgccgttcccagcggacgttttcatgattcctcagtacgggtatctgacgcttaatgatggaagccaggccgtgggtcgttcgtccttttactgcctggaatatttcccgtcgcaaatgctaagaacgggtaacaacttccagtttagctacgagtttgagaacgtacctttccatagcagctacgctcacagccaaagcctggaccgactaatgaatccactcatcgaccaatacttgtactatctctcaaagactattaacggttctggacagaatcaacaaacgctaaaattcagtgtggccggacccagcaacatggctgtccagggaagaaactacatacctggacccagctaccgacaacaacgtgtctcaaccactgtgactcaaaacaacaacagcgaatttgcttggcctggagcttcttcttgggctctcaatggacgtaatagcttgatgaatcctggacctgctatggccagccacaaagaaggagaggaccgtttctttcctttgtctggatctttaatttctggcaaacaaggaactggaagagacaacgtggatgcgaacaaagtcatgataaccaacgaagaagaaattaaaactactaacccggtagcaacggagtcctatggacaagtggccacaaaccaccagagtgcccaagcacaggcgcagaccggctgggttcaaaaccaaggaatacttccgggtatggtttggcaggacagagatgtgtacctgcaaggacccatttgggccaaaattcctcacacggacggcaactttcacccttctccgctgatgggagggtttgaaatgaagcacccgcctcctcagatcctcatcaaaaacacacctgtacctgcggatcctccaacggccttcaacaaggacaagctgaactctttcatcacccagtattctactggccaagtcagcgtggagatcgagtgggagctgcagaaggaaaacagcaagcgctggaacccggagatccagtacacttccaactattacaagtctaataatgttgaatttgctgttaatactgaaggtgtatatagtgaaccccgccccattggcaccagatacctgactcgtaatctg

SEQ ID NO: 650 - DNA, 2208 bp, Artificial Sequence
  Description of Artificial Sequence: Synthetic polynucleotide
atggctgccgatggttatcttccagattggctcgaggacaaccttagtgaaggaattcgcgagtggtgggctttgaaacctggagcccctcaacccaaggcaaatcaacaacatcaagacaacgctcgaggtcttgtgcttccgggttacaaataccttggacccggcaacggactcgacaagggggagccggtcaacgcagcagacgcggcggccctcgagcacgacaaggcctacgaccagcagctcaaggccggagacaacccgtacctcaagtacaaccacgccgacgccgagttccaggagcggctcaaagaagatacgtcttttgggggcaacctcgggcgagcagtcttccaggccaaaaagaggcttcttgaacctcttggtctggttgaggaagcggctaagacggctcctggaaagaagaggcctgtagagcagtctcctcaggaaccggactcctccgcgggtattggcaaatcgggtgcacagcccgctaaaaagagactcaatttcggtcagactggcgacacagagtcagtcccagaccctcaaccaatcggagaacctcccgcagccccctcaggtgtgggatctcttacaatagcttcaggtggtggcgcaccagtggcagacaataacgaaggtgccgatggagtgggtagttcctcgggaaattggcattgcgattcccaatggctgggggacagagtcatcaccaccagcacccgaacctgggccctgcccacctacaacaatcacctctacaagcgaatctccaacagcacatctggaggatcttcaaatgacaacgcctacttcggctacagcaccccctgggggtattttgacttcaacagattccactgccacttctcaccacgtgactggcagcgactcatcaacaacaactggggattccggcctaagcgactcaacttcaagcttttcaacattcgggtcaaagaggttacggacaacaatggagtcaagaccatcaccaataaccttaccagcacggtccaggtcttcacggactcagactatcagctcccgtacgtgcttgggtcggctcacgagggctgcctcccgccgttcccagcggacgttttcatgattcctcagtacgggtatctgacgcttaatgatggaagccaggccgtgggtcgttcgtccttttactgcctggaatatttcccgtcgcaaatgctaagaacgggtaacaacttccagttcagctacgagtttgagaacgtacctttccatagcagctacgctcacagccaaagcctggaccgactaatgaatccactcatcgaccaatacttgtactatctctcaaagactattaacggttctggacagaatcaacaaacgctaaaattcagtgtggccggacccagcaacatggctgtccagggaagaaactacatacctggacccagctaccgacaacaacgtgtctcaaccactgtgactcgaaacaacaacagcgaatttgcttggcctggagcttcttcttgggctctcaatggacgtaatagcttgatgaatcctggacctgctatggccagccacaaagaaggagaggaccgtttctttcctttgtctggatctttaatttttggcaaacaaggaactggaagagacaacgtggatgcggacaaagtcatgataaccaacgaagaagaaattaaaactactaacccggtagcaacggagtcctatggacaagtggccacaaaccaccagagtgcccaagcacaggcgcagaccggctgggttcaaaaccaaggaatacttccgggtatggtttggcaggacagagatgtgtacctgcaaggacccatttgggccaaaattcctcacacggacggcaactttcacccttctccgctgatgggagggtttggagtgaagcacccgcctcctcagatcctcatcaaaaacacacctgtacctgcggatcctccaacggccttcaacaaggacaagctgaactctttcatcacccagtattctactggccaagtcagcgtggagatcgagtgggagctgcagaaggaaaacagcaagcgctggaacccggagatccagtacacttccaactattacaagtctaataatgttgaatttgctgttaatactgaaggtgtatatagtgaaccccgccccattggcaccagatacctgactcgtaatctg

SEQ ID NO: 651 - DNA, 2208 bp, Artificial Sequence
  Description of Artificial Sequence: Synthetic polynucleotide
atggctgccgatggttatcttccagattggctcgaggacaaccttagtgaaggaattcgcgagtggtgggctttgaaacctggagcccctcaacccaaggcaaatcaacaacatcaagacaacgctcgaggtcttgtgcttccgggttacaaataccttggacccggcaacggactcgacaagggggagccggtcaacgcagcagacgcggcggccctcgagcacgacaaggcctacgaccagcagctcaaggccggagacaacccgtacctcaagtacaaccacgccgacgccgagttccaggagcggctcaaagaagatacgtcttttgggggcaacctcgggcgagcagtcttccaggccaaaaagaggcttcttgaacctcttggtctggttgaggaagcggctaagacggctcctggaaagaagaggcctgtagagcagtctcctcaggaaccggactcctccgcgggtattggcaaatcgggcgcacagcccgctaaaaagagactcaatttcggtcagactggcgacacagagccagtcccagaccctcaaccaatcggagaacctcccgcagccccctcaggtgtgggatctcttacaatggcttcaggtggtggcgcaccagtggcagacaataacgaaggtgccgatggagtgggtagttcctcgggaaattggcattgcgattcccaatggctgggggacagagtcatcaccaccagcacccgaacctgggccctgcccacctacaacaatcacctctacaagcaaatctccaacagcacatctggaggatcttcaaatgacaacgcctacttcggctacagcaccccctgggggtattttgacttcaacagattccactgccacttctcaccacgtgactggcagcgactcatcaacaacaactggggattccggcctaagcgactcaacttcaagctcttcaacattcaggtcaaagaggttacggacaacaatggagtcaagaccatcgccaataaccttaccagcacggtccaggtcttcacggactcagactatcagctcccgtacgtgctcgggtcggctcacgagggctgcctcccgccgttcccagcgggcgttttcatgattcctcagtacgggtatctgacgcttaatgatggaagccaggccgtgggtcgttcgtccttttactgcctggaatatttcccgtcgcaaatgctaagaacgggtaacaacttccagttcagctacgagtttgagaacgtacctttccatagcagctacgctcacagccaaagcctggaccgactaatgaatccactcatcgaccaatacttgtactatctctcaaagactattaacggttctggacagaatcaacaaacgctaaaattcagtgtggccggacccagcaacatggctgtccagggaagaaactacatacctggacccagctaccgacaacaacgtgtctcaaccactgcgactcaaaacaacaacagcgaatttgcttggcctggagcttcttcttgggctctcaatggacgtaatagcttgatgaatcctggacctgctatggccagccacaaagaaggagaggaccgtttctttcctttgtctggatctttaatttttggcaaacaaggaactggaagagacaacgtggatgcggacaaagtcatgataaccaacgaagaagaaattaaaactactaacccggtagcaacggagtcctatggacaagtggccacaaaccaccagagtgcccaagcacaggcgcagaccggctgggttcaaaaccaaggaatacttccgggtatggtttggcaggacagagatgtgtacctgcaaggacccatttgggccaaaattcctcacacggacggcaactttcacccttctccgctgatgggagggtttggaatgaagcacccgcctcctcagatcctcatcaaaaacacacctgtacctgcggatcctccaacggccttcaacaaggacaagctgaactctttcatcacccagtattctactggccaagtcagcgtggagatcgagtgggagctgcagaaggaaaacagcaagcgctggaacccggagatccagtacacttccaactattacaagtctaataatgttgaatttgctgttaatactgaaggtgtatatagtgaaccccgccccattggcaccagatacctgactcgtaatctg

SEQ ID NO: 652 - DNA, 2208 bp, Artificial Sequence
  Description of Artificial Sequence: Synthetic polynucleotide
atggctgccgatggttatcttccagattggctcgaggacaaccttagtgaaggaattcgcgagtggtgggctttgaaacctggagcccctcaacccaaggcaaatcaacaacatcaagacaacgctcgaggtcttgtgcttccgggttacaaataccttggacccggcaacggactcgacaagggggagccggtcaacgcagcagacgcggcggccctcgagcacgacaaggcctacgaccagcagctcaaggccggagacaacccgtacctcaagtacaaccacgccgacgccgggttccaggagcggctcaaagaagatacgtcttttgggggcaacctcgggcgagcagtcttccaggccaaaaagaggcttcttgaacctcttggtctggttgaggaagcggctaagacggctcctggaaagaagaggcctgtagagcagtctcctcaggaaccggactcctccgcgggtattggcaaatcgggtgcacagcccgctaaaaagagactcaatttcggtcagactggcgacacagagtcagtcccagtccctcaaccaatcggagaacctcccgcagccccctcaggtgtgggatctcttacaatggcttcaggtggtggcgcaccagtggcagacaataacgaaggtgccgatggagtgggtagttcctcgggaaattggcattgcgattcccaatggctgggggacagagtcatcaccaccagcacccgaacctgggccctgcccacctacaacaatcacctctacaagcaaatctccaacagcacatctggaggatcttcaaatgacaacgcctacttcggctacagcaccccctgggggtattttgacttcaacagattccactgccacttctcaccacgtgactggcagcgactcatcaacaacaactggggattccggcctaagcgactcaacttcaagctcttcaacattcaggtcaaagaggttacggacaacaatggagtcaagaccatcgccaataaccttaccagcacggtccaggtcttcacggactcagactatcagctcccgtacgtgctcgggtcggctcacgagggctgcctcccgccgttcccagcggacgttttcatgattcctcagtacgggtatctgacgcttaatgatggaagccaggccgtgggtcgttcgtccttttactgcctggaatatttcccgtcgcaaatgctaagaacgggtaacaacttccagttcagctacgagtttgagaacgtacctttccatagcagctacgctcacagccaaagcctggaccgactaatgaatccactcatcgaccaatacttgtactatctctcaaagactattaacggttctggacagaatcaacaaacgctaaaattcagtgtggccggacccagcaacatggctgtccagggaagaaactacatacctggacccagctaccgacaacaacgtgtctcaaccactgtgactcaaaacaacaacagcgaatttgcttggcctggagcttcttcttgggctctcaatggacgtaatagcttgatgaatcctggacctgctatggccagccacaaagaaggagaggaccgtttctttcctttgtctggatctttaatttttggcaaacaaggagctggaagagacaacgtggatgcggacaaagtcatgataaccaacgaagaagaaattaaaactactaacccggtagcaacggagtcctatggacaagtggccacaaaccaccagagtgcccaagcacaggcgcagaccggctgggttcaaaaccaaggaatacttccgggtatggtttggcaggacagagatgtgtacctgcaaggacccatttgggccaaaattcctcacacggacggcaactttcacccttctccgctgatgggagggtttggaatgaagcacccgcctcctcagatcctcatcaaaaacacacctgtacctgcggatcctccaacggccttcaacaaggacaagctgaactctttcatcacccagtattctactggccaagtcagcgtggagatcgagtgggagctgcagaaggaaaacagcaagcgctggaacccggagatccagtacacttccaactattacaagtctaataatgttgaatttgctgttaatactgaaggtgtatatagtgaaccccgccccattggcaccagatacctgactcgtaatctg

SEQ ID NO: 653 - DNA, 2208 bp, Artificial Sequence
  Description of Artificial Sequence: Synthetic polynucleotide
  modified_base (377)..(377): a, c, g, or t
atggctgccgatggttatcttccagattggctcgaggacaaccttagtgaaggaattcgcgagaggtgggctttgaaacctggagcccctcaacccaaggcaaatcaacaacatcaagacaacgctcgaggtcttgtgcttccgggttacaaataccttggacccggcaacggactcgacaagggggagccggtcaacgcagcagacgcggcggccctcgagcacgacaaggcctacgaccagcagctcaaggccggagacaacccgtacctcaagtacaaccacgccgacgccgagttccaggagcggctcaaagaagatacgtcttttgggggcaacctcgggcgagcagtcttccaggccaaaaagaggcttcntgaacctcttggtctggttgaggaagcggctaagacggctcctggaaagaagaggcctgtagagcagtctcctcaggaaccggactcctccgcgggtattggcaaatcgggtgcacagcccgctaaaaagagactcaatttcggtcagactggcgacacagagtcagtcccagaccctcaaccaatcggagaacctcccgcagccccctcaggtgtgggatctcttacaatggcttcaggtggtggcgcaccagtggcagacaataacgaaggtgccgatggagtgggtagttcctcggggaattggcattgcgattcccaatggctgggggacagagtcatcaccaccagcacccgaacctgggccctgcccacctacaacaatcacctctacaagcaaatctccaacagcacatctggaggatcttcaaatgacaacgcctacttcggctacagcaccccctgggggtattttgacttcaacagattccactgccacttctcaccacgtgactggcagcgactcatcaacaacaactggggattccggcctaagcgactcaacttcaagctcttcaacattcaggtcaaagaggttacggacaacaatggagtcaagaccatcgccaataaccttaccagcacggtccaggtcttcacggactcagactatcagctcccgtacgtgctcgggtcggctcacgagggctgcctcccgccgttcccagcggacgttttcatgattcctcagtacgggtatctgacgcttaatgatggaagccaggccgtgggtcgttcgtccttttactgcctggaatatttcccgtcgcaaatgctaagaacgggtaacaacttccagttcagctacgagtttgagaacgtacctttccatagcagctacgctcacagccaaagcccggaccgactaatgaatccactcatcgaccaatacttgtactatctctcaaagactattaacggttctggacagaatcaacaaacgctaaaattcagtgtggccggacccagcaacatggctgtccagggaagaaactacatacctggacccagctaccgacaacaacgtgtctcaaccactgtgactcaaaacaacaacagcgaatttgcttggcctggagcttcttcttgggctctcaatggacgtaatagcttgatgaatcctggacctgctatggccagccacaaagaaggagaggaccgtttctttcctttgtctggatctttaatttttggcaaacaaggaactggaagagacaacgtggatgcggacaaagtcatgataaccaacgaagaagaaattaaaactactaacccggtagcaacggagtcctatggacaagtggccacaaaccaccagagtgcccaagcacaggcgcagaccggctgggttcaaaaccaaggaatacttccgggtatggtttggcaggacagagatgtgtacctgcaaggacccatttgggccaaaattcctcacacggacggcaactttcacccttctccgctgatgggagggtttggagtgaagcacccgcctcctcagatcctcatcaaaaacacacctgtacctgcggatcctccaacggccttcaacaaggacaagctgaactctttcatcacccagtattctactggccaagtcagcgtggagatcgagtgggagctgcagaaggaaaacagcaagcgctggaacccggagatccagtacacttccaactattacaagtctaataatgttgaatttgctgttaatactgaaggtgtatatagtgaaccccgccccattggcaccagatacctgactcgtaatctg

SEQ ID NO: 654 - DNA, 2208 bp, Artificial Sequence
  Description of Artificial Sequence: Synthetic polynucleotide
atggctgccgatggttatcttccagattggctcgaggacaaccttagtgaaggaattcgcgagtggtgggctttgaaacctggagcccctcaacccaaggcaaatcaacaacatcaagacaacgctcgaggtcttgtgcttccgggttacaaataccttggacccggcaacggactcgacaagggggagccggtcaacgcagcagacgcggcggccctcgagcacgacaaggcctacgaccagcagctcaaggccggagacaacccgtacctcaagtacaaccacgccgacgccgagttccaggagcggctcaaagaagatacgtcttttgggggcaacctcgggcgagcagtcttccaggccaaaaagaggcttcttgaacctcttggtctggttgaggaagcggctaagacggctcctggaaagaagaggcctgtagagcagtctcctcaggaaccggactcctccgcgggtattggcaaatcgggtgcacagcccgctaaaaagagactcaatttcggtcagactggcgacacagagtcagtcccagaccctcaaccaatcggagaacctcccgcagccccctcaggtgtgggatctcttacaatggcttcaggtggtggcgcaccagtggcagacaataacgaaggtgccgatggagtgggtagttcctcgggaaattggcattgcgattcccaatggctgggggacagagtcatcaccaccagcacccgaacctgggccctgcccacctacaacaatcacctctacaagcaaatctccaacagcacatctggaggatcttcaaatgacaacgcctacctcggctacagcaccccctgggggtattttgacttcaacagattccactgccacttctcaccacgtgactggcagcgactcatcaacaacaactggggattccggcctaagcgactcaacttcaagctcttcaacattcaggtcaaagaggttacggacaacaatggagtcaagaccatcgccaataaccttaccagcacggtccaggtcttcacggactcagactatcagctcccgtacgtgctcgggtcggctcacgagggctgcctcccgccgttcccagcggacgttttcatgattcctcagtacgggtatctgacgcttaatgatggaagccaggccgtgggtcgttcgtccttttactgcctggaatatttcccgtcgcaaatgctaagaacgggtaacaacttccagttcagctacgagtttgagaacgtacctttccatagcagctacgctcacagccaaagcctggaccgactaatgaatccactcatcgaccaatacttgtactatctctcaaagactattaacggttctggacagaatcaacaaacgctaaaattcagtgtggccggacccagcaacatggctgtccagggaagaaactacatacctggacccagctaccgacaacaacgtgtctcaaccactgtgactcaaaacaacaacagcgaatttgcttggcctggagcttcttcttgggctctcaatggacgtaatagcttgatgaatcctggacctgctatggccagccacaaagaaggagaggaccgtttctttcctttgtctggatctttaatttttggcaaacaaggaactggaagagacaacgtggatgcggacaaagtcatgataaccaacgaagaagaaattaaaactactaacccggtagcaacggagtcctatggacaagtggccacaaaccaccagagtgcccaagcacaggcgcagaccggctgggttcaaaaccaaggaatacttccgggtatggtttggcaggacagagatgtgtacctgcaaggacccatttgggccaaaattcctcacacggacggcaactttcacccttctccgctgatgggagggtttggaatgaagcacccgcctcctcagatcctcatcaaaaacacacctgtacctgcggatcctccaacggccttcaacaaggacaagctgaactctttcatcacccagtattctactggccaagtcagcgtggagatcgagtgggagctgcagaaggaaaacagcaagcgctggaacccggagatccagtacacttccaactattacaagtctaataatgttgaatttgctgttaatactgaaggtgtatatagtgaaccccgccccattggcaccagatacctgactcgtaatctg

SEQ ID NO: 655 - DNA, 2208 bp, Artificial Sequence
  Description of Artificial Sequence: Synthetic polynucleotide
atggctgccgatggttatcttccagattggctcgaggacaaccttagtgaaggaattcgcgagtggtgggctttgaaacctggagcccctcaacccaaggcaaatcaacaacatcaagacaacgctcgaggtcttgtgcttccgggttacaaataccttggacccggcaacggactcgacaagggggagccggtcaacgcagcagacgcggcggccctcgagcacgacaaggcctacgaccagcagctcaaggccggagacaacccgtacctcaagtacaaccacgccgacgccgagttccaggagcggctcaaagaagatacgtcttttgggggcaacctcgggcgagcagtcttccaggccaaaaagaggcttcttgaacctcttggtctggttgaggaagcggctaagacggctcctggaaagaagaggcctgtagagcagtctcctcaggaaccggactcctccgcgggtattggcaaatcgggtgcacagcccgctaaaaagagactcaatttcggtcagactggcgacacagagtcagtcccagaccctcaaccaatcggagaacctcccgcagccccctcaggtgtgggatctcttacaatggcttcaggtggtggcgcaccagtggcagacaataacgaaggtgccgatggagtgggtagttcctcgggaaattggcattgcgattcccaatggctgggggacagagtcatcaccaccagcacccgaacctgggccctgcccacctacaacaatcacctctacaagcaaatctccaacagcacatctggaggatcttcaaatgacaacgcctacttcggctacagcaccccctgggggtattttgacttcaacagattccactgccacttctcaccacgtgactggcagcgactcatcaacaacaactggggattccggcctaagcgactcaacttcaagctcttcaacattcaggtcaaagaggttacggacaacaatggagtcaagaccatcgccaataaccttaccagcacggtccaggtcttcacggactcagactatcagctcccgtacgtgctcgggtcggctcacgagggctgcctcccgccgttcccagcggacgttttcatgattcctcagtacgggtatctgacgcttaatgatggaagccaggccgtgggtcgttcgtccttttactgcctggaatatttcccgtcgcaaatgctaagaacgggtaacaacttccagttcagctacgagtttgagaacgtacctttccatagcagctacgctcacagccagagcctggaccgactaatgaatccactcatcgaccaatacttgtactatctctcaaagactattaacggttctggacagaatcaacaaacgctaaaattcagtgtggccggacccagcaacatggctgtccagggaagaaactacatacctggacccagctaccgacaacaacgtgtctcaaccactgtgactcaaaacaacaacagcgaatttgcttggcctggagcttcttcttgggctctcaatggacgtaatagcttgatgaatcctggacctgctatggccagccacaaagaaggagaggaccgtttctttcctttgtctggatctttaatttttggcaaacaaggaactggaagagacaacgtggatgcggacaaagtcatgataaccaacgaagaagaaattaaaactactaacccggtagcaacggagtcctatggacaagtggccacaaaccaccagagtgcccaagcacaggcgcagaccggctgggttcaaaaccaaggaatacttccgggtatggtttggcaggacagagatgtgtacctgcaaggacccatttgggccaaaattcctcacacggacggcaactttcacccttctccgctgatgggagggtttggaatgaagcacccgcctcctcagatcctcatcaaaaacacacctgtacctgcggatcctccaacggccttcaacaaggacaagctggactctttcatcacccagtattctactggccaagtcagcgtggagatcgagtgggagctgcagaaggaaaacagcaagcgctggaacccggtgatccagtacacttccaactattacaagtctaataatgttgaatttgctgttaatactgaaggtgtatatagtgaaccccgccccattggcaccagatacctgactcgtaatctg

SEQ ID NO: 656 - DNA, 2208 bp, Artificial Sequence
  Description of Artificial Sequence: Synthetic polynucleotide
atggctgccgatggttatcttccagattggctcgaggacaacctctctgagggcattcgcgagtggtgggacttgaaacctggagccccgaagcccaaagccaaccagcaaaagcaggacgacggccggggtctggtgcttcctggctacaagtacctcggacccttcaacggactcgacaagggggagcccgtcaacgcggcggacgcagcggccctcgagcacgacaaggcctacgaccagcagctcaaagcgggtgacaatccgtacctgcggtataaccacgccgacgccgagtttcaggagcgtctgcaagaagatacgtcttttgggggcaacctcgggcgagcagtcttccaggccaagaagcgggttctcgaacctctcggtctggttgaggaaggcgctaagacggctcctggaaagaaacgtccggtagagcagtcgccacaagagccagactcctcctcgggcatcggcaagacaggccagcagcccgctaaaaagagactcaattttggtcagactggcgactcagagtcagtccccgatccacaacctctcggagaacctccagcaacccccgctgctgtggggcctactacaatggcttcaggcggtggcgcaccaatggcagacaataacgaaggcgtcgacggagtgggtaatgcctcaggaaattggcattgcgattccacatggctgggcgacagagtcatcaccaccagcacccgcacctgggccttgcccacctacaataaccacctctacaagcaaatctccagtgcttcaacgggggccagcaacgacaaccactacttcggctacagcaccccctgggggtattttgatttcaacagattccactgccacttttcaccacgtgactggcagcgactcatcaacaacaattggggattccggcccaagagactcaacttcaaactcttcaacatccaagtcaaggaggtcacgacgaatgatggcgttacaaccatcgctaataaccttaccagcacggttcaagtcttctcggactcggagtaccagcttccgtacgtcctcggctctgcgcaccagggctgcctccctccgttcccggcggacgtgttcatgattccgcaatacggctacctgacgctcaacaatggcagccaagccgtgggacgttcatccttttactgcctggaatatttcccttctcagatgctgagaacgggcaacaactttaccttcagctacacctttgaggaagtgcctttccacagcagctacgcgcacagccagagcctggaccggctgatgaatcctctcatcgaccaatacctgtattacctgaacagaactcaaaatcagtccggaagtgcccaaaacaaggacttgctgtttagccgtgggtctccagctggcatgtctgttcagcccaaaaactggctacctggaccctgttatcggcagcagcgcgtttctaaaacaaaaacagacaacaacaacagcaattttacctggactggtgcttcaaaatataacctcaatgggcgtgaatccatcatcaaccctggcactgctatggcctcacacaaagacgacgaagacaagttctttcccatgagcggtgtcatgatttttggaaaagagagcgccggagcttcaaacactgcattggacaatgtcatgattacagacgaagaggaaattaaagccactaaccctgtggccaccgaaagatttgggaccgtggcagtcaatttccagagcagcagcacagaccctgcgaccggagatgtgcatgctatgggagcattacctggcatggtgtggcaagatagagacgtgtacctgcagggtcccatttgggccaaaattcctcacacagatggacactttcacccgtctcctcttatgggcggctttggactcaagaacccgcctcctcagatcctcatcaaaaacacgcctgttcctgcgaatcctccggcggagttttcagccacaaagcttgcttcattcatcacccaatactccacaggacaagtgagtgtggaaattgaatgggagctgcagaaagaaaacagcaagcgctggaatcccgaagtgcagtacacatccaattatgcaaaatctgccaacgttgattttactgtggacaacaatggactttatactgagcctcgccccattggcacccgttaccttacccgtcccctg

SEQ ID NO: 657 - DNA, 2208 bp, Artificial Sequence
  Description of Artificial Sequence: Synthetic polynucleotide
atggctgccgatggttatcttccagattggctcgaggacaacctctctgagggcattcgcgagtggtgggacttgaaacctggagccccgaagcccaaagccaaccagcaaaagcaggacgacggccggggtctggtgcttcctggctacaagtacctcggacccttcaacggactcgacaagggggagcccgtcaacgcggcggacgcagcggccctcgagcacgacaaggcctacgaccagcagctcaaagcgggtgacaatccgtacctgcggtataaccacgccgacgccgagtttcaggagcgtctgcaagaagatacgtcttttgggggcaacctcgggcgagcagtcttccaggccaagaagcgggttctcgaacctctcggtctggttgaggaaggcgctaagacggctcctggaaagagacgtccggtagagcagtcgccacaagagccagactcctcctcgggcatcggcaagacaggccagcagcccgctaaaaagagactcaattttggtcagactggcgactcagagtcagtccccgatccacaacctctcggagaacctccagcaacccccgctgctgtgggacctactacaatggcttcaggcggtggcgcaccaatggcagacaataacgaaggcgccgacggagtgggtaatgcctcaggaaattggcattgcgattccacatggctgggcgacagagtcatcaccaccagcacccgcacctgggccttgcccacctacaataaccacctctacaagcaaatctccagtgcttcaacgggggccagcaacgacaaccactacttcggctacagcaccccctgggggtattttgatttcaacagattccactgccacttttcaccacgtgactggcagcgactcatcaacaacaattggggattccggcccaagagactcaacttcaaactcttcaacatccaagtcaaggaggtcacgacgaatgatggcgtcacaaccatcgctaataaccttaccagcacggttcaagtcttctcggactcggagtaccagcttccgtacgtcctcggctctgcgcaccagggctgcctccctccgttcccggcggacgtgttcatgattccgcaatacggctacctgacgctcaacaatggcagccaagccgtgggacgttcatccttttactgcctggaatatttcccttctcagatgctgagaacgggcaacaactttaccttcagctacacctttgaggaagtgcctttccacagcagctacgcgcacagccagagcctggaccggctgatgaatcctctcatcgaccaatacctgtattacctgaacagaactcaaaatcagtccggaagtgcccaaaacaaggacttgctgtttagccgtgggtctccagctggcatgtctgttcagcccaaaaactggctacctggaccctgttatcggcagcagcgcgtttctaaaacaaaaacagacaacaacaacagcaattttacctggactggtgcttcaaaatataacctcaatgggcgtgaatccatcatcaaccctggcactgctatggcctcacacaaagacgacgaagacaagttctttcccatgagcggtgtcatgatttttggaaaagagagcgccggagcttcaaacactgcattggacaatgtcatgattacagacgaagaggaaattaaagccactaaccctgtggccaccgaaagatttgggaccgtggcagtcaatttccagagcagcagcacagaccctgcgaccggagatgtgcatgctatgggagcattacctggcatggtgtggcaagatagagacgtgtacctgcagggtcccatttgggccaaaattcctcacacagatggacactttcacccgtctcctcttatgggcggctttggactcaagaacccgcctcctcagatcctcatcaaaaacacgcctgttcctgcgaatcctccggcggagttttcagctacaaagtttgcttcgttcatcacccaatactccacaggacaagtgagtgtggaaattgaatgggagctgcagaaagaaaacagcaagcgctggaatcccgaagtgcagtacacatccaattatgcaaaatctgccaacgttgattttactgtggacaacaatggactttatactgagcctcgccccattggcacccgttaccttacccgtcccctg

SEQ ID NO: 658 - DNA, 2208 bp, Artificial Sequence
  Description of Artificial Sequence: Synthetic polynucleotide
atggctgccgatggttatcttccagattggctcgaggacaacctctctgagggcattcgcgagtggtgggacttgaaacctggagccccgaagcccaaagccaaccagcaaaagcaggacgacggccggggtctggtgcttcctggctacaagtacctcggacccttcaacggactcgacaagggggagcccgtcaacgcggcggacgcagcggccctcgagcacgacaaggcctacgaccagcagctcaaagcgggtgacaatccgtacccgcggtataaccacgccgacgccgagtttcaggagcgtctgcaagaagatacgtcttttgggggcaacctcgggcgagcagtcttccaggccaagaagcgggttctcgaacctctcggtctggttggggaaggcgctaagacggctcctggaaagaaacgtccggtagagcagtcgccacaagagccagactcctcctcgggcatcggcaagacaggccagcagcccgctaaaaagagactcaattttggtcagactggcgactcagagtcagtccccgatccacaacctctcggagaacctccagcaacccccgctgctgtgggacctactacaatggcttcaggcggtggcgcaccaatggcagacaataacgaaggcgccgacggagtgggtaatgcctcaggaaattggcattgcgattccacatggctgggcgacagagtcatcaccaccagcacccgcacctgggccttgcccacctacaataaccacctctacaagcaaatctccagtgcttcaacgggggccagcaacgacaaccactacttcggctacagcaccccctgggggtattttgatttcaacagattccactgccacttttcaccacgtgactggcagcgactcatcaacaacaattggggattccggcccaagagactcaacttcaaactcttcaacatccaagtcaaggaggtcacgacgaatgatggcgtcacaaccatcgctaataaccttaccagcacggttcaagtcttctcggactcggagtaccagcttccgtacgtcctcggctctgcgcaccagggctgcctccctccgttcccggcggacgtgttcatgattccgcaatacggctacctgacgctcaacaatggcagccaagccgtgggacgttcatccttttactgcctggaatatttcccttctcagatgctgagaacgggcaacaactttaccttcagctacacctttgaggaagtgcctttccacagcagctacgcgcacagccagagcctggaccggctgatgaatcctcccatcgaccaatacctgtattacctgaacagaactcaaaatcagtccggaagtgcccaaaacaaggacttgctgtttagccgtgggtctccagctggcatgtctgttcagcccaaaaactggctacctggaccctgttatcggcagcagcgcgtttctaaaacaaaaacagacaacaacaacagcaattttacctggactggtgcttcaaaatataacctcaatgggcgtgaatccatcatcaaccctggcactgctatggcctcacacaaagacgacgaagacaagttctttcccatgagcggtgtcatgatttttggaaaagagagcgccggagcttcaaacactgcattggacaatgtcatgattacagacgaagaggaaattaaagccactaaccctgtggccaccgaaagatttgggaccgtggcagtcaatttccagagcagcagcacagaccctgcgaccggagatgtgcatgctatgggagcattacctggcatggtgtggcaagatagagacgtgtacctgcagggtcccatttgggccaaaattcctcacacagatggacactttcacccgtctcctcttatgggcggctttggactcaagaacccgcctcctcagatcctcatcaaaaacacgcctgttcctgcgaatcctccggcggagttttcagctacaaagtttgcttcattcatcacccaatactccacaggacaagtgagtgtggaaattgaatgggagctgcagaaagaaaacagcaagcgctggaatcccgaagtgcagtacacatccaattatgcaaaatctgccaacgttgattttactgtggacaacaatggactttatactgagcctcgccccattggcacccgttaccttacccgtcccctg

SEQ ID NO: 659 - DNA, 2208 bp, Artificial Sequence
  Description of Artificial Sequence: Synthetic polynucleotide
atggctgccgatggttatcttccagattggctcgaggacaacctctctgagggcattcgcgagtggtgggacttgaaacctggagccccgaagcccaaagccaaccagcaaaagcaggacgacggccggggtctggtgcttcctggctacaagtacctcggacccttcaacggactcgacaagggggagcccgtcaacgcggcggacgcagcggccctcgagcacgacaaggcctacgaccagcagctcaaagcgggtgacaatccgtacctgcggtataaccacgccgacgccgagtttcaggagcgtctgcaagaagatacgtcttttgggggcaacctcgggcgagcagtcttccaggccaagaagcgggttctcgaacctctcggtctggttgaggaaggcgctaagacggctcctggaaagaaacgtccggtagagcagtcgccacaagagccagactcctcctcgggcatcggcaagacaggccagcagcccgctaaaaagagactcaattttggtcagactggcgactcagagtcagtccccgatccacgacctctcggagaacctccagcaacccccgctgctgtgggacctactacaatggcttcaggcggtggcgcaccaatggcagacaataacgaaggcgccgacggagtgggtaatgcctcaggaaattggcattgcgattccacatggctgggcgacagagtcatcaccaccagcacccgcacctgggccttgcccacctacaataaccacctctacaagcaaatctccagtgcttcaacgggggccagcaacgacaaccactacttcggctacagcaccccctgggggtattttgatttcaacagattccactgccacttttcaccacgcgactggcagcgactcatcaacaacaattggggattccggcccaagagactcaacttcaaactcttcaacatccaagtcaaggaggtcacgacgaatgatggcgtcacaaccatcgctaataaccttaccagcacggttcaagtcttctcggactcggagtaccagcttccgtacgtcctcggctctgcgcaccagggctgcctccctccgttcccggcggacgtgttcatgattccgcaatacggctacctgacgctcaacaatggcagccaagccgtgggacgttcatccttttactgcctggaatatttcccttctcagatgctgagaacgggcaacaactttaccttcagctacacctttgaggaagtgcctttccacagcagctacgcgcacagccagagcctggaccggctgatgaatcctctcatcgaccaatacctgtattacctgaacagaactcaaaatcagtccggaagtgcccaaaacaaggacttgctgtttagccgtgggcctccagctggcatgtctgttcagcccaaaaactggctacctggaccctgttatcggcagcagcgcgtttctaaaacaaaaacagacaacaacaacagcaattttacctggactggtgcttcaaaatataacctcaatgggcgtgaatccatcatcaaccctggcactgctatggcctcacacaaagacgacgaagacaagttctttcccatgagcggtgtcatgatttttggaaaagagagcgccggagcttcaaacactgcattggacaatgtcatgattacggacgaagaggaaattaaagccactaaccctgtggccaccgaaagatttgggaccgtggcagtcaatttccagagcagcagcacagaccctgcgaccggagatgtgcatgctatgggagcattacctggcatggtgtggcaagatagagacgtgtacctgcagggtcccatttgggccaaaattcctcacacagatggacactttcacccgtctcctcttatgggcggctttggactcaagaacccgcctcctcagatcctcatcaaaaacacgcctgttcctgcgaatcctccggcggagttttcagctacaaagtttgcttcattcatcacccaatactccacaggacaagtgagtgtggaaattgaatgggagctgcagaaagaaaacagcaagcgctggaatcccgaagtgcagtacacatccaattatgcaaaatctgccaacgttgattttactgtggacaacaatggactttatactgagcctcgccccattggcacccgttaccttacccgtcccctg

SEQ ID NO: 660 - DNA, 2208 bp, Artificial Sequence
  Description of Artificial Sequence: Synthetic polynucleotide
atggctgccgatggttatcttccagattggctcgaggacaacctctctgagggcattcgcgagtggtgggacttgaaacctggagccccgaagcccaaagccaaccagcaaaagcaggacgacggccggggtctggtgcttcctggctacaagtacctcggacccttcaacggactcgacaagggggagcccgtcaacgcggcggacgcagcggccctcgagcacgacaaggcctacgaccagcagctcaaagcgggtgacaatccgtacctgcggtataaccacgccgacgccgagtttcaggagcgtctgcaagaagatacgtcttttgggggcaacctcgggcgagcagtcttccaggccaagaagcgggttctcgaacctctcggtctggttgaggaaggcgctaagacggctcctggaaagaaacgtccggtagagcagtcgccacaagagccagactcctcctcgggcatcggcaagacaggccagcagcccgctaaaaagagactcaattttggtcagactggcggctcagagtcagtccccgatccacaacctctcggagaacctccagcaacccccgctgctgtgggacctactacaatggcttcaggcggtggcgcaccaatggcagacaataacgaaggcgccgacggagtgggtaatgcctcaggaaattggcattgcgattccacatggctgggcgacagagtcatcaccaccagcacccgcacctgggccttgcccacctacaataaccacctctacaagcaaatctccagtgcttcaacgggggccagcaacgacaaccactacttcggctacagcaccccctgggggtattttgatttcaacagattccactgccacttttcaccacgtgactggcagcgactcatcaacaacaattggggattccggcccaagagactcaacttcaaactcttcaacatccaagtcaaggaggtcacgacgaatgatggcgtcacaaccatcgctaataaccttaccagcacggttcaagtcttctcggactcggagtaccagcttccgtacgtcctcggctctgcgcaccagggctgcctccctccgttcccggcggacgtgttcatgattccgcaatacggctacctgacgctcaacaatggcagccaagccgtgggacgttcatccttttactgcctggaatatttcccttctcagatgctgagaacgggcaacaactttaccttcagctacacctttgaggaagtgcctttccacagcagctacgcgcacagccagagcctggaccggctgatgaatcctcccatcgaccaatacctgtattacctgaacagaactcaaaatcagtccgggagtgcccaaaacaaggacttgctgtttagccgtgggtctccagctggcatgtctgttcagcccaaaaactggctacctggaccctgttatcggcagcagcgcgtttctaaaacaaaaacagacaacaacaacagcaattttacctggactggtgcttcaaaatataacctcaatgggcgtgaatccatcatcaaccctggcactgctatggcctcacacaaagacgacgaagacaagttctttcccatgagcggtgtcatgatttttggaaaagagagcgccggagcttcaaacactgcattggacaatgtcatgattacagacgaagaggaaattaaagccactaaccctgtggccaccgaaagatttgggaccgtggcagtcaatttccagagcagcagcacagaccctgcgaccggagatgtgcatgctatgggagcattacctggcatggtgtggcaagatagagacgtgtacctgcagggtcccatttgggccaaaattcctcacacagatggacactttcacccgtctcctcttatgggcggctttggactcaagaacccgcctcctcagatcctcatcaaaaacacgcctgttcctgcgaatcctccggcggagttttcagctacaaagtttgcttcattcatcacccaatactccacaggacaagtgagtgtggaaattgaatgggagctgcagaaagaaaacagcaagcgctggaatcccgaagtgcagtacacatccaattatgcaaaatctgccaacgttgactttactgtggacaacaatggactttatactgagcctcgccccattggcacccgttaccttacccgtcccctg

SEQ ID NO: 661 - DNA, 2208 bp, Artificial Sequence
  Description of Artificial Sequence: Synthetic polynucleotide
atggctgccgatggttatcttccagattggctcgaggacaacctctctgagggcattcgcgagtggtgggacttgaaacctggagccccgaagcccaaagccaaccagcaaaagcaggacgacggccggggtctggtgcttcctggctacaagtacctcggacccttcaacggactcgacaagggggagcccgtcaacgcggcggacgcagcggccctcgagcacgacaaggcctacgaccagcagctcaaagcgggtgacaatccgtacctgcggtataaccacgccgacgccgagtttcaagagcgtctgcaagaagatacgtcttttgggggcaacctcgggcgagcagtcttccaggccaagaagcgggttctcgaacctctcggtctggttgaggaaggcgctaagacggctcctggaaagaaacgtccggtagagcagtcgccacaagagccagactcctcctcgggcatcggcaagacaggccagcagcccgctaaaaagagactcaattttggtcagactggcgactcagagtcagtccccgatccgcaacctctcggagaacctccagcaacccccgctgctgtgggacctactacaatggcttcaggcggtggcgcaccaatggcagacaataacgaaggcgccgacggagtgggtaatgcctcaggaaattggcattgcgattccacatggctgggcgacagagtcatcaccaccagcacccgcacctgggccttgcccacctacaataaccacctctacaagcaaatctccagtgcttcaacgggggccagcaacgacaaccactacttcggctacagcaccccctgggggtattttgatttcaacagattccactgccacttttcaccacgtgactggcagcgactcatcaacaacaattggggattccggcccaagagactcaacttcaaactcttcaacatccaagtcaaggaggtcacgacgaatgatggcgtcacaaccatcgctaataaccttaccagcacggttcaagtcttctcggactcggagtaccagcttccgtacgtcctcggctctgcgcaccagggctgcctccctccgttcccggcggacgtgttcatgattccgcaatacggctacctgacgctcaacaatggcagccaagccgtgggacgttcatccttttactgcctggaatatttcccttctcagatgctgagaacgggcaacaactttaccttcagctacacctttgaggaagtgcctttccacagcagctacgcgcacagccagagcctggaccggctgatgaatcctctcatcgaccaatacctgtattacctgaacagaactcaaaatcagtccggaagtgcccaaaacaaggacttgctgtttagccgtgggtctccagctggcatgtctgttcagcccaaaaactggctacctggaccctgttatcggcagcagcgcgtttctaaaacaaaaacagacaacaacaacagcaattttacctggactggtgcttcaaaatataacctcaatgggcgtgaatccatcatcaaccctggcactgctgtggcctcacacaaagacgacgaagacaagttctttcccatgagcggtgtcatgatttttggaaaagagagcgccggagcttcaaacactgcattggacaatgtcatgattacagacgaagaggaaattaaagccactaaccctgtggccaccgaaagatttgggaccgtggcagtcaatttccagagcagcagcacagaccctgcgaccggagatgtgcatgctatgggagcattacctggcatggtgtggcaagatagagacgtgtacctgcagggtcccatttgggccaaaattcctcacacagatggacactttcacccgtctcctcttatgggcggctttggactcaagaacccgcctcctcagatcctcatcaaaaacacgcctgttcctgcgaatcctccggcggagttttcagctacaaagtttgcttcattcatcacccaatactccacaggacaagtgagtgtggaaattgaatgggagctgcagaaagaaaacagcaagcgctggaatcccgaagtgcagtacacatccaattatgcaaaatctgccaacgttgattttactgtggacaacaatggactttatactgagcctcgccccattggcacccgttaccttacccgtcccctg

SEQ ID NO: 662 - DNA, 2208 bp, Artificial Sequence
  Description of Artificial Sequence: Synthetic polynucleotide
atggctgccgatggttatcttccagattggctcgaggacaacctctctgagggcattcgcgagtggtgggacttgaaacctggagccccgaagcccaaagccaaccagcaaaagcaggacgacggccggggtctggtgcttcctggctacaagtacctcggacccttcaacggactcgacaagggggagcccgtcaacgcggcggacgcagcggccctcgagcacgacaaggcctacgaccagcagctcaaagcgggtgacaatccgtacctgcggtataaccacgccgacgccgagtttcaggagcgtctgcaagaagatacgtcttttgggggcaacctcgggcgagcagtcttccaggccaagaagcgggttctcgaacctctcggtctggttgaggaaggcgctaagacggctcctggaaagaaacgtccggtagagcagtcgccacaagagccagactcctcctcgggcatcggcaagacaggccagcagcccgctaaaaagagactcaattttggtcagactggcgactcagagtcagtccccgatccacaacctctcggagaacctccagcaacccccgctgctgtgggacctactacaatggcttcaggcggtggcgcaccaatggcagacaataacgaaggcgccgacggagtgggtaatgcctcaggaaattggcattgcgattccacatggctgggcgacagagtcatcaccaccagcacccgcacctgggccttgcccacctacaataaccacctctacaagcaaatctccagtgcttcaacgggggccagcaacgacaaccactacttcggctacagcaccccctgggggtattttgatttcaacagattccactgccacttttcaccacgtgactggcagcaactcatcaacaacaattggggattccggcccaagagactcaacttcaaactcttcaacatccaagtcaaggaggtcacgacgaatgatggcgtcacaaccatcgctaataaccttaccagcacggttcaagtcttctcggactcggagtaccagcttccgtacgtcctcggctctgcgcaccagggctgcctccctccgttcccggcggacgtgttcatgattccgcaatacggctacctgacgctcaacaatggcagccaagccgtgggacgttcatccttttactgcctggaatatttcccttctcagatgctgagaacgggcaacaactttaccttcagctacacctttgaggaagtgcctttccacagcagctacgcgcacagccagagcctggaccggctgatgaatcctctcatcgaccaatacctgtattacctgaacagaactcaaaatcagtccggaagtgcccaaaacaaggacttgctgtttagccgtgggtctccagctggcatgtctgttcagcccaaaaactggctacctggaccctgttatcggcagcagcgcgtttctaaaacaaaaacagacaacaacaacagcaattttacctggactggtgcttcaaaatataacctcaatgggcgtgaatccatcatcaaccctggcactgctatggcctcacacaaagacgacgaagacaagttctttcccatgagcggtgtcatgatttttggaaaagagagcgccggagcttcaaacactgcattggacaatgtcatgattacagacgaagaggaaattaaagccactaaccctgtggccaccgaaagatttgggaccgtggcagtcaatttccagagcaccagcacagaccctgcgaccggagatgtgcatgctatgggagcattacctggcatggtgtggcaagatagagacgtgtacctgcagggtcccatttgggccaaaattcctcacacagatggacactttcacccgtctcctcttatgggcggctttggactcaagaacccgcctcctcagatcctcatcaaaaacacgcctgttcctgcgaatcctccggcggagttttcagctacaaagtttgcttcattcatcacccaatactccacaggacaagtgagtgtggaaattgaatgggagctgcagaaagaaaacagcaagcgctggaatcccgaagtgcagtacacatccaattatgcaaaatctgccgacgttgattttactgtggacaacaatggactttatactgagcctcgccccattggcacccgttaccttacccgtcccctg

SEQ ID NO: 663 - DNA, 2208 bp, Artificial Sequence
  Description of Artificial Sequence: Synthetic polynucleotide
atggctgccgatggttatcttccagattggctcgaggacaacctctctgagggcattcgcgagtggtgggacttgaaacctggagccccgaagcccaaagccaaccagcaaaagcaggacgacggccggggtctggtgcttcctggctacaagtacctcggacccttcaacggactcgacaagggggagcccgtcaacgcggcggacgcagcggccctcgagcacgacaaggcctacgaccagcagctcaaagcgggtgacaatccgtacctgcggtataaccacgccgacgccgagtttcaagagcgtctgcaagaagatacgtcttttgggggcaacctcgggcgagcagtcttccaggccaagaagcgggttctcgaacctctcggtctggttgaggaaggcgctaagacggctcctggaaagaaacgtccggtagagcagtcgccacaagagccagactcctcctcgggcatcggcaagacaggccagcagcccgctaaaaagagactcaattttggtcagactggcgactcagagtcagtccccgatccgcaacctctcggagaacctccagcaacccccgctgctgtgggacctactacaatggcttcaggcggtggcgcaccaatggcagacaataacgaaggcgccgacggagtgggtaatgcctcaggaaattggcattgcgattccacatggctgggcgacagagtcatcaccaccagcacccgcacctgggccttgcccacctacaataaccacctctacaagcaaatctccagtgcttcaacgggggccagcaacgacaaccactacttcggctacagcaccccctgggggtattttgatttcaacagattccactgccacttttcaccacgtgactggcagcgactcatcaacaacaattggggattccggcccaagagactcaacttcaaactcttcaacatccaagtcaaggaggtcacgacgaatgatggcgtcacaaccatcgctaataaccttaccagcacggttcaagtcttctcggactcggagtaccagcctccgtacgtcctcggctctgcgcaccagggctgcctccctccgttcccggcggacgtgttcatgattccgcaatacggccacctgacgctcaacaatggcagccaagccgtgggacgttcatccttttactgcctggaatatttcccttctcagatgctgagaacgggcaacaactttaccttcagctacacctttgaggaagtgcctttccacagcagctacgcgcacagccagagcctggaccggctgacgaatcctctcatcgaccaatacctgtattacctgaacagaactcaaaatcagtccggaagtgcccaaaacaaggacttgctgtttagccgtgggtctccagctggcatgtctgttcagcccaaaaactggctacctggaccctgttatcggcagcagcgcgtttctaaaacaaaaacagacaacaacaacagcaattttacctggactggtgcttcaaaatataacctcaatgggcgtgaatccatcatcaaccctggcactgctatggcctcacacaaagacgacgaagacaagttctttcccatgagcggtgtcatgatttttggaaaagagagcgccggagcttcaaacactgcattggacaatgtcatgattacagacgaagaggaaattaaagccactaaccctgtggccaccgaaagatttgggaccgtggcagtcaatttccagagcagcagcacagaccctgcgaccggagatgtgcatgctatgggagcattacctggcatggtgtggcaagatagagacgtgtacctgcagggtcccatttgggccaaaattcctcacacagatggacactttcacccgtctcctcttatgggcggctttggactcaagaacccgcctcctcagatcctcatcaaaaacacgcctgttcctgcgaatcctccggcggagttttcagctacaaagtttgcttcattcatcacccaatactccacaggacaagtgagtgtggaaattgaatgggagctgcagaaagaaaacagcaagcgctggaatcccgaagtgcagtacacatccaattatgcaaaatctgccaacgttgattttactgtggacaacaatggactttatactgagcctcgccccattggcacccgttaccttacccgtcccctg

SEQ ID NO: 664 - DNA, 2208 bp, Artificial Sequence
  Description of Artificial Sequence: Synthetic polynucleotide
atggctgccgatggttatcttccagattggctcgaggacaacctctctgagggcattcgcgagtggtgggacttgaaacctggagccccgaagcccaaagccaaccagcaagagcaggacgacggccggggtctggtgcttcctggctacaagtacctcggacccttcaacggactcgacaagggggagcccgtcaacgcggcggacgcagcggccctcgagcacgacaaggcctacgaccagcagctcaaagcgggtgacaatccgtacctgcggtataaccacgccgacgccgagtttcaggagcgtctgcaagaagatacgtcttttgggggcaacctcgggcgagcagtcttccaggccaagaagcgggttctcgaacctctcggtctggttgaggaaggcgctaagacggctcctggaaagaaacgtccggtagagcagtcgccacaagagccagactcctcctcgggcatcggcaagacaggccagcagcccgctaaaaagagactcaattttggtcagactggcgactcagagtcagtccccgatccacaacctctcggagaacctccagcaacccccgctgctgtgggacctactacaatggcttcaggcggtggcgcaccaatggcagacaataacgaaggcgccgacggagtgggtaatgcctcaggaaattggcattgcgattccacatggctgggcgacagagtcatcaccaccagcacccgcacctgggccttgcccacctacaataaccacctctacaagcaaatctccagtgcttcaacgggggccagcaacgacaaccactacttcggctacagcaccccctgggggtattttgatttcaacagattccactgccacttttcaccacgtgactggcagcgactcatcaacaacaattggggattccggcccaagagactcaacttcaaactcttcaacatccaagtcaaggaggtcacgacgaatgatggcgtcacaaccatcgctaataaccttaccagcacggttcaagtcttctcggactcggagtaccagcttccgtacgtcctcggctctgcgcaccagggctgcctccctccgttcccggcggacgtgttcatgattccgcaatacggctacctgacgctcaacaatggcagccaagccgtgggacgttcatccttttactgcctggaatatttcccttctcagatgctgagaacgggcaacaactttaccttcagctacacctttgaggaagtgcctttccacagcagctacgcgcacagccagagcctggaccggctgatgaatcctctcatcgaccaatacctgtattacctgaacagaactcaaaatcagtccggaagtgcccaaaacaaggacttgctgtttagccgtgggtctccagctggcatgtctgttcagcccaaaaactggctacctggaccctgttatcggcagcagcgcgtttctaaaacaaaaacagacaacaacaacagcaattttacctggactggtgcttcaaaatataacctcaatgggcgtgaatccatcatcaaccctggcactgctatggcctcacacaaagacgacgaagacaagttctttcccatgagcggtgtcatgatttttggaaaagagagcgccggagcttcaaacactgcattggacaatgtcatgattacagacgaagaggaaattaaagccactaaccctgtggccaccgaaagatttgggaccgtggcagtcaatttccagagcagcagcacagaccctgcgaccggagatgtgcatgctacgggaacattacctggcatggtgtggcaagatagagacgtgtacctgcagggtcccatttgggccaaaattcctcacacagatggacactttcacccgtctcctcttatgggcggctttggactcaagaacccgcctcctcagatcctcatcaaaaccacgcctgttcctgcgaatcctccggcggagttttcagctacaaagtttgcttcattcatcacccagtactccacaggacaagtgagtgtggaaattgaatgggagctgcagaaagaaaacagcaagcgctggaatcccgaagtgcagtacacatccaattatgcaaaatctgccaacgttgattttactgtggacgacaatggactttatactgagcctcgccccattggcacccgttaccttacccgtcccctg

SEQ ID NO: 665 - DNA, 2208 bp, Artificial Sequence
  Description of Artificial Sequence: Synthetic polynucleotide
atggctgccgatggttatcttccagattggctcgaggacaacctctctgagggcattcgcgagtggtgggacttgaaacctggagccccgaagcccaaagccaaccagcaaaagcaggacgacggccggggtctggtgcttcctggctacaagtacctcggacccttcaacggactcgacaagggggagcccgtcaacgcggcggacgcagcggccctcgagcacgacaaggcctacgaccagcagctcaaagcgggtgacaatccgtacctgcggtataaccacgccgacgccgagtttcaggagcgtctgcaagaagatacgtcttttgggggcaacctcgggcgagcagtcttccaggccaagaagcgggttctcgaacctctcggtctggttgaggaaggcgctaagacggctcctggaaagaaacgtccggtagagcagtcgctacaagagccagactcctcctcgggcatcggcaagacaggccagcagcccgctaaaaagagactcaattttggtcagactggcgactcagagtcagtccccgatccacaacctctcggagaacctccagcaacccccgctgctgtgggacctactacaatggcttcaggcggtggcgcaccaatggcagacaataacgaaggcgccgacggagtgggtaatgcctcaggaaattggcattgcgattccacatggctgggcgacagagtcatcaccaccagcacccgcacctgggccttgcccacctacaataaccacctctacaagcaaatctccagtgcttcaacgggggccagcaacgacaaccactacttcggctacagcaccccctgggggtattttgatttcaacagattccactgccacttttcaccacgtgactggcagcgactcatcaacaacaattggggattccggcccaagagactcaacttcaaactcttcaacatccaagtcaaggaggtcacgacgaatgatggcgtcacaaccatcgctaataaccttaccagcacggttcaagtcttctcggactcggagtaccagcttccgtacgtcctcggctctgcgcaccagggctgcctccctccgttcccggcggacgtgttcatgattccgcaatacggctacctgacgctcaacaatggcagccaagccgtgggacgttcatccttttactgcctggaatatttcccttctcagatgctgagaacgggcaacaactttaccttcagctacacctttgaggaagtgcctttccacagcagctacgcgcacagccagagcctggaccggctgatgaatcctctcatcgaccaatacctgtattacctgaacagaactcaaaatcagtccggaagtgcccaaaacaaggacttgctgtttagccgtgggtctccagctggcatgtctgttcagcccaaaaactggctacctggaccctgttatcggcagcagcgcgtttctaaaacaaaaacagacaacgacaacagcaattttacctggactggtgcttcaaaatataacctcaatgggcgtgaatccatcatcaaccctggcactgctatggcctcacacaaagacgacgaagacaagttctttcccatgagcggtgtcatgatttttggaaaagagagcgccggagcttcaaacactgcattggacaatgtcatgattacagacgaagaggaaattaaagccactaaccctgtggccaccgaaagatttgggaccgtggcagtcaatttccagagcagcagcacagaccctgcgaccggagatgtgcatgctatgggagcattacctggcatggtgtggcaagatagagacgtgtacctgcagggtcccatttgggccaaaattcctcacacagatggacactttcacccgtctcctcttatgggcggctttggactcaagaacccgcctcctcagatcctcatcaaaaacacgcctgttcctgcgaatcctccggcggagttttcagctacaaagtttgcttcattcatcacccaatactccacaggacaagtgagtgtggaaattgaatgggagctgcagaaagaaaacagcaagcgctggaatcccgaagtgcagtacacatccaattatgcaaaatctgccaacgttgattttactgtggacaacaatggactttatactgagcctcgccccattggcacccgttaccttacccgtcccctg

SEQ ID NO: 666 - DNA, 2208 bp, Artificial Sequence
  Description of Artificial Sequence: Synthetic polynucleotide
atggctgccgatggttatcttccagattggctcgaggacaacctctctgagggcattcgcgagtggtgggacttgaaacctggagctccgaagcccaaagccaaccagcaaaagcaggacgacggccggggtctggtgcttcctggctacaagtacctcggacccttcaacggactcgacaagggggagcccgtcaacgcggcggacgcagcggccctcgagcacgacaaggcctacgaccagcagctcaaagcgggtgacaatccgtacctgcggtataaccacgccgacgccgagtttcaggagcgtctgcaagaagatacgtcttttgggggcaacctcgggcgagcagtcttccaggccaagaagcgggttctcgaacctctcggtctggttgaggaaggcgctaagacggctcctggaaagaaacgtccggtagagcagtcgccacaagagccagactcctcctcgggcatcggcaagacaggccagcagcccgctaaaaagagactcaattttggtcagactggcgactcagagtcagtccccgatccacaacctctcggagaacctccagcaacccccgctgctgtgggacctactacaatggcttcaggcggtggcgcaccaatggcagacaataacgaaggcgccgacggagtgggtaatgcctcaggaaattggcattgcgattccacatggctgggcgacagagtcatcaccaccagcacccgcacctgggccttgcccacctacaataaccacctctacaagcaaatctccagtgcttcaacgggggccagcaacgacaaccactacttcggctacagcaccccctgggggtattttgatttcaacagattccactgccacttttcaccacgtgactggcagcgactcatcaacaacaattggggattccggcccaagagactcaacttcaaactcttcaacatccaagtcaaggaggtcacgacgaatgatggcgtcacaaccatcgctaataaccttaccagcacggttcaagtcttctcggactcggagtaccagcttccgtacgtcctcggctctgcgcaccagggctgcctccctccgttcccggcggacgtgttcatgattccgcaatacggctacctgacgctcaacaatggcagccaagccgtgggacgttcatccttttactgcctggaatatttcccttctcagatgctgagaacgggcaacaactttaccttcagctacacctttgaggaagcgcctttccacagcagctacgcgcacagccagagcctggaccggctgatgaatcctctcatcgaccaatacctgtattacctgaacagaactcaaaatcagtccggaagtgcccaaaacaaggacttgctgtttagccgtgggtctccagctggcatgtctgttcagcccaaaaactggctacctggaccctgttatcggcagcagcgcgtttctaaaacaaaaacagacaacaacaacagcaattttacctggactggtgcttcaaaatataacctcaatgggcgtgaatccatcatcaaccctggcactgctatggcctcacacaaagacgacgaagacaagttctttcccatgagcggtgtcatgatttttggaaaagagagcgccggagcttcaaacactgcattggacaatgtcatgattacagacgaagaggaaattaaagccactaaccctgtggccaccgaaagatttgggaccgtggcagtcaatttccagagcagcagcacagaccctgcgaccggagatgtgcatgctatgggagcattacctggcatggtgtggcaagatagagacgtgtacctgcagggtcccatttgggccaaaattcctcacacagatggacactttcacccgtctcctcttatgggcggctttggactcaagaacccgcctcctcagatcctcatcaaaaacacgcctgttcctgcgaatcctccggcggagttttcagctacaaagtttgcttcattcatcacccaatactccacaggacaagtgagtgtggaaattgaatgggagctgcagaaagaaaacagcaagcgctggaatcccgaagtgcagtacacatccaattatgcgaaatctgccaacgttgattttactgtggacaacaatggactttatactgagcctcgccccgttggcacccgttaccttacccgtcccctg

SEQ ID NO: 667 - DNA, 2208 bp, Artificial Sequence
  Description of Artificial Sequence: Synthetic polynucleotide
atggctgccgatggttatcttccagattggctcgaggacaacctctctgagggcattcgcgagtggtgggacttgaaacctggagccccgaagcccaaagccaaccagcaaaagcaggacgacggccggggtctggtgcttcctggctacaagtacctcggacccttcaacggactcgacaagggggagcccgtcaacgcggcggacgcagcggccctcgagcacgacaaggcctacgaccagcagctcaaagcgggtgacaatccatacctgcggtataaccacgccgacgccgagtttcaggagcgtctgcaagaaaatacgtcttttgggggcaacctcgggcgagcagtcttccaggccaagaagcgggttctcgaacctctcggtctggttgaggaaggcgctaagacggctcctggaaagaaacgtccggtagagcagtcgccacaagagccagactcctcctcgggcatcggcaagacaggccagcagcccgctaaaaagagactcaattttggtcagactggcgactcagagtcagtccccgatccacaacctctcggagaacctccagcaacccccgctgctgtgggacctactacaatggcttcaggcggtggcgcaccaatggcagacaataacgaaggcgccgacggagtgggtaatgcctcaggaaattggcattgcgattccacatggctgggcgacagagtcatcaccaccagcacccgcacctgggccttgcccacctacaataaccacctctacaagcaaatctccagtgcttcaacgggggccagcaacgacaaccactacttcggctacagcaccccctgggggtattttgatttcaacagattccactgccactttccaccacgtgactggcagcgactcatcaacaacaattggggattccggcccaagagactcaacttcaaactcttcaacatccaagtcaaggaggtcacgtcgaatgatggcgtcacaaccatcgctaataaccttaccagcacggttcaagtcttctcggactcggagtaccagcttccgtacgtcctcggctctgcgcaccagggctgcctccctccgttcccggcggacgtgttcatgattccgcaatacggctacctgacgctcaacaatggcagccaagccgtgggacgttcatccttttactgcctggaatatttcccttctcagatgctgagaacgggcaacaactttaccttcagctacacctttgaggaagtgcctttccacagcagctacgcgcacagccagagcctggaccggctgatgaatcctctcatcgaccaatacctgtattacctgaacagaactcaaaatcagtccggaagtgcccaaaacaaggacttgctgtttagccgtgggtctccagctggcatgtctgttcagcccaaaaactggctacctggtccctgttatcggcagcagcgcgtttctaaaacaaaaacagacaacaacaacagcaattttacctggactggtgcttcaaaatataacctcaatgggcgtgaatccatcatcaaccctggcactgctatggcctcacacaaagacgacgaagacaagttctttcccatgagcggtgtcatgatttttggaaaagagagcgccggagcttcaaacactgcattggacaatgtcatgattacagacgaagaggaaattaaagccactaaccctgtggccaccgaaagatttgggaccgtggcagtcaatttccagagcagcagcacagaccctgcgaccggagatgtgcatgctatgggagcattacctggcatggtgtggcaagatagagacgtgtacctgcagggtcccatttgggccaaaattcctcacacagatggacactttcacccgtctcctcttatgggcggctttggactcaagaacccgcctcctcagatcctcatcaaaaacacgcctgttcctgcgaatcctccggcggagttttcagctacaaagtttgcttcattcatcacccaatactccacaggacaagtgagtgtggaaattgaatgggagctgcagaaagaaaacagcaagcgctggaatcccgaagtgcagtacacatccaattatgcaaaatctgccaacgttgattttactgtggacaacaatggactttatactgagcctcgccccattggcacccgttaccttacccgtcccctg

SEQ ID NO: 668 - DNA, 2208 bp, Artificial Sequence
  Description of Artificial Sequence: Synthetic polynucleotide
atggctgccgatggttatcttccagattggctcgaggacaacctctctgagggcattcgcgagtggtgggacttgaaacctggagccccgaagcccaaagccaaccagcaaaagcaggacgacggccggggtctggtgcttcctggctacaagtacctcggacccttcaacggactcgacaagggggagcccgtcaacgcggcggacgcagcggccctcgagcacgacaaggcctacgaccagcagctcaaagcgggtgacaatccgtacctgcggtataaccacgccgacgccgagtttcaggagcgtctgcaagaagatacgtcttttgggggcaacctcgggcgagcagtcttccaggccaagaagcgggttctcgaacctctcggtctggttgaggaaggcgctaagacggctcctggaaagaaacgtccggtagagcagtcgccacaagagccagactcctcctcgggcatcggcaagacaggccagcagcccgctaaaaagagactcaattttggtcagactggcgactcagagtcagtccccgatccacaacctctcggagaacctccagcaacccccgctgctgtgggacctactacaatggcttcaggcggtggcgcaccaatggcagacaataacgaaggcgccgacggagtgggtaatgcctcaggaaattggcattgcgattccacatggctgggcgacagagtcatcaccaccagcacccgcacctgggccttgcccacctacaataaccacctctacaagcaaatctccagtgcttcaacgggggccagcaacgacaaccactacttcggctacagcaccccctgggggtattttgatttcaacagattccactgccacttttcaccacgtgactggcagcgactcatcaacaacaattggggattccggcccaagagactcaacttcaaactcttcaacatccaagtcaaggaggtcacgacgaatgatggcgtcacaaccatcgctaataaccttaccagcacggttcaagtcttctcggactcggagtaccagcttccgtacgtcctcggctctgcgcaccagggctgcctccctccgttcccggcggacgtgttcatgattccgcaatacggctacctgacgctcaacaatggcagccaagccgtgggacgttcatccttttactgcctggaatatttcccttctcagatgctgagaacgggcaacaactttaccttcagctacacctttgaggaagtgcctttccacagcagctacgcgcacagccagagcctggaccggctgatgaatcctctcatcgaccaatacctgtattacctgaacagaactcaaaatcagtccggaagtgcccaaaacaaggacttgctgtttagccgtgggtctccagctggcacgtctgttcagcccaaaaactggctacctggaccctgttatcggcagcagcgcgtttctaaaacaaaaacagacaacaacaacagcaattttacctggactggtgcttcaaaatataacctcaatgggcgtgaatccatcatcaaccctggcactgctatggcctcacacaaagacgacgaagacaagttctttcccatgagcggtgtcatgatttttggaaaagagagcgccggagcttcaaacactgcattggacaatgtcatgattacagacgaagaggaaattaaagccactaaccctgtggccaccgaaagatttgggaccgtggcagtcaatttccagagcagcagcacagaccctgcgaccggagatgtgcatgctatgggagcattacctggcatggtgtggcaagatagagacgtgtacctgcagggtcccatttgggccaaaattcctcacacagatggacactttcacccgtctcctcttatgggcggctttggactcaagaacccgcctcctcagatcctcatcaaaaacacgcctgttcctgcgaatcctccggcggagttttcagctacaaagtttgcttcattcatcacccaatactccacaggacaagtgagtgtggaaattgaatgggagctgcagaaagaaaacagcaagcgctggaatcccgaagtgcagtacacatccaattatgcaaaatctgccaacgttgattttactgtggacaacaatggactttatactgggcctcgccccattggcacccgttaccttacccgtcccctg

SEQ ID NO: 669 - DNA, 2208 bp, Artificial Sequence
  Description of Artificial Sequence: Synthetic polynucleotide
atggctgccgatggttatcttccagattggctcgaggacaacctctctgagggcattcgcgagtggtgggacttgaaacctggagccccgaagcccaaagccaaccagcaaaagcaggacgacggccggggtctggtgcttcctggctacaagtacctcggacccttcaacggactcgacaagggggagcccgtcaacgcggcggacgcagcggccctcgagcacgacaaggcctacgaccagcagctcaaagcgggtgacaatccgtacctgcggtataaccacgccgacgccgagtttcaggagcgtctgcaagaagatacgtcttttgggggcaacctcgggcgagcagtcttccaggccaagaagcgggttctcgaacctctcggtctggttgaggaaggcgctaagacggctcctggaaagaaacgtccggtagagcagtcgccacaagagccagactcctcctcgggcatcggcaagacaggccagcagcccgctaaaaagagactcaattttggtcagactggcgactcagagtcagtccccgatccacaacctctcggagaacctccagcaacccccgctgctgtgggacctactacaatggcttcaggcggtggcgcaccaatggcagacaataacgaaggcgccgacggagtgggtaatgccccaggaaattggcattgcgactccacatggctgggcgacagagtcatcaccaccagcacccgcacctgggccttgcccacctacaataaccacctctacaagcaaatctccagtgcttcaacgggggccagcaacgacaaccactacttcggctacagcaccccctgggggtattttgatttcaacagattccactgccacttttcaccacgtgactggcagcgactcatcaacaacaattggggattccggcccaagagactcaacttcaaactcttcaacatccaagtcaaggaggtcacgacgaatgatggcgtcacaaccatcgctaataaccttaccagcacggttcaagtcttctcggactcggagtaccagcttccgtacgtcctcggctctgcgcaccagggctgcctccctccgttcccggcggacgtgttcatgattccgcaatacggctacctgacgctcaacaatggcagccaagccgtgggacgttcatccttttactgcctggaatatttcccttctcagatgctgagaacgggcaacaactttaccttcagctacacctttgaggaagtgcctttccacagcagctacgcgcacagccagagcctggaccggctgatgaatcctctcatcgaccaatacctgtattacctgaacagaactcaaaatcagtccggaagtgcccaaaacaaggacttgctgtttagccgtgggtctccagctggcatgtctgttcagcccaaaaactggctacctggaccctgttatcggcagcagcgcgtttctaaaacaaaaacagacaacaacaacagcaattttacctggactggtgcttcaaaatataacctcaatgggcgtgaatccatcatcaaccctggcacagctatggcctcacacaaagacgacgaagacaagttctttcccatgagcggtgtcatgatttttggaaaagagagcgccggagcttcaaacactgcattggacaatgtcatgattacaggcgaagaggaaattaaagccactaaccctgtggccaccgaaagatttgggaccgtggcagtcaatttccagagcagcagcacagaccctgcgaccggagatgtgcatgctatgggagcattacctggcatggtgtggcaagatagagacgtgtacctgcagggtcccatttgggccaaaattcctcacacagatggacactttcacccgtctcctcttatgggcggctttggactcaagaacccgcctcctcagatcctcatcaaaaacacgcctgttcctgcgaatcctccggcggagttttcagctacaaagtttgcttcattcatcacccaatactccacaggacaagtgagtgtggaaattgaatgggagctgcagaaagaaaacagcaagcgctggaatcccgaagtgcagtacacatccaattatgcaaaatctgccaacgttgattttactgtggacaacaatggactttatactgagcctcgccccattggcacccgttaccttacccgtcccctg

SEQ ID NO: 670 - DNA, 2208 bp, Artificial Sequence
  Description of Artificial Sequence: Synthetic polynucleotide
atggctgccgatggttatcttccagattggctcgaggacaacctctctgagggcattcgcgagtggtgggacttgaaacctggagccccgaagcccaaagccaaccagcaaaagcaggacgacggccggggtctggtgcttcctggctacaagtacctcggacccttcaacagactcgacaagggggagcccgtcaacgcggcggacgcagcggccctcgagcacgacaaggcctacgaccagcagctcaaagcgggtgacaatccgtacctgcggtataaccacgccgacgccgagtttcaggagcgtctgcaagaagatacgtcttttgggggcaacctcgggcgagcagtcttccaggccaagaagcgggttctcgaacctctcggtctggttgaggaaggcgctaagacggctcctggaaggaaacgtccggtagagcagtcgccacaagagccagactcctcctcgggcatcggcaagacaggccagcagcccgctaaaaagagactcaattttggtcagactggcgactcagagtcagtccccgatccacaacctctcggagaacctccagcaacccccgctgctgtgggacctactacaatggcttcaggcggtggcgcgccaatggcagacaataacgaaggcgccgacggagtgggtaatgcctcaggaaattggcattgcgattccacatggctgggcgacagagtcatcaccaccagcacccgcacctgggccttgcccacctacaataaccacctctacaagcaaatctccagtgcttcaacgggggccagcaacgacaaccactacttcggctacagcaccccctgggggtattttgatttcaacagattccactgccacttttcaccacgtgactggcagcgactcatcaacaacaattggggattccggcccaagagactcaacttcaaactcttcaacatccaagtcaaggaggtcacgacgaatgatggcgtcacaaccatcgctaataaccttaccagcacggttcaagtcttctcggactcggagtaccagcttccgtacgtcctcggctctgcgcaccagggctgcctccctccgttcccggcggacgtgttcatgattccgcaatacggctacctgacgctcaacaatggcggccaagccgtgggacgttcatccttttactgcctggaatatttcccttctcagatgctgagaacgggcaacaactttaccttcagctacacctttgaggaagtgcctttccacagcagctacgcgcacagccagagcctggaccggctgatgaatcctctcatcgaccaatacctgtattacctgaacagaactcaaaatcagtccggaagtgcccaaaacaaggacttgctgtttagccgtgggtctccagctggcatgtctgttcagcccaaaaactggctacctggaccctgttatcggcagcagcgcgtttctaaaacaaaaacagacaacaacaacagcaattttacctggactggtgcttcaaaatatagcctcaatgggcgtgaatccatcatcaaccctggcactgctatggcctcacacaaagacgacgaagacaagttctttcccatgggcggtgtcatgatttttggaaaagagagcgccggagcttcaaacactgcattggacaatgccatgattacagacgaagaggaaattaaagccactaaccctgtggccaccgaaagatttgggaccgtggcagtcaatttccagagcagcagcacagaccctgcgaccggagatgtgcatgctatgggagcattacctggcatggtgtggcaagatagagacgtgtacctgcagggtcccatttgggccaaaattcctcacacagatggacactttcacccgtctcctcttatgggcggctttggactcaagaacccgcctcctcagatcctcatcaaaaacacgcctgttcctgcgaatcctccggcggagttttcagctacaaagtttgcttcattcatcacccaatactccacaggacaagtgagtgtggaaattgaatgggagctgcagaaagaaaacagcaagcgctggaatcccgaagtgcagtacacatccaattatgcaaaatctgccaacgttgattttactgtggacaacaatggactttatactgagcctcgccccattggcacccgttaccttacccgtcccctg

SEQ ID NO: 671 - DNA, 2208 bp, Artificial Sequence
  Description of Artificial Sequence: Synthetic polynucleotide
atggctgccgatggttatcttccagattggctcgaggacaacctctctgagggcattcgcgagtggtgggacttgaaacctggagccccgaagcccaaagccaaccagcaaaagcaggacgacggccggggtctggtgcttcctggctacaagtacctcggacccttcaacggactcgacaagggggagcccgtcaacgcggcggacgcagcggccctcgagcacgacaaggcctacgaccagcagctcaaagcgggtgacaatccgtacctgcggtataaccacgccgacgccgagtttcaggagcgtctgcaagaagatacgtcttttgggggcaacctcgggcgagcagtcttccaggccaagaagcgggttctcgaacctctcggtctggttgaggaaggcgctaagacggctcctggaaagaaacgtccggtagagcagtcgccacaagagccagactcctcctcgggcatcggcaagacaggccagcagcccgctaaaaagagactcaattttggtcagactggcgactcagagtcagtccccgatccacaacctctcggagaacctccagcaacccccgctgctgtgggacctactacaatggcttcaggcggtggcgcaccaatggcagacaataacgaaggcgccgacggagtgggtaatgcctcaggaaattggcattgcgattccacatggctgggcggcagagtcatcaccaccagcacccgcacctgggccttgcccacctacaataaccacctctacaagcaaatctccagtgcttcaacgggggccagcaacgacaaccactacttcggctacagcaccccctgggggtattttgatttcaacagattccactgccacttttcaccacgtgactggcagcgactcatcaacaacaattggggattccggcccaagagactcaacttcaaactcttcaacatccaagtcaaggaggtcacgacgaatgatggcgtcacaaccatcgctaataaccttaccagcacggttcaagtcttctcggactcggagtaccagcttccgtacgtcctcggctctgcgcaccagggctgcctccctccgttcccggcggacgtgttcatgattccgcaatacggctacctgacgctcaacaatggcagccaagccgtgggacgttcatccttttactgcctggaatatttcccttctcagatgctgagaacgggcaacaactctaccttcagctacacctttgaggaagtgcctttccacagcagctacgcgcacagccagagcctggaccggctgatgaatcctctcatcgaccaatacctgtattacctgaacagaactcaaaatcagtccggaagtgcccaaaacaaggacttgctgtttagccgtgggtctccagctggcatgtctgttcagcccaaaaactggctacctggaccctgttatcggcagcagcgcgtttctaaaacaaaaacagacaacaacaacagcaattttacctggactggtgcttcaaaatataacctcaatgggcgtgaatccatcatcaaccctggcactgctatggcctcacacaaagacgacgaagacaagttctttcccatgagcggtgtcatgatttttggaaaagagagcgccggagcttcaaacactgcattggacaatgtcatgattacagacgaagaggaaattaaagccactaaccctgtggccaccgaaagatttgggaccgtggcagtcaatttccagagcagcagcacagaccctgcgaccggagatgtgcatgctatgggaacattacctggcatggtgtggcaagatagagacgtgtacctgcagggtcccatttgggccaaaattcctcacacagatggacactttcacccgtctcctcttatgggcggctttggactcaagaacccgcctcctcagatcctcatcaaaaacacgcctgttcctgcgaatcctccggcggagttttcagctacaaagtttgcttcattcatcacccaatactccacaggacaagtgagtgtggaaattgaatgggagctgcagaaagaaaacagcaagcgctggaatcccgaagtgcagtacacatccaattatgcaaaatctgccaacgttgattttactgtggacaacaatggactttatactgagcctcgccccattggcacccgttaccttacccgtcccctg

SEQ ID NO: 672 - DNA, 2208 bp, Artificial Sequence
  Description of Artificial Sequence: Synthetic polynucleotide
atggctgccgatggttatctcccagattggctcgaggacaacctctctgagggcattcgcgagtggtgggacttgaaacctggagccccgaagcccaaagccaaccagcaaaagcaggacgacggccggggtctggtgcttcctggctacaagtacctcggacccttcaacggactcgacaagggggagcccgtcagcgcggcggacgcagcggccctcgagcacgacaaggcctacgaccagcagctcaaagcgggtgacaatccgtacctgcggtataaccacgccgacgccgagtttcaggagcgtctgcaagaagatacgtcttttgggggcaacctcgggcgagcagtcttccaggccaagaagcgggttctcgaacctctcggtctggttgaggaaggcgctaagacggctcctggaaagaaacgtccggtagagcagtcgccacaagagccagactcctcctcgggcatcggcaagacaggccagcagcccgctaaagagagactcaattttggtcagactggcgactcagagtcagtccccgatccacaacctctcggagaacctccagcaacccccgctgctgtgggacctactacaatggcttcaggcggtggcgcaccaatggcagacaataacgaaggcgccgacggagtgggtaatgcctcaggaaattggcattgcgattccacatggctgggcgacagagtcatcaccaccagcacccgcacctgggccttgcccacctacaataaccacctctacaagcaaatctccagtgcttcaacgggggccagcaacgacaaccactacttcggctacagcaccccctgggggtattttgatttcaacagattccactgccacttttcaccacgtgactggcagcgactcatcaacaacaattggggattccggcccaagagactcaacttcaaactcttcaacatccaagtcaaggaggtcacgacgaatgatggcgtcacaaccatcgccaataaccttaccagcacggttcaagtcttctcggactcggagtaccagcttccgtacgtcctcggctctgcgcaccagggctgcctccctccgttcccggcggacgtgttcatgattccgcaatacggctacctgacgctcaacaatggcagccaagccgtgggacgttcatccttttactgcctggaatatttcccttctcagatgctgagaacgggcaacaactttaccttcagctacacctttgaggaagtgcctttccacagcagctacgcgcacagccagagcctggaccggctgatgaatcctctcatcgaccaatacctgtattacctgaacagaactcaaaatcagtccggaagtgcccaaaacaaggacttgctgtttagccgtgggtctccagctggcatgtctgttcagcccaaaaactggctacctggaccctgttatcggcagcagcgcgtttctaaaacaaaaacagacaacaacaacagcaattttacctggactggtgcttcaaaatataacctcaatgggcgtgaatccatcatcaaccctggcactgctatggcctcacacaaagacgacgaagacaagttctttcccatgagcggtgtcatgatttttggaaaagagagcgccggagcttcaaacactgcattggacaatgtcatgattacagacgaagaggaaattaaagccactaaccctgtggccaccgaaagatttgggaccgtggcagtcaatttccagagcagcagcacagaccctgcgaccggagatgtgcatgctatgggagcattacctggcatggtgtggcaagatagagacgtgtacctgcagggtcccatttgggccaaaattcctcacacagatggacactttcacccgtctcctcttatgggcggctttggactcaagaacccgcctcctcagatcctcatcaaaaacacgcctgttcctgcgaatcctccggcggagttttcagctacaaagtttgcttcattcatcacccaatactccacaggacaagtgagtgtggaaattgaatgggagctgcagaaagaaaacagcaagcgctggaatcccgaagtgcagtacacatccaattatgcaaaatctgccaacgttgattttactgtggacaacaatggactttatactgagcctcgccccattggcacccgttaccttacccgtcccctg

SEQ ID NO: 673 - DNA, 2208 bp, Artificial Sequence
  Description of Artificial Sequence: Synthetic polynucleotide
atggctgccgatggttatcttccagattggctcgaggacaacctctctgagggcattcgcgagtggtgggacttgaaacctggagccccgaagcccaaagccaaccagcaaaagcaggacgacggccggggtctggtgcttcctggctacaagtacctcggacccttcaacggactcgacaagggggagcccgtcaacgcggcggacgcagcggccctcgagcacgacaaggcctacgaccagcagctcaaagcgggtgacaatccgtacctgcggtataaccacgccgacgccgagtttcaggagcgtctgcaagaagatacgtcttttgggggcaacctcgggcgagcagtcttccaggccaagaagcgggttctcgaacctctcggtctggttgaggaaggcgctaagacggctcctggaaagaaacgtccggtagagcagtcgccacaagagccagactcctcctcgggcatcggcaagacaggccagcagcccgctaaaaagagactcaattttggtcagactggcgactcagagtcagtccccgatccacaacctctcggagaacctccagcaacccccgctgctgtgggacctactacaatggcttcaggcggtggcgcaccaatggcagacaataacgaaggcgccgacggagtgggtaatgcctcaggaaattggcattgcgattccacatggctgggcgacagagtcatcaccaccagcacccgcacctgggccttgcccacctacaataaccacctctacaagcaaatctccagtgcttcaacgggggccagcaacgacaaccactacttcggctacagcaccccctgggggtattttgatttcaacagattccactgccacttttcaccacgtgactggcagcgactcatcaacaacaattggggattccggcccaagagactcaacttcaaactcttcaacatccaagtcaaggaggtcacgacgaatgatggcgtcacaaccatcgctaataaccttaccagcacggttcaagtcttctcggactcggagtaccagcttccgtacgtcctcggctctgcgcaccagggctgcctccctccgttcccggcggacgtgttcatgattccgcaatacggctacctgacgctcaacaatggcagccaagccgtgggacgttcatccttttactgcctggaatatttcccttctcagatgctgagaacgggcaacaactttaccttcagctacacctttgaggaagtgcctttccacagcagctacgcgcacagccagagcctggaccggctgatgaatcctctcatcgaccaatacctgtattacctgaacagaactcaaaatcagtccggaagtgcccaaaacaaggacttgctgtttagccgtgggtctccagctggcatgtctgttcagcccaaaaactggctacctggaccctgttatcggcagcagcgcgtttctaaaacaaaaacagacaacaacaacagcaattttacctggactggtgcttcaaaatataacctcaatgggcgtgaatccatcatcaaccctggcactgctatggcctcacacaaagacgacgaagacaagttctttcccatgagcggtgtcatgatttttggaaaagagagcgccggagcttcaaacactgcattggacaatgtcatgattacagacgaaggggaaattaaagccactaaccctgtggccaccgaaagatttgggaccgtggcagtcaatttccagagcagcagcacagaccctgcgaccggagatgtgcatgctatgggagcattacctggcatggtgtggcaagatagagacgtgtacctgcagggtcccatttgggccaaaattcctcacacagatggacactttcacccgtctcctcttatgggcggctttggactcaagaacccgcctcctcagatcctcatcaaaaacacgcctgttcctgcgaatcctccggcggagttttcagctacaaagtttgcttcattcatcacccaatactccacaggacaagtgagtgtggaaattgaatgggagctgcagaaagaaaacagcaagcgctggaatcccgaagtgcagtacacatccaattatgcaaaatctgccaacgttgattttactgtggacaacaatggactttatactgagcctcgccccattggcacccgttaccttacccgtcccctg

SEQ ID NO: 674 - DNA, 2208 bp, Artificial Sequence
  Description of Artificial Sequence: Synthetic polynucleotide
atggctgccgatggttatcttccagattggctcgaggacaacctctctgagggcattcgcgagtggtgggacttgaaacctggagccccgaaacctaaagccaaccagcaaaagcaggacgacggccggggtctggtgcttcctggctacaagtacctcggacccttcaacggactcgacaagggggagcccgtcaacgcggcggacgcagcggccctcgagcacgacaaggcctacgaccagcagctcaaagcgggtgacaatccgtacctgcggtataaccacgccgacgccgagtttcaggagcgtctgcaagaagatacgtcttttgggggcaacctcgggcgagcagtcttccaggccaagaagcgggttctcgaaccttttggtctggttgaggaaggcgctaagacggctcctggaaagaaacgtccggtagagcagtcgccacaagagccagactcctcctcgggcatcggcaagacaggccagcagcccgctaaaaagagactcaattttggtcagactggcgactcagagtcagtccccgacccacaacctctcggagaacctccagcaacccccgctgctgtgggacctactacaatggcttcaggcggtggcgcaccaatggcagacaataacgaaggcgccgacggagtgggtaatgcctcaggaaattggcattgcgattccacatggctgggcgacagagtcatcaccaccagcacccgcacctgggccttgcccacctacaataaccacctctacaagcaaatctccagtgcttcaacgggggccagcaacgacaaccactacttcggctacagcaccccctgggggtattttgatttcaacagattccactgccacttttcaccacgtgactggcagcgactcatcaacaacaattggggattccggcccaagagactcaacttcaagctcttcaacatccaagtcaaggaggtcacgacgaacgatggcgtcacgaccatcgctaataaccttaccagcacggttcaagtcttctcggattcagagtaccaactgccgtacgtcctcggctctgcgcaccagggctgcctccctccgttcccggcggacgtgtttatgattccgcagtacggctacctaacgctcaacaatggcagccaggccgtgggacgttcatccttttactgcccggaatatttcccttctcagatgctgagaacgggcaacaactttaccttcagctacacctttgaggaagtgcctttccacagcagctacgcgcacagccagagcctggaccggctgatgaatcctctcatcgaccaatacctgtattacctgaacagaactcaaaatcagtccggaagtgcccaaaacaaggacttgctgtttagccgtgggtctccagctggcatgtctgttcagcccaaaaactggctacctggaccctgttatcggcagcagcgcgtttctaaaacaaaaacagacaacaacaacagcaattttacctggactggtgcttcaaaatataacctcaatgggcgtgaatccatcatcaaccctggcactgctatggcctcacacaaagacgacaaagacaagttctttcccatgagcggtgtcatgatttttggaaaagagagcgccggagcttcaaatactgcattggacaatgtcatgatcacagatgaagaggaaattaaagccactaaccctgtggccaccgaaagatttgggaccgtggcagtcaatttccagagcagcaacacagaccccgcgaccggagatgtgcatgttatgggagccttacctggcatggtgtggcaagacagagacgtatacctgcagggtcccatttgggccaaaattcctcacacggatggacactttcacccgtctcctctcatgggcggctttggacttaagcacccgcctcctcaaatcctcatcaaaaacacgcctgttcctgcgaatcctccggcagagttttcggctacaaagtttgcttcattcatcacccagtactccacaggacaagtgagtgtggaaattgaatgggagctgcagaaagaaaacagcaagcgctggaatcccgaagtgcagtacacatccaattatgcaaaatctgccaacgttgatttcactgtggacaacaatggactttatactgagcctcgccccattggcacccgttaccttacccgtcccttg

SEQ ID NO: 675 - DNA, 2208 bp, Artificial Sequence
  Description of Artificial Sequence: Synthetic polynucleotide
atggctgccgatggttatcttccagattggctcgaggacaacctctctgagggcattcgcgagtggtgggacttgaaacctggagccccgaaacctaaagccaaccagcaaaagcaggacgacggccggggtctggtgcttcctggctacaagtacctcggacccttcaacggactcgacaagggggagcccgtcaacgcggcggacgcagcggccctcgagcacgacaaggcctacgaccagcagctcaaagcgggtgacaatccgtacctgcggtataaccacgccgacgccgagtttcaggagcgtctacaagaagatacgtcttttgggggcaacctcgggcgagcagtcttccaggccaagaagcgggttctcgaaccttttggtctggttgaggaaggcgctaagacggctcctggaaagaaacgtccggtagagcagtcgccacaagagccagactcctcctcgggcatcggcaagacaggccagcagcccgctaaaaagagactcaattttggtcagactggcgactcagagtcagtccccgacccacaacctctcggagaacctccagcaacccccgctgctgtgggacctactacaatggcttcaggcggtggcgcaccaatggcagacaataacgaaggcgccgacggagtgggtaatgcctcaggaaattggcattgcgattccacatggctgggcgacagagtcatcaccaccagcacccgcacctgggccttgcccacctacaataaccacctctacaagcaaatctccagtgcttcaacgggggccagcaacgacaaccactacttcggctacagcaccccctgggggtattttgatttcaacagattccactgccacttttcaccacgtgactggcagcgactcatcaacaacaattggggattccggcccaagagactcaacttcaagctcttcaacatccaagtcaaggaggtcacgacgaacgatggcgtcacgaccatcgctaataaccttaccagcacggttcaagtcttctcggattcagagtaccaactgccgtacgtcctcggctctgcgcaccagggctgcctccctccgttcccggcggacgtgttcatgattccgcagtacggctacctaacgctcaacaatggcagccaggccgtgggacgttcatccttttactgcctggaatatttcccttctcagatgctgagaacgggcaacaactttaccttcagctacacctttgaggaagtgcctttccacagcagctacgcgcacagccagagcctggaccggctgatgaatcctctcatcgaccaatacctgtattacctgaacagaactcaaaatcagtccggaagtgcccaaaacaaggacttgctgtttagccgtgggtctccagctggcatgtctgttcagcccaaaaactggctacctggaccctgttatcggcagcagcgcgtttctaaaacaaaaacagacaacaacaacagcaattttacctggactggtgcttcaaaatataacctcaatgggcgtgaatccatcatcaaccctggcactgctatggcctcacacaaagacgacaaagacaagttctttcccatgagcggtgtcatgatttttggaaaagagagcgccggagcttcaaatactgcattggacaatgtcatgatcacagatgaagaggaaattaaagccactaaccctgtggccaccgaaagatttgggaccgtggcagtcaatttccagagcagcgacacagaccccgcgaccggagatgtgcatgttatgggagccttacctggcatggtgtggcaagacagagacgtatacctgcagggtcccatttgggccaaaattcctcacacggatggacactttcacccgtctcctctcatgggcggctttggacttaagcacccgcctcctcaaatcctcatcaaaaacacgcctgttcctgcgaatcctccggcagagttttcggctacaaagtttgcttcattcatcacccagtactccacaggacaagtgagtgtggaaattgaatgggagctgcagaaagaaaacagcaagcgctggaatcccgaagtgcagtacacatccaattatgcaaaatctgccaacgttgatttcactgtggacaacaatggactttatactgagcctcgccccattggcacccgttaccttacccgtcccttg

SEQ ID NO: 676 - DNA, 2208 bp, Artificial Sequence
  Description of Artificial Sequence: Synthetic polynucleotide
atggctgccgatggttatcttccagattggctcgaggacaacctctctgagggcattcgcgagtggtgggacttgaaacctggagccccgaaacctaaagccaaccagcaaaagcagggcgacggccggggtctggtgcttcctggctacaagtacctcggacccttcaacggactcgacaagggggagcccgtcaacgcggcggacgcagcggccctcgagcacgacaaggcctacgaccagcagctcaaagcgggtgacaatccgtacctgcggtataaccacgccgacgccgagtttcaggagcgtctgcaagaagatacgtcttttgggggcaacctcgggcgagcagtcttccaggccaagaagcgggttctcgaaccttttggtctggttgaggaaggcgctaagacggctcctggaaagaaacgtccggtagagcagtcgccacaagagccagactcctcctcgggcatcggcaagacaggccagcagcccgctaaaaagagactcaattttggtcagactggcgactcagagtcagtccccgacccacaacctctcggagaacctccagcaacccccgctgctgtgggacctactacaatggcttcaggcggtggcgcaccaatggcagacaataacgaaggcgccgacggagtgggtaatgcctcaggaaattggcattgcgattccacatggctgggcgacagagtcatcaccaccaacactcgcacctgggccttgcccacctacaataaccacctctacaagcaaatctccagtgcttcaacgggggccagcaacgacaaccactacttcggctacagcaccccctgggggtattttgatttcaacagattccactgccacttttcaccacgtgactggcagcgactcatcaacaacaattggggattccggcccaagagactcaacttcaagctcttcaacatccaagtcaaggaggtcacgacgaacgatggcgtcacgaccatcgctaataaccttaccagcacggttcaagtcttctcggattcagagtaccaactgccgtacgtcctcggctctgcgcaccagggctgcctccctccgttcccggcggacgtgttcatgattccgcagtacggctacctaacgctcaacaatggcagccaggccgtgggacgttcatccttttactgcctggaatatttcccttctcagatgctgagaacgggcaacaactttaccttcagctacacctttgaggaagtgcctttccacagcagttacgggcacagccagagcctggaccggctgatgaatcttctcatcgaccaatacctgtattacctgaacagaactcaaaatcagtccggaagtgcccaaaacaaggacttgctgtttagccgtgggtctccagctggcatgtttgttcagcccaaaaactggctacctggaccctgttatcggcagcagcgcgtttctaaaacaaaaacagacaacaacaacagcaattttacctggactggtgcttcaaaatataacctcaatgggcgtgaatccatcatcaaccctggcactgctatggcctcacacaaagacgacgaagacaagttctttcccatgagcggtgtcatgatttttggaaaagagagcgccggagcttcaaatactgcattggacaatgtcatgatcacagatgaagaggaaattaaagccactaaccctgtggccaccgaaagatttgggaccgtggcagtcaatttccagagcagcagcacagaccccgcgaccggagatgtgcatgttatgggagccttacctggcatggtgtggcaagacagagacgtatacctgcagggtcccatttgggccaaaattcctcacacggatggacactttcacccgtctcctctcatgggcggctttggacttaagcacccgcctcctcaaatcctcatcaaaaacacgcctgttcctgcgaatcctccggcagagttttcggctacaaagtttgcttcattcatcacccagtactccacaggacaagtgagtgtggaaattgaatgggagctgcagaaagaaaacagcaagcgctggaatcccgaagtgcagtacacatccaattatgcaaaatctgccaacgttgatttcactgtggacaacaatggactttatactgagcctcgccccattggcacccgttaccttacccgtcccttg

SEQ ID NO: 677 - DNA, 2208 bp, Artificial Sequence
  Description of Artificial Sequence: Synthetic polynucleotide
atggctgccgatggttatcttccagattggctcgaggacaacctctctgagggcattcgcgagtggtgggacttgaaacctggagccccgaaacctaaagccaaccagcaaaagcaggacgacggccggggtctggtgcttcctggctacaagtacctcggacccttcaacggactcgacaagggggagcccgtcaacgcggcggacgcagcggccctcgagcacgacaaggcctacgaccagcagctcaaagcgggtgacaatccgtacctgcggtataaccacgccgacgccgagtttcaggagcgtctgcaagaagatacgtcttttgggggcaacctcgggcgagcagtcttccaggccaagaagcgggttctcgaaccttttggtctggttgaggaaggcgctaagacggctcctggaaagaaacgtccggtagagcagtcgccacaagagccagactcctcctcgggcatcggcaagacaggccagcagcccgctaaaaagagactcaattttggtcagactggcgactcagagtcagtccccgacccacaacctctcggagaacctccagcaacccccgctgctgtgggacctactacaatggcttcaggcggtggcgcaccaatggcagacaataacgaaggcgccgacggagtgggtaatgcctcaggaaattggcattgcgattccacatggctgggcgacagagtcatcaccaccaacacccgcacctgggccttgcccacctacaataaccacctctacaagcaaatctccagtgcttcaacgggggccagcaacgacaaccactacttcggctacagcaccccctgggggtattttgatttcaacagattccactgccacttttcaccacgtgactggcagcgactcatcaacaacaattggggattccggcccaagagactcaacttcaagctcttcaacatccaagtcaaggaggtcacgacgaacgatggcgtcacgaccatcgctaataaccttaccagcacggttcaagtcttctcggattcagagtaccaactgccgtacgtcctcggctctgcgcaccagggctgcctccctccgttcccggcggacgtgttcatgattccgcagtacggctacctaatgctcaacaatggcagccaggccgtgggacgttcatccttttactgcctggaatatttcccttctcagatgctgagaacgggcaacaactttaccttcagctacacctttgaggaagtgcctttccacagcagctacgcgcacagccagagcctggaccggctgatgaatcctctcatcgaccaatacctgtattacctgaacagaactcaaaatcagtccggaagtgcccaaaacaaggacttgctgtttagccgtgggtctccagctggcatgtctgttcagcccaaaaactggctacctggaccctgttatcggcagcagcgcgtttctaaaacaaaaacagacaacaacaacagcaattttacctggactggtgcttcaaaatataacctcaatgggcgtgaatccatcatcaaccctggcactgctatggcctcacacaaagacgacgaagacaagttctttcccatgagcggtgtcatgatttttggaaaagagagcgccggagcttcaaatactgcattggacaatgtcatgatcacagatgaagaggaaattaaagccactaaccctgcggccaccgaaagatttgggaccgtggcagtcaatttccagagcagcagcacagaccccgcgaccggagatgtgcatgttatgggagccttacctggcatggtgtggcaagacagagacgtatacctgcagggtcccatttgggccaaaattcctcacacggatggacactttcacccgtctcctctcatgggcggctttggacttaagcacccgcctcctcaaatcctcatcaaaaacacgcctgttcctgcgaatcctccggcagagttttcggctacaaagtttgcttcattcatcacccagtactccacaggacaagtgagtgtggaaattgaatgggagctgcagaaagaaaacagcaagcgctggaatcccgaagtgcagtacacatccaattatgcaaaatctgccaacgttgatttcactgtggacaacaatggactttatactgagcctcgccccattggcacccgttaccttacccgtcccttg

SEQ ID NO: 678 - DNA, 2208 bp, Artificial Sequence
  Description of Artificial Sequence: Synthetic polynucleotide
atggctgccgatggttatcttccagattggctcgaggacaacctctctgagggcattcgcgagtggtgggacttgaaacctggagccccgaaacctaaagccaaccagcaaaagcaggacgacggccggggtctggtgcttcctggctacaagtacctcggacccttcaacggactcgacaagggggagcccgtcaacgcggcggacgcagcggccctcgagcacgacaaggcctacgaccagcagctcaaagcgggtgacaatccgtacctgcggtataaccacgccgacgccgagtttcaggagcgtctgcaagaagatacgtcttttgggggcaacctcgggcgagcagtcttccaggccaagaagcgggttctcgaaccttttggtctggttgaggaaggcgctaagacggctcctggaaagaaacgtccggtagagcagtcgccacaagagccagactcctcctcgggcatcggcaagacgggccagcagcccgctaaaaagagactcaattttggtcagactggcgactcagagtcagtccccgacccacaacctctcggagaacctccagcaacccccgctgctgtgggacctactacaatggcttcaggcggtggcgcaccaatggcagacaataacgaaggcgccgacggagtgggtaatgcctcaggaaattggcattgcgattccacatggctgggcgacagagtcatcaccaccagcacccgcacctgggccttgcccacctacaataaccacctctacaagcaaatctccagtgcttcaacgggggccagcaacgacaaccactacttcggctacagcaccccctgggggtattttgatttcaacagattccactgccacttttcaccacgtgactggcagcgactcatcaacaacaattggggattccggcccaagagactcaacttcaagctcttcaacatccaagtcaaggaggtcacgacgaacgatggcgtcacgaccatcgctaataaccttaccagcacggttcaagtcttctcggattcagagtaccaactgccgtacgtcctcggctctgcgcaccagggctgcctccctccgttcccggcggacgtgttcatgattccgcagtacggctacctaacgctcaacaatggcagccaggccgtgggacgttcatccttttactgcctggaatatttcccttctcagatgctgagaacgggcaacaactttaccttcagctacacctttgaggaagtgcctttccacagcagctacgcgcacagccagagcctggaccggctgatgaatcctctcatcgaccaatacctgtattacctgaacagaactcaaaatcagtccggaagtgcccaaaacaaggacttgctgtttagccgtgggtctccagctggcatgtccgttcagcccaaaaactggctacctggaccctgttatcggcagcagcgcgtttctaaaacaaaaacagacaacaacaacagcaattttacctggactggtgcttcaaaatataacctcaatgggcgtgaatccatcatcaaccctggcactgctatggcctcacacaaagacgacgaagacaagttctttcccatgagcggtgtcatgatttttggaaaagagagcgccggagcttcaaatactgcattggacaatgtcatgatcacagatgaagaggaaattaaagccactaaccctgtggccaccgaaagatttgggaccgtggcagtcaatttccagagcagcagcacagaccccgcgaccggagatgtgcatgttatgggagccttacctggcatggtgtggcaagacagagacgtatacctgcagggtcccatttgggccaaaattcctcacacggatggacactttcacccgtctcctctcatgggcggctttggacttaagcacccgcctcctcaaatcctcatcaaaaacacgcctgttcctgcgaatcctccggcagagttttcggctacaaagtttgcttcattcatcacccagtactccacaggacaagtgagtgtggaaattgaatgggagctgcagaaagaaaacagcaagcgctggaatcccgaagtgcagtacacatccaattatgcaaaatctgccaacgttgatttcactgtggacaacaatggactttatactgagcctcgccccattggcacccgttaccttacccgtcccttg

SEQ ID NO: 679 - DNA, 2208 bp, Artificial Sequence
  Description of Artificial Sequence: Synthetic polynucleotide
  modified_base (305)..(305): a, c, g, or t
atggctgccgatggttatcttccagattggctcgaggacaacctctctgagggcattcgcgagtggtgggacttgaaacctggagccccgaaacctaaagccaaccagcaaaagcaggacgacggccggggtctggtgcttcctggctacaagtacctcggacccttcaacggactcgacaagggggagcccgtcaacgcggcggacgcagcggccctcgagcacgacaaggcctacgaccagcagctcaaagcgggtgacaatccgtacctgcggtataaccacgccgacgccgagtttcaggngcgtctgcaagaagatacgtcttttgggggcaacctcgggcgagcagtcttccaggccaagaagcgggttctcgaaccttttggtctggttgaggaaggcgctaagacggctcctggaaagaaacgtccggtagagcagtcgccacaagagccagactcctcctcgggcatcggcaagacaggccagcagcccgctaaaaagagactcaattttggtcagactggcgactcagagtcagtccccgacccacaacctctcggagaacctccagcaacccccgctgctgtgggacctactacaatggcttcaggcggtggcgcaccaatggcagacaataacgaaggcgccgacggagtgggtaatgcctcaggaaattggcattgcgattccacatggctgggcggcagagtcatcaccaccagcacccgcacctgggccttgcccacctacaataaccacctctacaagcaaatctccagtgcttcaacgggggccagcaacgacaaccactacttcggccacagcaccccctgggggtattttgatttcaacagattccactgccacttttcaccacgtgactggcagcgactcatcaacaacaattggggattccggcccaagagactcaacttcaagctcttcaacatccaagtcaaggaggtcacgacgaacgatggcgtcacgaccatcgctaataaccttaccagcacggttcaagtcttctcggattcagagtaccaactgccgtacgtcctcggctctgcgcaccagggctgcctccctccgtccccggcggacgtgttcatgattccgcagtacggctacctaacactcaacaatggcagccaggccgtgggacgttcatccttttactgcctggaatatttcccttctcagatgctgagaacgggcaacaactttaccttcagctacacctttgaggaagtgcctttccacagcagctacgcgcacagccagagcctggaccggctgatgaatcctctcatcgaccaatacctgtattacctgaacagaactcaaaatcagtccggaagtgcccaaaacaaggacttgctgtttagccgtgggtctccagctggcatgtctgttcagcccaaaaactggctacctggaccctgttatcggcagcagcgcgtttctaaaacaaaaacagacaacaacaacagcaattttacctggactggtgcttcaaaatataacctcaatgggcgtgaatccatcatcaaccctggcactgctatggcctcacacaaagacgacaaagacaagttctttcccatgagcggtgtcatgatttttggaaaagagagcgccggagcttcaaatactgcattggacaatgtcatgatcacagatgaagaggaaattaaagccactaaccctgtggccaccgaaagatttgggaccgtggcagtcaatttccagagcagcaacacagaccccgcgaccggagatgtgcatgttatgggagccttacctggcatggtgtggcaagacagagacgtatacctgcagggtcccatttgggccaaaattcctcacacggatggacactttcacccgtctcctctcatgggcggctttggacttaagcacccgcctcctcaaatcctcatcaaaaacacgcctgttcctgcgaatcctccggcagagttttcggctacaaagtttgcttcattcatcacccagtactccacaggacaagtgagtgtggaaattgaatgggagctgcagaaagaaaacagcaagcgctggaatcccgaagtgcagtacacatccaattatgcaaaatctgccaacgttgatttcactgtggacaacaatggactttatactgagcctcgccccattggcacccgttaccttacccgtcccttg

SEQ ID NO: 680 - DNA, 2208 bp, Artificial Sequence
  Description of Artificial Sequence: Synthetic polynucleotide
atggctgccgatggttattttccagattggctcgaggacaacctttctgagggcattcgcgagtggtgggacttgaaacctggagccccgaaacctaaagccaaccagcaaaagcaggacgacggccggggtctggtgcttcctggctacaagtacctcggacccttcaacggactcgacaagggggagcccgtcaacgcggcggacgcagcggccctcgagcacgacaaggcctacgaccagcagctcaaagcgggtgacaatccgtacctgcggtataaccacgccgacgccgagtttcaggagcgtctgcaagaagatacgtcttttgggggcaacctcgggcgagcagtcttccaggccaagaagcgggttctcgaaccttttggtctggttgaggaaggcgctaagacggctcctggaaagaaacgtccggtagagcagtcgccacaagagccagactcctcctcgggcatcggcaggacaggccagcagcccgctaaaaagagactcaattttggtcagactggcgactcagagtcagtccccgacccacaacctctcggagaacctccagcgacccccgctgctgtgggacctactacaatggcttcaggcggtggcgcaccaatggcagacaataacgaaggtgccgacggagtgggtaatgcctcaggaaattggcattgcgattccacatggctgggcgacagagtcatcaccaccagcacccgcacctgggccttgcccacctacaataaccacctctacaagcaaatctccagtgcttcaacgggggccagcaacgacaaccactacttcggctacagcaccccctgggggtattttgatttcaacagattccactgccacttttcaccacgtgactggcagcgactcatcaacaacaattggggattccggcccaagagactcaacttcaagctcttcaacatccaagtcaaggaggtcacgacgaacgatggcgtcacgaccatcgctaataaccttaccagcacggttcaagtcttctcggattcagagtaccaactgccgtacgtcctcggctctgcgcaccagggctgcctccctccgttcccggcggacgtgttcatgattccgcagtacggctacctaacgctcaacaatggcagccaggccgtgggacgttcatccttttactgcctggaatatttcccttctcagatgctgagaacgggcaacaactttaccttcagctacacctttgaggaagtgcctttccacagcagctacgcgcacagccagagcctggaccggctgatgaatcctctcatcgaccaatacctgtattacctgaacagaactcaaaatcagtccggaagtgcccaaaacaaggacttgctgtttagccgtgggtctccagctggcatgtctgttcagcccaaaaactggctacctggaccctgttatcggcagcagcgcgtttctaaaacaaaaacagacaacaacaacagcaattttacctggactggtgcttcaaaatataacctcaatgggcgtgaatccatcatcaaccctggcactgctatggcctcacacaaagacgacgaagacaagttctttcccatgagcggtgtcatgatttttggaaaagagagcgccggagcttcaaatactgcattggacaatgtcatgatcacagatgaagaggaaattaaagccactaaccctgtggccaccgaaagatttgggaccgtggcagtcaatttccagagcagcagcccagaccccgcgaccggagatgtgcatgttatgggagccttacctggcatggtgtggcaagacagagacgtatacctgcagggtcccatttgggccaaaattcctcacacggatggacactttcacccgtctcctctcatgggcggctttggacttaagcacccgcctcctcaaatcctcatcaaaaacacgcctgttcctgcgaatcctccggcagagttttcggctacaaagtttgcttcattcatcacccagtactccacaggacaagtgagtgtggaaattgaatgggagctgcagaaagaaaacagcaagcgctggaatcccgaagtgcagtacacatccaattatgcaaaatctgccaacgttgatttcactgtggacaacaatggactttatagtgagcctcgccccattggcacccgttaccttacccgtcccttg

SEQ ID NO: 681 - DNA, 2208 bp, Artificial Sequence
  Description of Artificial Sequence: Synthetic polynucleotide
atggctgccgatggttatcttccagattggctcgaggacaacctctctgagggcattcgcgagtggtgggacttgaaacctggagccccgaaacctaaagccaaccagcaaaagcaggacgacggccggggtctggtgcttcctggctacaagtacctcggacccttcaacggactcgacaagggggagcccgtcaacgcggcggacgcagcggccctcgagcacgacaaggcctacgaccagcagctcaaagcgggtgacaatccgtacctgcggtataaccacgccgacgccgagtttcaggagcgtctgcaagaagatacgtcttttgggggcaacctcgggcgagcagtcttccaggccaagaagcgggttctcgaaccttttggtctggttgaggaaggcgctaagacggctcctggaaagaaacgtccggtagagcagtcgccacaagagccagactcctcctcgggcatcggcaagacaggccagcagcccgctaaaaagagactcaattttggtcagactggcgactcagagtcagtccccgacccacaacctctcggagaacctccagcaacccccgctgctgtgggacctactacaatggcttcaggcggtggcgcaccaatggcagacaataacgaaggcgccgacggagtgggtaatgcctcaggaaattggcattgcgattccacatggctgggcgacagagtcatcaccaccagcacccgcacctgggccttgcccacctacaataaccacctctacaagcaaacctccagtgcttcaacgggggccagcaacgacaaccactacttcggctacagcaccccctgggggtattttgatttcaacagattccactgccacttttcaccacgtgactggcagcgactcatcaacaacaattggggattccggcccaagagactcaacttcaagctcttcaacatccaagtcaaggaggtcacgacgaacgatggcgtcacgaccatcgctaataaccttaccagcacggttcaagtcttctcggattcagagtaccaactgccgtacgtcctcggctctgcgcaccagggctgcctccctccgttcccggcggacgtgttcatgattccgcagtacggctacctaacgctcaacaatggcagccaggccgtgggacgttcatccttttactgcctggaatatttcccttctcagatgctgagaacgggcaacaactttaccttcagctacacctttgaggaagtgcctttccacagcagctacgcgcacagccagagcctggaccggctgatgaatcctctcatcgaccaatacctgtattacctgaacagaactcaaaatcagtccggaagtgcccaaaacaaggacttgctgtttagccgtgggtctccagctggcatgtctgttcagcccaaaaactggctacctggaccctgttatcggcagcagcgcgtttctaaaacaaaaacagactacaacaacagcaattttacctggactggtgcttcaaaatataacctcaatgggcgtgaatccatcatcaaccctggcactgctatggcctcacacaaagacgacgaagacaagttctttcccatgagcggtgtcatgatttttggaaaagagagcgccggagcttcaaatactgcattggacaatgtcatgatcacagatgaagaggaaattaaagccactaaccctgtggccaccgaaagatttgggaccgtggcagtcaatttccagagcagcagcacagaccccgcgaccggagatgtgcatgttatgggagccttacctggcatggtgtggcaagacagagacgtatacctgcagggtcccatttgggccaaaattcctcacacggatggacactttcacccgtctcctctcatgggcggctttggacttaagcacccgcctcctcaaatcctcatcaaaaacacgcctgttcctgcgaatcctccggcagagttttcggctacaaagtttgcttcattcatcacccagtactccacaggacaagtgagtgtggaaattgaatgggagctgcagaaagaaaacagcaagcgctggaatcccgaagtgcagtacacatccaattatgcaaaatctgccaacgttgatttcactgtggacaacaatggactttatactgagcctcgccccattggcacccgttaccttacccgtcccttg

SEQ ID NO: 682 - DNA, 2208 bp, Artificial Sequence
  Description of Artificial Sequence: Synthetic polynucleotide
atggctgccgatggttatcctccagattggctcgaggacaacctctctgagggcattcgcgagtggtgggacttgaaacctggagtcccgaaacctaaagccaaccagcaaaagcaggacgacggccggggtctggtgcttcctggctacaagtacctcggacccttcaacggactcgacaagggggagcccgtcaacgcggcggacgcagcggccctcgagcacgacaaggcctacgaccagcagctcaaagcgggtgacaatccgtacctgcggtataaccacgccgacgccgagtttcaggagcgtctgcaagaagatacgtcttttgggggcaacctcgggcgagcagtcttccaggccaagaagcgggttctcgaaccttttggtctggttgaggaaggcgctaagacggctcctggaaagaaacgtccggtagagcagtcgccacaagagccagactcctcctcgggcatcggcaagacaggccagcagcccgctaaaaagagactcaattttggtcagactggcgactcagagtcagtccccgacccacaacctctcggagaacctccagcaacccccgctgctgtgggacctactacaatggcttcaggcggtggcgcaccaatggcagacaataacgaaggcgccgacggagtgggtaatgcctcaggaaattggcattgcgattccacatggctgggcgacagagtcatcaccaccagcacccgcacctgggccttgcccacctacaataaccacctctacaagcaaatctccagtgcttcaacgggggccagcaacgacaaccactacttcggctacagcaccccctgggggtattttgatttcaacagattccactgccacttttcaccacgtgactggcagcgactcatcaacaacaattggggattccggcccaagagactcaacttcaagctcttcaacatccaagtcaaggaggtcacgacgaacgatggcgtcacgaccatcgctaataaccttaccagcacggttcaagtcttctcggattcagagtaccaactgccgtacgtcctcggctctgcgcaccagggctgcctccctccgttcccggcggacgtgttcatgattccgcagtacggctacctaacgctcaacaatggcagccaggccgtgggacgttcatccttttactgcctggaatatttcccttctcagatgctgagaacgggcaacaactttaccttcagctacacctttgaggaagtgcctttccacagcagctacgcgcacagccagagcctggaccggctgatgaatcctctcatcgaccaatacctgtattacctgaacagaactcaaaatcagtccggaagtgcccaaaacaaggacttgctgtttagccgtgggtctccagctggcatgtctgttcagcccaaaaactggctacctggaccctgttatcggcagcagcgcgtttctaaaacaaaaacagacaacaacaacagcaattttacctggactggtgcttcaaaatataacctcaatgggcgtgaatccatcatcaaccctggcactgctatggcctcacacaaagacgacgaagacaagttctttcccatgagcggtgtcatgatttttggaaaagagagcgccggagcttcaaatactgcattggacaatgtcatgatcacagatgaagaggaaattaaagccactaaccctgtggccaccgaaagatttgggaccgtggcagtcaatttccagagcagcagcacagaccccgcgaccggagatgtgcatgttatgggagccttacctggcatggtgtggcaagacagagacgtatacctgcagggtcccatttgggccaaaattcctcacacggatggacactttcacccgtctcctctcatgggcggctttggacttaagcacccgcctcctcaaatcctcatcaaaaacacgcctgttcctgcgaatcctccggcagagttttcggctacaaagtttgcttcattcatcacccagtactccacaggacaagtgagtgtggaaattgaatgggagctgcagaaagaaaacagcaagcgctggaatcccgaagtgcagtacacatccaattatgcaaaatctgccaacgttgatttcactgtggacaacaatggactttatactgagcctcgccccattggcacccgttaccttacccgtcccttg

SEQ ID NO: 683 - DNA, 2196 bp, Artificial Sequence
  Description of Artificial Sequence: Synthetic polynucleotide
atggctgccgatggttatcttccagattggctcgaggacaacctctctgagggcattcgcgagtggtgggacttgaaacctggagccccgaaacctaaagccaaccagcaaaagcaggacgacggccggggtctggtgcttcctggctacaagtacctcggacccttcaacggactcgacaagggggagcccgtcaacgcggcggacgcagcggccctcgagcacgacaaggcctacgaccagcagctcaaagcgggtgacaatccgtacctgcggtataaccacgccgacgccgagtttcaggagcgtctgcaagaagatacgtcttttgggggcaacctcgggcgagcagtcttccaggccaagaagcgggttctcgaaccttttggtctggttgaggaaggcgctaagacggctcctggaaagaaacgtccggtagagcagtcgccacaagagccagactcctcctcgggcatcggcaagacaggccagcagcccgctaaaaagagactcaattttggtcagactggcgactcagagtcagtccccgacccacaacctctcggagaacctccagcaacccccgctgctgtgggacctactacaatggcttcaggcggtggcgcaccaatggcagacaataacgaaggcgccgacggagtgggtaatgcctcaggaaattggcattgcgattccacatggctgggcgacagagtcatcaccaccagcacccgcacctgggccttgcccacctacaataaccacctctacaagcaaatctccagtgcttcaacgggggccagcaacgacaaccactacttcggctacagcaccccctgggggtattttgatttcaacagattccactgccacttttcaccacgtgactggcagcgactcatcaacaacaattggggattccggcccaagagactcaacttcaagctcttcaacatccaagtcaaggaggtcacgacgaacgatggcgtcacgaccatcgctaataaccttaccagcacggttcaagccttctcggattcagagtaccaactgccgtacgtcctcggctctgcgcaccagggctgcctccctccgttcccggcggacgtgttcatgattccgcagtacggctacctaacgctcaacaatggcagccaggccgtgggacgttcatccttttactgcctggaatatttcccttctcagatgctgagaacgggcaacaactttaccttcagctacacctttgaggaagtgcctttccacagcagctacgcgcacagccagagcctggaccggctgatgaatcctctcatcgacccatacctgtattacctgaacagaactcaaaatcagtccggaagtgcccaaaacaaggacttgctgtttagccgtgggtctccagctggcatgtctgttcagcccaaaaactggctacctggaccctgttatcggcagcagcgcgtttctaaaacaaaaacagacaacaacaacagcaattttacctggactggtgcttcaaaatataacctcaatgggcgtgaatccatcatcaaccctggcactgctatggcctcacacaaagacgacgaagacaagttctttcccatgagcggtgtcatgatttttggaaaagagagcgccggagcttcaaatactgcattggacaatgtcatgatcacagatgaagaggaaattaaagccactaaccctgtggccaccgaaagatttgggaccgtggcagtcaatttccagagcagcagcacagaccccgcgaccggagatgtgcatgttatgggagccttacctggcatggtgtggcaagacagagacgtatacctgcagggtcccatttgggccaaaattcctcacacggatggacactttcacccgtctcctctcatgggcggctttggacttaagcacccgcctcctcaaatcctcatcaaaaacacgcctgttcctgcgaatcctccggcagagttttcggctacaaagtttgcttcattcatcacccagtactccacaggacaagtgagtgtggaaattgaatgggagctgcagaaagaaaacagcaagcgctggaatcccgaagtgcagtacacatccaattatgcaaaatctgccaacgttgatttcactgtggacaacaatggactttatactgagcctcgccccattggcacccgttacctt

SEQ ID NO: 684 - DNA, 2208 bp, Artificial Sequence
  Description of Artificial Sequence: Synthetic polynucleotide
atggctgccgatggttatcttccagattggctcgaggacaacctctctgagggcattcgcgagtggtgggacttgaaacctggagccccgaaacctaaagccaaccagcaaaagcaggacgacggccggggtctggtgcttcctggctacaagtacctcggacccttcaacggactcgacaagggggagcccgtcaacgcggcggacgcagcggccctcgagcacgacaaggcctacgaccagcagctcaaagcgggtgacaatccgtacctgcggtataaccacgccgacgccgagtttcaggagcgtctgcaagaagatacgtcttttgggggcaacctcgggcgagcagtcttccaggccaagaagcgggttctcgaaccttttggtctggttgaggaaggcgctaagacggctcctggaaagaaacgtccggtagagcagtcgccacaagagccagactcctcctcgggcatcggcaagacaggccagcagcccgctaaaaagagactcaattttggtcagactggcgactcagagtcagtccccgacccacaacctctcggagaacctccagcaacccccgctgctgtgggacctactacaatggcttcaggcggtggcgcaccaatggcagacaataacgaaggcgccgacggagtgggtaatgcctcaggaaattggcattgcgattccacatggctgggcgacagagtcatcaccaccagcacccgcacctgggccttgcccacctacaataaccacctctacaagcaaatctccagtgcttcaacgggggccagcaacgacaaccactacttcggctacagcaccccctgggggtattttgatttcaacagattccactgccacttttcaccacgtgactggcagcgactcatcaacaacaattggggattccggcccaagagactcaacttcaagctcttcaacatccaagtcaaggaggtcacgacgaacgatggcgtcacgaccatcgctaataaccttaccagcacggttcaagtcttctcggattcagagtaccaactgccgtacgtcctcggctctgcgcaccagggctgcctccctccgttcccggcggacgtgttcatgattccgcagtacggctacctaacgctcaacaatggcagccaggccgtgggacgttcatccttttactgcctggaatatttcccttctcagatgctgagaacgggcaacaactttaccttcagctacacctttgaggaagtgcctttccacagcagctacgcgcacagccagagcctggaccggctgatgaatcctctcatcgaccaatacctgtattacctgaacagaactcaaaatcagtccggaagtgcccaaaacaaggacttgctgtttagccgtgggtctccagctggcatgtctgttcagcccaaaaactggctacctggaccctgttatcggcagcagcgcgtttctaaaacaaaaacagacaacaacaacagcaattttacctggactggtgcttcaaaatataacctcaatgggcgtgaatccatcatcaaccctggcactgctatggcctcacacaaagacgacgaagacaagttctttcccatgagcggtgtcatgatttttggaaaagagagcgccggagcttcaaatactgcattggacaatgtcatgatcacagatgaagaggaaattaaagccactaaccctgtggccaccgaaagatttgggaccgtggcagtcaatttccagagcagcagcacagaccccgcgaccggagatgtgcatgttatgggagccttacctggcatggtgtggcaagacagagacgtatacctgcagggtcccatttgggccaaaattcctcacacggatggacactctcacccgtctcctctcatgggcggctttggacttaagcacccgcctcctcaaatcctcatcaaaaacacgcctgttcctgcgaatcctccggcagagttttcggctacaaagtttgcttcattcatcacccagtactccacaggacaagtgagtgtggaaattgaatgggagctgcagaaagaaaacagcaagcgctggaatcccgaagtgcagtacacatccaattatgcaaaatctgccaacgttgatttcactgtggacaacaatggactttatactgagcctcgccccattggcacccgttaccttacccgtcccttg

SEQ ID NO: 685 - DNA, 2208 bp, Artificial Sequence
  Description of Artificial Sequence: Synthetic polynucleotide
atggctgccgatggttatcttccagattggctcgaggacaacctctctgagggcattcgcgagtggtgggacttgaaacctggagccccgaaacctaaagccaaccagcaaaagcaggacgacggccggggtctggtgcttcctggctacaagtacctcggacccttcaacggactcgacaagggggagcccgtcaacgcggcggacgcagcggccctcgagcacgacaaggcctacgaccagcagctcaaagcgggtgacaatccgtacctgcggtataaccacgccgacgccgagtttcaggagcgtctgcaagaagatacgtcttttgggggcaacctcgggcgagcagtcttccaggccaagaagcgggttctcgaaccttttggtctggttgaggaaggcgctaagacggctcctggaaagaaacgtccggtagagcagtcgccacaagagccagactcctcctcgggcatcggcaagacaggccagcagcccgctaaaaagagactcaattttggtcagactggcgactcagagtcagtccccgacccacaacctctcggagaacctccagcaacccccgctgctgtgggacctactacaatggcttcaggcggtggcgcaccaatggcagacaataacgaaggcgccgacggagtgggtaatgcctcaggaaattggcattgcgattccacatggctgggcgacagagtcatcaccaccagcacccgcacctgggccttgcccacctacaataaccacctctacaagcaaatctccagtgcttcaacgggggccagcaacgacaaccactacttcggctacagcaccccctgggggtattttgatttcaacagattccactgccacttttcaccacgtgactggcagcgactcatcaacaacaattggggattccggcccaagagactcaacttcaagctcttcaacatccaagtcaaggaggtcacgacgaacgatggcgtcacgaccatcgctaataaccttaccagcacggttcaagtcttctcggattcagagtaccaactgccgtacgtcctcggctctgcgcaccagggctgcctccctccgttcccggcggacgtgttcatgattccgcagtacggctacctaacgctcaacaatggcagccaggccgtgggacgttcatccttttactgcctggaatatttcccttctcagatgctgagaacgggcaacaactttaccttcagctacacctttgaggaagtgcctttccacagcagctacgcgcacagccagagcctggaccggctgatgaatcctctcatcgacctatacctgtattacctgaacagaactcaaaatcagtccggaagtgcccaaaacaaggacttgctgtttagccgtgggtctccagctggcatgtctgttcagcccaaaaactggctacctggaccctgttatcggcagcagcgcgtttctaaaacaaaaacagacaacaacaacagcaattttacctggactggtgcttcaaaatataacctcaatgggcgtgaatccatcatcaaccctggcactgctatggcctcacacaaagacgacgaagacaagttctttcccatgagcggtgtcatgatttttggaaaagagagcgccggaacttcaaatactgcattggacaatgtcatgatcacagatgaagaggaaattaaagccactaaccctgtggccaccgaaagatttgggaccgtggcagtcaatttccagagcagcagcacagaccccgcgaccggagatgtgcatgttatgggagccttacctggcatggtgtggcaagacagagacgtatacctgcagggtcccatttgggccaaaattcctcacacggatggacactttcacccgtctcctctcatgggcggctttggacttaagcacccgcctcctcaaatcctcatcaaaaacacgcctgttcctgcgaatcctccggcagagttttcggctacaaagtttgcttcattcatcacccagtactccacaggacaagtgagtgtggaaattgaatgggagctgcagaaagaaaacagcaagcgctggaatcccgaagtgcagtacacatccaattatgcaaaatctgccaacgttgatttcactgtggacaacaatggactttatactgagcctcgccccattggcacccgttaccttacccgtcccttg

SEQ ID NO: 686 - DNA, 2208 bp, Artificial Sequence
  Description of Artificial Sequence: Synthetic polynucleotide
atggctgccgatggttatcttccagattggctcgaggacagcctctctgagggcattcgcgagtggtgggacttgaaacctggagccccgaaacctaaagccaaccagcaaaagcaggacgacggccggggtctggtgcttcctggctacaagtacctcggacccttcaacggactcgacaagggggagcccgtcaacgcggcggacgcagcggccctcgagcacgacaaggcctacgaccagcagctcaaagcgggtgacaatccgtacctgcggtataaccacgccgacgccgagtttcaggagcgtctgcaagaagatacgtcttttgggggcaacctcgggcgagcagtcttccaggccaagaagcgggttctcgaaccttttggtctggttgaggaaggcgctaagacggctcctggaaagaaacgtccggtagagcagtcgccacaagagccagactcctcctcgggcatcggcaagacaggccagcagcccgctaaaaagagactcaattttggtcagactggcgactcagagtcagtccccgacccacaacctctcggagaacctccagcaacccccgctgctgtgggacctactacgatggcttcaggcggtggcgcaccaatggcagacaataacgaaggcgccgacggagtgggtaatgcctcaggaaattggcattgcgattccacatggctgggcgacagagtcatcaccaccagcacccgcacctgggccttgcccacctacaataaccacctctacaagcaaatctccagtgcttcaacgggggccagcaacgacaaccactacttcggctacagcaccccctgggggtattttgatttcaacagattccactgccacttttcaccacgtgactggcagcgactcatcaacaacaattggggattccggcccaagagactcaacttcaagctcttcaacatccaagtcaaggaggtcacgacgaacgatggcgtcacgaccatcgctaataaccttaccagcacggttcaagtcttctcggattcagagtaccaactgccgtacgtcctcggctctgcgcaccagggctgcctccctccgttcccggcggacgtgttcatgattccgcagtacggctacctaacgcccaacaatggcagccaggccgtgggacgttcatccttttactgcctggaatatttcccttctcagatgctgagaacgggcaacaactttaccttcagctacacctttgaggaagtgcctttccacagcagctacgcgcacagccagagcctggaccggctgatgaatcctctcatcgaccaataccagtattacctgaacagaactcaaaatcagtccggaagtgcccaaaacaaggacttgctgtttagccgtgggtctccagctggcatgtctgttcagcccaaaaactggctacctggaccctgttatcggcagcagcgcgtttctaaaacaaaaacagacaacaacaacagcaattttacctggactggtgcttcaaaatataacctcaatgggcgtgaatccatcatcaaccctggcactgctatggcctcacacaaagacgacgaagacaagttctttcccatgagcggtgtcatgatttttggaaaagagagcgccggagcttcaaatactgcattggacaatgtcatgatcacagatgaagaggaaattaaagccactaaccctgtggccaccgaaagatttgggaccgtggcagtcaatttccagagcagcagcacagaccccgcgaccggagatgtgcatgttatgggagccttacctggcatggtgtggcaagacagagacgtatacctgcagggtcccatttgggccaaaattcctcacacggatggacactttcacccgtctcctctcatgggcggctttggacttaagcacccgcctcctcaaatcctcatcaaaaacacgcctgttcctgcgaatcctccggcagagttttcggctacaaagtttgcttcattcatcacccagtactccacaggacaagtgagtgtggaaattgaatgggagctgcagaaagaaaacagcaagcgctggaatcccgaagtgcagtacacatccaattatgcaaaatctgccaacgttgatttcactgtggacaacaatggactttatactgagcctcgccccattggcacccgttaccttacccgtcccttg

SEQ ID NO: 687 - DNA, 2208 bp, Artificial Sequence; identical to SEQ ID NO: 678
  Description of Artificial Sequence: Synthetic polynucleotide

SEQ ID NO: 688 - DNA, 2205 bp, Artificial Sequence
  Description of Artificial Sequence: Synthetic polynucleotide
atggctgccgatggttatcttccagattggctcgaggacactctctctgaaggaataagacagtggtggaagctcaaacctggcccaccaccaccaaagcccgcagagcggcataaggacgacagcaggggtcttgtgcttcctgggtacaagtacctcggacccttcaacggactcgacaagggagagccggtcaacgaggcagacgccgcggccctcgagcacgacaaagcctacgaccggcagctcgacagcggagacaacccgtacctcaagtacaaccacgccgacgcggagtttcaggagcgccttaaagaagatacgtcttttgggggcaacctcggacgagcagtcttccaggcgaaaaagagggttcttgaacctctgggcctggttgaggaacctgttaagacggctccgggaaaaaagaggccggtagagcactctcctgtggagccagactcctcctcgggaaccggaaaggcgggccagcagcctgcaagaaaaagattgaattttggtcagactggagacgcagactcagtacctgacccccagcctctcggacagccaccagcagccccctctggtctgggaactaatacgatggctacaggcagtggcgcaccaatggcagacaataacgagggcgccgacggagtgggtaattcctcgggaaattggcattgcgattccacatggatgggcgacagagtcatcaccaccagcacccgaacctgggccctgcccacctacaacaaccacctctacaaacaaatttccagccaatcaggagcctcgaacgacaatcactactttggctacagcaccccttgggggtattttgacttcaacagattccactgccacttttcaccacgtgactggcaaagactcatcaacaacaactggggattccgacccaagagactcaacttcaagctctttaacattcaagtcaaagaggtcacgcagaatgacggtacgacgacgattgccaataaccttaccagcacggttcaggtgtttactgactcggagtaccagctcccgtacgtcctcggctcggcgcatcaaggatgcctcccgccgttcccagcagacgtcttcatggtgccacagtatggatacctcaccctgaacaacgggagtcaggcagtaggacgctcttcattttactgcctggagtactttccttctcagatgctgcgtaccggaaacaactttaccttcagctacacttttgaggacgttcctttccacagcagctacgctcacagccagagtctggaccgtctcatgaatcctctcatcgaccagtacctgtattacttgagcagaacaaacactccaagtggaaccaccacgcagtcaaggcttcagttttctcgggccggagcgagtgacattcgggaccagtctaggaactggcttcctggaccctgttaccgccagcagcgagtatcaaagacatctgcggataacaacaacagtgaatactcgtggactggagctaccaagtaccacctcaatggcagagactctctggtgaatccgggcccggccatggcaagccacaaggacgatgaagaaaagttttttcctcagagcggggttctcatctttgggaagcaaggctcagagaaaacaaatgtggacattgaaaaggtcatgattacagacgaagaggaaatcaggacaaccaatcccgtggctacggagcagtatggttctgtatctaccaacctccagagaggcaacagacaagcagctaccgcagatgtcaacacacaaggcgttcttccaggcatggtctggcaggacagagatgtgtaccttcaggggcccatctgggcaaagattccacacacggacggacattttcacccctctcccctcatgggtggattcggacttaaacaccctcctccacagattctcatcaagaacaccccggtacctgcgaatccttcgaccaccttcagtgcggcaaagtttgcttccttcatcacacagtactccacgggacaggtcagcgtggagatcgagtgggagctgcagaaggaaaacagcaaacgctggaatcccgaaattcagtacacttccaactacaacaagtctgttaatgtggactttactgtggacactaatggcgtgtattcagagcctcgccccattggcaccagatacctgactcgtaatctg

SEQ ID NO: 689 - protein, 736 aa, Artificial Sequence
  Description of Artificial Sequence: Synthetic polypeptide
MAADGYLPDWLEDNLSEGIREWWALKPGAPQPKANQQHQDNARGLVLPDYKYLGPGNGLDKGEPVNAADVAALEHDKAYDQQLKAGDNPYLKYNHADAEFQERLKEDTSFGGNLGRAVFQAKKRLLEPLGLVEEAAKTAPGKKRPVEQSPQEPDSSAGIGKSGAQPAKKRLNFGQTGDTESVPDPQPIGEPPAAPSGVGSLTMASGGGAPVADNNEGADGVGSSSGNWHCDSQWLGDGVITTSTRTWALPTYNNHLYKQISNSTSGGSSNDNAYFGYSTPWGYFDFNRFHCHFSPRDWQRLINNNWGFRPKRLNFKLFNIQVKEVTDNNGVKTIANNLTSTVQVFTDSDYQLPYVLGSAHEGCLPPFPADVFMIPQYGYLTLNDGSQAVGRSSFYCLEYFPSQMLRTGNNFQFSYEFENVPFHSSYAHSQSLDRLMNPLIDQYLHYLPKTINGSGQNQQTLKFSVAGPSNMAVQGRNYIPGPSYRQQRVSTTVTQNNNSEFAWPGASSWALNGRNSLMNPGPAMASYKEGEDSFFPLSGSLIFGKQGTGRDNVDADKVMITNEEEIKTTNPVATESYGQVATNHQSAQAQAQTGWVQNQGILPGMVWQDRDVYLQGPIWAKIPHTDGNFHPSPLMGGFGMKHPPPQTLIKNTPVPADPPTAFNKDKLNSFITQYSTGQVSVEIEWELQKENSKRWNPEIQYTSNYYKSNNVEFAVNTEGVYSEPRPIGTRYLTRNL

SEQ ID NO: 690 - protein, 736 aa, Artificial Sequence
  Description of Artificial Sequence: Synthetic polypeptide
MAADGYLPDWLEDNLSEGIREWWALKPGAPQPKANQQHQDNARGLVLPGYKYLGPGNGLDKGEPVNAADAAALEHDKAYDQQLKAGDNPYLKYNHADAEFQERLKEDTSFGGNLGRAVFQAKRRLLEPLGLVEEAAKTAPGKKRPVEQSPQEPDSSAGIGKSGAQPAKKRLNFGQTGDTESVPDPQPIGEPPAAPSGVGSLTMASGGGAPVADNNEGADGVGSSSGNWHCDSQWLGDRVITTSTRTWALPTYNNHLYKQISNSTSGGSSNDNAYFGYSTPWGYFDFNRFHCHFSPRDWQRLINNNWGFRPKRLNFKLFNIQIKEVTDNNGVKTIANNLTSTVQVFTDLDYQLPYVLGSAHEGCLPPFPADVFMIPQYGYLTLNDGSQAVGRSSFYCLEYFPSQMLRTGNNFQFSYEFENVPFHSSYAHSQSLDRLMNPLIDQYLHYLSKTINGSGQNQQTLKFSVAGPSNMAVQGRNYIPGPSYRQQRVSTTVTQNNNSEFAWPGASSWALNGRNSLMNPGPAMASYKEGEDSFFPLSGSLIFGKQGTGRDNVDADKVMITNEEEIKTTNPVATESYGQVATNHQSAQAQAQTGWVQNQGILPGMVWQDRDVYLQGPIWAKIPHTDGNFHPSPLMGGFGMKHPPPQTLIKNTPVPADPPTAFNKDKLNSFITQYSTGQVSVEIEWELQKENSKRWNPEIQYTSNYYKSNNVEFAVNTEGVYSEPRPIGTRYLTRNL

SEQ ID NO: 691 - protein, 736 aa, Artificial Sequence
  Description of Artificial Sequence: Synthetic polypeptide
MAADGYLPDWLEDNLSEGIREWWALKPGAPQPKANQQHQDNARGLVLPGYKYLGPGNGLDKGEPVSAADAAALEHDKAYDQQLKAGDNPYLKYNHADAEFQERLKEDTSFGGNLGRAVFQAKKRLLEPLGLVEEAAKTAPGKKRPVEQSPQEPDSSAGIGKSGAQPAKKRLNFGQTGDTESVSDPQPIGEPPAAPSGVGSLTMASGGGAPVADNNEGADGVGSSSGNWHCDSQWLGDRVITTSTRTWALPTYNNHLYKQISNSTSGGSSNDNAYFGYSTPWGYFDFNRFHCHFSPRDWQRLINNNWGFRPKRLNFKLFNIQVKEVTDNNGVKTIANNLTSTVQVFTDSDYQLPYVLGSAHEGCLPPSPADVFMIPQYGYLTLNDGSQAVGRSSFYCLEYFPSQMLRTGNNFQFSYEFENVPFHSSYAHSQSLDRLMNPLIDQYLHYLSKTINGSGQNQQTLKFSVAGPSNMAVQGRNYIPGPSYRQQRVSTTVTQNNNSEFAWPGASSWALNGRNSLMNPGPAMASYKEGEDSFFPLSGSLIFGKQGTGRDDVDADKVIITNEEEIKTTNPVATESYGQVATNHQSAQAQAQTGWVQNQGILPGMVWQDRDVYLQGPIWAKIPHTDGNFHPSPLMGGFGMKHPPPQTLIKNTPVPADPPTAFNKDKLNSFITQYSTGQVSVEIEWELQKENSKRWNPEIQYTSNYYKSNNVEFAVNTEGVYSEPRPIGTRYLTRNL

SEQ ID NO: 692 - protein, 736 aa, Artificial Sequence
  Description of Artificial Sequence: Synthetic polypeptide
MAADGYLPDWLEDNLSEGIREWWALKPGAPQPKANQQHQDNARGLVLPGYKYLGPGNGLDKGEPVNAADAAALEHDKAYDQQLKAGDNPYLKYNHAGAEFQERLKEDTSFGGNLGRAVFQAKKRLLEPLGLVEEAAKTAPGKKRPVEQSPQEPDSSAGIGKSGAQPAKKRLNFGQTGDTESVPDPQPIGEPPAAPSGVGSLTMASGGGAPVADNNEGAGGVGSSSGNWHCDSQWLGDRVVTTSTRTWALPTYNNHLYKQISNSTSGGSSNDNAYFGYSTPWGYFDFNRFHCHFSPRDWQRLINNNWGFRPKRLNFKLFNIQVKEVTDNNGVKTIANNLTSTVQVFTDSDYQLPYVLGSAHGGCLPPFPADVFMIPQYGYLTLNDGSQAVGRSSFYCLEYFPSQMLRTGNNFQFSYEFENVPFHSSYAHSQSLDRLMNPLIDQYLHYLSKTINGSGQNQQTLKFSVAGPSNMAVQGRSYIPGPSYRQQRVSTTVTQNNNSEFAWPGASSWALNGRNSLMNPGPAMASYKEGEDSFFPLSGSLIFGKQGTGRDNVDADKVMITNEEEIKTTNPVATESYGQVATNHQSAQAQAQTGWVQNQGILPGMVWQDRDVYLQGPIWAKIPHTDGNFHPSPLMGGFGMKHPPPQTLIKNTPVPADPPTAFNKDKLNSFITQYSTGQVSVEIEWELQKENSKRWNPEIQYTSNYYKSNNVEFAVNTEGVYSEPRPIGTRYLTRNL

SEQ ID NO: 693 - protein, 736 aa, Artificial Sequence
  Description of Artificial Sequence: Synthetic polypeptide
MAADGYLPDWLEDNLSEGIREWWALKPGAPQPKANQQHQDNARGLVLPGYKYLGPGNGLDKGEPVNAADAAALEHDKAYDQQLKAGDNPYLKYNHADAEFQERLKEDTSFGGNLGRAVFQAKKRLLEPLGLVEEAAKTAPGKKRPVEQSPQEPDSSAGIGKSGAQPAKKRLNFGQTGDTESVPDPQPIGEPPAAPSGVGSLTMASGGGAPVADNNEGADGVGSSSGNWHCDSQWLGDRVVTTSTRTWALPTYNNHLYKQISNSTSGGSSNDNAYFGYSTPWGYFDFNRFHCHFSPRDWQRLINNNWGFRPKRLNFKLFNIQVKEVTDNNGVKTIANNLTSTVQVFTDSDYQLPYVLGSAHEGCLPPFPADVFMIPQYGYLTLNDGSQAVGRSSFYCLEYFPSQMLRTGNNFQFSYEFENVPFHSSHAHSQSLDRLMNPLIDQYLHYLSKTINGSGQNQQTLKFSVAGHSNMAVQGRNYIPGPSYRQQRVSTTVTQNNNSEFAWPGASSWALNGRNSLMNPGPAMASYKEGEDSFFPLSGSLIFGKQGTGRDNVDADKVMITNEEEIKTTNPVATESYGQVATNHQSAQAQAQTGWVQNQGILPGMVWQDRDVYLQGPIWAKIPHTDGNFHPSPLMGGFGMKHPPPQTLIKNTPVPADPPTAFNKDKLNSFITQYSTGQVSVEIGWELQKENSKRWNPEIQYTSNYYKSNNVEFAVNTEGVYSEPRPIGTRYLTRNL

SEQ ID NO: 694 - protein, 736 aa, Artificial Sequence
  Description of Artificial Sequence: Synthetic polypeptide
MAADGYLPDWLEDNLSEGIREWWALKPGAPQPKANQQHQDNARGLVLPGYKYLGPGNGLDKGEPVNAADAAALEHDKAYDQQLKAGDNPYLKYNHADAEFQERLKEDTSFGGNLGRAVFQAKKRLLEPLGLVEEAAKTAPGKKRPVEQSPQEPDSSAGIGKSGAQPAKKRLNFGQTGDTESVPDPQPIGEPPAAPSGVGSLTMASGGGAPVADNNEGADGVGSSSGNWHCDSQWLGDRVITTSTRTWALPTYNNRLYKQISNSTSGGSSNDNAYFGYSTPWGYFDFNRFHCHFSPRDWQRLINNNWGFRPKRLNFKPFNIQVKEVTDNNGVKTIANNLTSTVQVFTDSDYQLPYVLGSAHEGCLPPFPADVFMIPQYGYLTLNDGSQAVGRSSFYCLEYFPSQMLRTGNNFQFSYEFENVPFHSSYAHSQSLDRLMNPLIDQYLHYLSKTINGSGQNQQTLKFSVAGPSNMAVQGRNYIPGPSYRQQRVSTTVTQNNNSEFAWPGASSWALNGRNSLMNPGPAMASYKEGEDSFFPLSGSLIFGKQGTGRDNVDADKVMITNEEEIKTTNPVATESYGQVATNHQSAQAQAQTGWVQNQGILPGMVWQDRDVYLQGPIWAKIPHTDGNFHPSPLMGGFGMKHPPPQTLIKNTPVPADPPTAFNKDKLNSFITQYSTGQVSVEIEWELQKENSKRWNPEIQYTSNYYKSNNVEFAVNTEGVYSEPRPIGTRYLTRNL

SEQ ID NO: 695 - protein, 736 aa, Artificial Sequence
  Description of Artificial Sequence: Synthetic polypeptide
MAADGYLPDWLEDNLSEGIREWWALKPGAPQPKANQQHQDNARGLVLPGYKYLGPGNGLDKGEPVNAADAAALEHDKAYDQQLKAGDNPYLKYNHADAEFQERLKEDTSFGGNLGRAVFQAKKRLLEPLGLVEEAAKTAPGKKRPVEQSPQEPDSSAGIGKSGAQPAKKRLNFGQTGDTESVPDPQPIGEPPAAPSGVGSLTMASGGGAPVADNNEGADGVGSSSGNWHCDSQWLGDRVITTSTRTWALPTYNNHLYKQISNSTSGGSSNDNAYFGYSTPWGYFDFNRFHCHFSPRDWQRLINNNWGFRPKRLNFKLFNIQVKEVTDNNGVKTIANNLTSTVQVFTDSDYQLPYVLGSAHEGCLPPFPADVFMIPQYGYLTLNDGSQAVGRSSFYCLEYFPSQMLRTGNNFQFSYEFENVPFHSSYAHSQSLDRLMNPLIDQYLHYLSKTINGSGQNQQTLKFSVAGPSNMAVQGRNYIPGPSYRQQRVSTTVTQNNNSEFAWPGASSWALNGRNSLMNPGPAMASYKEGEDSFFPLSGSLIFGKQGTGRDNVDADKVMITNEEEIKTTNPVATESYGQVATNHQSAQAQAQTGWVQNQGILPGMVWQDRDVYLQGPIWAKIPHTDGNFHPSPLMGGFGMKHPPPQTLIKNTPVPADPPTAFNKDKLNSFITQYSTGQVSVEIEWELQKENSKRWNPEIQYTSNYYKSNNVEFAVNTEGVYSEPRPIGTRYLTRNL

SEQ ID NO: 696 - protein, 736 aa, Artificial Sequence; identical to SEQ ID NO: 695
  Description of Artificial Sequence: Synthetic polypeptide

SEQ ID NO: 697 - protein, 736 aa, Artificial Sequence
  Description of Artificial Sequence: Synthetic polypeptide
MAADGYLPDWLEDNLSEGIREWWDLKPGAPKPKANQQKQDDGRGLVLPGYKYLGPFNGLDKGEPVNAADAAALEHDKAYDQQLKAGDNPYLRYNHADAEFQERLQEDTSFGGNLGRAVFQAKKRVLEPFGLVEEGAKTAPGKKRPVEQSPQEPDSSSGIGKSGQQPAKKRLNFGQTGDSESVPDPQPLGEPPATPAALGPTTMASGGGAPMADNNEGADGVGNASGNWHCDSTWLGDRVITTSTRTWALPTYNNHLYKQISSASTGASNDNHYFGYSTPWGYFDFNRFHCHFSPRDWQRLINNNWGFRPKRLNFKLFNIQVKEVTTNDGVTTIANNLTSTVQVFSDSEYQLPYVLGSAHQGCLPPFPADVFMIPQYGYLTLNNGSKAVGRSSFYCLEYFPSQMLRTGNNFTFSYTFEEVPFHSSYAHSQSLDRLMNPLIDQYLYYLNRTQNQSGSAQNKDLLFSRGSPAGMSVQPKNWLPGPCYRQQRVSKTKTDNNNSNFTWTGASKYNLNGRESIINPGTAMASHKDDEDKFFPMSGVMIFGKESAGASNTALDNVMITDEEEIKATNPVATERFGTVAVNFQSSSTDPATGDVHVMGALPGMVWQDRDVYLQGPIWAKIPHTDGHFHPSPLMGGFGLKHPPPQILIKNTPVPANPPAEFSATKFASFITQYSTGQVSVEIEWELQKENSKRWNPEVQYTSNYAKSANVDFTVDNNGLYTEPRPIGTRYLTRPL

SEQ ID NO: 698 - protein, 736 aa, Artificial Sequence
  Description of Artificial Sequence: Synthetic polypeptide
MAADGYLPDWLEDNLSEGIREWWDLKPGAPKPKANQQKQDDGRGLVLPGYKYLGPFNGLDKGEPVNAADAAALEHDKAYDQQLKAGDNPYLRYNHADAEFQERLQEDTSFGGNLGRAVFQAKKRVLEPLGLVEEGAKTAPGKKRPVEQSPQEPDSSSGIGKTGQQPAKKRLNFGQTGDSESVPDPQPLGEPPATPAAVGPTTMASGGGAPMADNNEGADGVGNASGNWHCDSTWLGDRVITTSTRTWALPTYNNHLYKQISSTSTGASNDNHYFGYSTPWGYFDFNRFHCHFSPRDWQRLINNNWGFRPKRLNFKLFNIQVKEVTTNDGVTTIANNLTSTVQVFSDSEYQLPYVLGSAHQGCLPPFPADVFMIPQYGYLTLNNGSQAVGRSSFYCLEYFPSQMLRTGNNFTFSYTFEEVPFHSSYAHSQSLDRLMNPLIDQYLYYLNRTQNQSGSAQNKDLLFSRGSPAGMSVQPKNWLPGPCYRQQRVSKTKTDNNNSNFTWTGASKYNLNGRESIINPGTAVASHKDDEDKFFPMSGVMIFGKESAGASNTALDNVMITDEEEIKATNPVATERFGTVAVNFQSSSTDPATGDVHAMGALPGMVWQDRDVYLQGPIWAKIPHTDGHFHPSPLMGGFGLKNPPPQILIKNTPVPANPPAEFSATKFASFITQYSTGQVSVEIEWELQKENSKRWNPEVQYTSNYAKSANVDFTVDNNGLYTEPRPIGTRYLTRPL

SEQ ID NO: 699 - protein, 736 aa, Artificial Sequence
  Description of Artificial Sequence: Synthetic polypeptide
MAADGYLPDWLEDNLSEGIREWWALKPGAPQPKANQQHQDNARGLVLPGYKYLGPGNGLDKGEPVNAADAAALEHDKAYDQQLKAGDNPYLKYNHADAEFQERLKEDTSFGGNLGRAVFQAKKRLLEPLGLVEEAAKTAPGKKRPVEQSPQEPDSSAGIGKSGAQPAKKRLNFGQTGDTESVPDPQPIGEPPAAPSGVGSLTMASGGGAPVADNNEGADGVGSSSGNWHCDSQWLGDRVITTSTRTWALPTYNNHLYKQISNSTSGGSSNDNAYFGYSTPWGYFDFNRFHCHFSPRDWQRLINNNWGFRPKRLNFKLFNIQVKEVTDNNGVKTIANNLTSTVQVFTDSDYQLPYVLGSAHEGCLPPFPADVFMIPQYGYLTLNDGSQAVGRSSFYCLEYFPSQMLRTGNNFQFGYEFENVPFHSSYAHSQSLDRLMNPLIDQYLYYLSKTINGSGQNQQTLKFSVAGPSNMAVQGRNYIPGPSYRQQRVSTTVTQNNNSEFAWPGASSWALNGRNSLMNPGPAMASHKEGEDRFFPLSGSLIFGKQGTGRDNVDADKVMITNEEEIKTTNPVATESYGQVATNHQSAQAQAQTGWVQNQGILPGMVWQDRDVYLQGPIWAKIPHTDGNFHPSPLMGGFGMKHPPPQILIKNTPVPADPPTAFNKDKLNSFITQYSTGQVSVEIEWELQKENSKRWDPEIQYTSNYYKSNNVEFAVNTEGVYSEPRPIGTRYLTRNL

SEQ ID NO: 700 - protein, 736 aa, Artificial Sequence
  Description of Artificial Sequence: Synthetic polypeptide
MAADGYLPDWLEDNLSEGIREWWALKPGAPQPKANQQHQDNARGLVLPGYKYLGPGNGLDKGEPVNAADAAALEHDKAYDQQLKAGDNPYLKYNHADAEFQERLKEDTSFGGNLGRAVFQAKKRLLEPLGLVEEAAKTAPGKKRPVEQSPQEPDSSAGIGKSGAQPAKKRLNFGQTGDTESVPDPQPIGEPPAAPSGVGSLTMASGGGAPVADNNEGADGVGSSSGNWHCDSQWLGDRVITTSTRTWALPTYNNHLYKQISNSTSGGSSNDNAYFGYSTPWGYFDFNRFHCRFSPRDWQRLINNNWGFRPKRLNFKLFNIQVKEVTDNNGVKTIANNLTSTVQVFTDSDYQLPYVLGSAHEGCLPPFPADVFMIPQYGYLTLNDGSQAVGRSSFYCLEYFPSQMLRTGNNFQFSYEFENVPFHSSYAHSQSLDRLMNPLIDQYLYYLSKTINGSGQNQQTLKFSVAGPSNMAVQGRNYIPGPSYRQQRVSTTVTQNNNSEFAWPGASSWALNGRNSLMNPGPAMASHKEGEDRFFPLSGSLIFGKQGTGRDNVDADKVMITNEEEIKTTNPVATESYGQVATNHQSAQAQAQTGWVQNQGILPGMVWQDRDVYLQGPIWAKIPHTDGNFHPSPLMGGFGMKHPPPQILIKNAPVPADPPTAFNKDKLNSFITQYSTGQVSVEIEWELQKENSKRWNPEIQYTSNYYKSNNVEFAVNTEGVYSEPRPIGTRYLTRNL

SEQ ID NO: 701 - protein, 736 aa, Artificial Sequence
  Description of Artificial Sequence: Synthetic polypeptide
MAADGYLPDWLEDNLSEGIREWWALKPGAPQPKANQQHQDNARGLVLPGYKYLGPGNGLDKGEPVSAADAAALEHDKAYDQQLKAGDNPYLKYNHADAEFQERLKEDTSFGGNLGRAVFQAKKRLLEPLGLVEEAAKTAPGKKRPVEQSPQEPDSSAGIGKSGAQPAKKRLNFGQTGDTESVPDPQPIGEPPAAPSGVGSLTMASGGGAPVADNNEGADGVGSSSGNWHCDSQWLGDRVITTSTRTWALPTYNNHLYKQISNSTSGGSSNDNAYFGYSTPWGYFDFNRFHCHFSPRDWQRLINNNWGFRPKRLNFKLFNIQVKEVTDNNGVKTIANNLTSTVQVFTDSDYQLPYVLGSAHEGCLPPFPADVFMIPQYGYLTLNDGSQAVGRSSFYCLEYFPSQMLRTGNNFQFSYEFENVPFHSSYAHSQSLDRLMNPLIDQYLYYLSKTINGSGQNQQTLKFSVAGPSNMAVQGRNYIPGPSYRQQRVSTTVTQNNNSEFAWPGASSWALNGRNSLMNPGPAMASHKEGEDRFFPLSGSLIFGKQGTGRDNVDADKVMITNEEEIKTTNPVATESYGQVATNHQSAQAQAQTGWVQNQGILPGMVWQDRDVYLQGPIWAKIPHTDGNFHPSPLMGGFGMKHPPPQILIKNTPVPADPPTAFNKDKLNSFITQYSTGQVSVEIEWELQKENSKRWNPEIQYTSNYYKSNNVEFAVNTEGVYSEPRPIGTRYLTRNL

SEQ ID NO: 702 - protein, 736 aa, Artificial Sequence
  Description of Artificial Sequence: Synthetic polypeptide
MAADGYLPDWLEDNLSEGIREWWALKPGAPQPKANQQHQDNARGLVLPGYKYLGPGNGLDKGEPVNAADAAALEHDKAYDQQLKAGDNPYLKYNHADAEFQERLKEDTSFGGNLGRAVFQAKKRLLEPLGLVEEAAKTAPGKKRPVEQSPQEPDSSAGIGKSGAQPAKKRLNFGQTGDTESVPDPQPIGEPPAAPSGVGSLTMASGGGAPVADNNEGADGVGSSSGNWHCDSQWLGDRVITTSTRTWALPTYNNHLYKQISNSTSGGSSNDNAYFGYSTPWGYFDFNRFHCHFSPRDWQRLINNNWGFRPKRLNFKLFNIQVKEVTDNNGVKTIANNLTSTVQVFTDSDYQLPYVLGSAHEGCLPPFPADVFMIPQYGYLTLNDGSQAVGRSSFYCLEYFPSQMLRTGNNFQFSYEFENVPFHSSYAHSQSLDRLMNPLIDQYLYYLSKTINGSGQNQQTLKFSVAGPSNTAVQGRNYIPGPSYRQQRVSTTVTQNNNSEFAWPGASSWALNGRNSLMNPGPAMASHKEGEDRFFPLSGSLIFGKQGTGRDNVDADKVMITNEEEIKTTNPVATESYGQVATNHQSAQAQAQTGWVQNQGILPGMVWQDRDVYLQGPIWAKIPHTDGNFHPSPLMGGFGMKHPPPQILIKNTPVPADPPTAFNKDKLNSFITQYSTGQVSVEIEWELQKENSKRWNPEIQYTSNYYKSNNVEFAVNTEGVYSEPRPIGTRYLTRNL

SEQ ID NO: 703 - protein, 736 aa, Artificial Sequence
  Description of Artificial Sequence: Synthetic polypeptide
MAADGYLPDWLEDNLSEGIREWWALKPGAPQPKANQQHQDNARGLVLPGYKYLGPGNGLDKGEPVNAADAAALEHDKAYDQQLKAGDNPYLKYNHADAEFQERLKEDTSFGGNLGRAVFQAKKRLLEPLGLVEEAAKTAPGKKRPVEQSPQEPDSSAGIGKSGAQPAKKRLNFGQTGDTESVPDPQPIGEPPAAPSGVGSLTMASGGGAPVADNNEGADGVGSSSGNWHCDSQWLGDRVITTSTRTWALPTYNNHLYKQISNSTSGGSSNDNAYFGYSTPWGYFDFNRFHCHFSPRDWQRLINNNWGFRPKRLNFKLFNIQVKEVTDNNGVKTIANNLTSTVQVFTDSDYQLPYVLGSAHEGCLPPFPADVFMIPQYGYLTLNDGSQAVGRSSFYCLEYFPSQMLRTGSNFQFSYEFENVPFHSSYAHSQSLDRLMNPLIDQYLYYLSKTINGSGQNQQTLKFSVAGPSNMAVQGRNYIPGPSYRQQRVSTTVTQNNNSEFAWPGASSWALNGRNSLMNPGPAMASHKEGEDRFFPLSGSLIFGKQGTGRDNVDADKVMITNEEEIKTTNPAATESYGQVATNHQSAQAQAQTGWVQNQGILPGMVWQDRDVYLQGPIWAKIPHTDGNFHPSPLMGGFGMKHPPPQILIKNTPVPADPPTAFNKDKLNSFITQYSTGQVSVEIEWELQKENSKRWNPEIQHTSNYYKSNNVEFAVNTEGVYSEPRPIGTRYLTRNL

SEQ ID NO: 704 - protein, 736 aa, Artificial Sequence
  Description of Artificial Sequence: Synthetic polypeptide
MAADGYLPDWLEDNLSEGIREWWALKPGAPQPKANQQHQDNARGLVLPGYKYLGPGNGLDKGEPVNAADAAALEHDKAYDQQLKAGDNPYLKYNHADAEFQERLKEDTSFGGNLGRAVFQAKKRLLEPLGLVEEAAKTAPGKKRPVEQSPQEPDSSAGIGKSGAQPAKKRLNFGQTGDTESVPDPQPIGEPPAAPSGVGSLTMASGGGAPVADNNEGADGVGSSSGNWHCDSQWLGDRVITTSTRTWALPTYNNHLYKQISNSTSGGSSNDNAYFGYSTPWGYFDFNRFHCHFSPRDWQRLINNNWGFRPKRLNFRLFNIQVKEVTDNNGVKTIANNLTSTVQVFTDSDYQLPYVLGSAHEGCLPPFPADVFMIPQYGYLTLNDGSQAVGRSSFYCLEYFPSQMLRTGNNFQFSYEFENVPFHSSYAHSQSLDRLMNPLIDQYLYYLSKTINGSGQNQQTLKFSVAGPSNMAVQGRNYIPGPSYRQQRVSTTVTQNNNSEFAWPGASSWALNGRNSLMNPGPAMASHKEGEDRFFPLSGSLIFGKQGTGRDNVDADKVMITNEEEIKTTNPVATESYGQVATNHQSAQAQAQTGWVQSQGILPGMVWQDRDVYLQGPIWAKIPHTDGNFHPSPLMGGFGMKHPPPQILIKNTPVPADPPTAFNKDKLNSFITQYSTGQVSVEIEWELQKENSKRWNPEIQYTSNYYKSNNVEFAVNTEGVYSEPRPIGTRYLTRNL

SEQ ID NO: 705 - protein, 735 aa, Artificial Sequence
  Description of Artificial Sequence: Synthetic polypeptide
MAADGYLPDWLEDNLSEGIREWWALKPGAPQPKANQQHQDNARGLVLPGYKYLGPGNGLDKGEPVNAADAAALEHDKAYDQQLKAGDNPYLKYNHADAEFQERLKEDTSFGGNLGRAVFQAKKRLLEPLGLVEEAAKTAPGKKRPVEQSPQEPDSSAGIGKSGAQPAKKRLNFGQTGDTESVPDPQPIGEPPAAPSGVGSLTMASGGGAPVADNNEGADGVGSSSGNWHCDSQWLGDRVITTSTRTWALPTYNNHLYKQISNSTSGGSSNDNAYFGYSTPWRYFDFNRFHCHFSPRDWQRLINNWGFRPKRLNFKLFNIQVKEVTDNNGVKTIANNLTSTVQAFTDSDYQLPYVLGSAHEGCLPPFPADVFMIPQYGYLTLNDGSQAVGRSSFYCLEYFPSQMLRTGNNFQFSYEFENVPFHSSYAHSQSLDRLMNPLIDQYLYYLSKTINGSGQNQQTLKFSVAGPSNMAVQGRNYIPGPSYRQQRVSTTVTQNNNSEFAWPGASSWALNGRNSLMNPGPAMASHKEGEDRFFPLSGSLIFGKQGTGRDNVDADKVMITNEEEIKTTNPVATESYGQVATNHQSAQAQAQTGWVQNQGILPGMVWQDRDVYLQGPIWAKIPHTDGNFHPSPLMGGFGMKHPPPQILIKNTPVPADPPTAFNKDELNSFITQYSTGQVSVEIEWELQKENSKRWNPEIQYTSNYYKSNNVEFAVNTEGVYSEPRPIGTRYLTRNL

SEQ ID NO: 706 - protein, 735 aa, Artificial Sequence
  Description of Artificial Sequence: Synthetic polypeptide
MAADGYLPDWLEDNLSEGIREWWALKPGAPQPKANQQHQDNARGLVLPGYKYLGPGNGLDKGEPVNAADAAALEHDKAYDQQLKAGDNPYLKYNHADAEFQERLKEDTSFGGNLGRAVFQDKKRLLEPLGLVEEAAKTAPGKKRPVEQSPQEPDSSAGIGKSGAQPAKKRLNFGQTGDTESVPDPQPIGEPPAAPSGVGSLTMASGGGAPVADNNEGADGVGSSSGNWHCDSQWLGDRVITTSTRTWALPTYNNHLYKQISNSTSGGSSNDNAYFGYSTPWGYFDFNRFHCHFSPRDWQRLINNWGFRPKRLNFKLFNIQVKEVTDNNGVKTIANNLTSTVQVFTDSDYQLPYVLGSAHEGCLPPFPADVFMIPQYGYLTLNDGSQAVGRSSFYCLEYFPSQMLRTGNNFQFSYEFENVPFHSSYAHSQSLDRLMNPLIDQYLYYLSKTINGSGQNQQTLKFSVAGPSNMAVQGRNYIPGPSYRQQRVSTTVTQNNNSEFAWPGASSWALNGRNSLMNPGPAMASHKEGEDRFFPLSGSLIFGKQGTGRDNVDADKVMITNEEEIKTTNPVATESYGQVATNHQSAQAQAQTGWVQNQGILPGMVWQDRDVYLQGPIWAKIPHTDGNFHPSPLMGGFGMKHPPPQILIKNTPVPADPPTAFNKDKLNSFITQYSTGQVSVEIEWELQKENSKRWNPEIQYTSNYYKSNNVEFAVNTEGVYSEPRPIGTRYLTRNL

SEQ ID NO: 707 - protein, 736 aa, Artificial Sequence
  Description of Artificial Sequence: Synthetic polypeptide
MAADGYLPDWLEDNLSEGIREWWALKPGAPQPKANQQHQDNARGLVLPGYKYLGPGNGLDKGEPVNAADAAALEHDKAYDQQLKAGDNPYLKYNHADAEFQERLKEDTSFGGNLGRAVFQAKKRLLEPLGLVEEAAKTAPGKKRPVEQSPQEPDSSAGIGKSGAQPAKKRLNFGQTGDTESVPDPQPIGEPPAAPSGVGSLTMASGGGAPVADNNEGADGVGSSSGNWHCDSQWLGDRAITTSTRTWALPTYNNHLYKQISNSTSGGSSNDNAYFGYSTPWGYFDFNRFHCHFSPRDWQRLINNNWGFRPKRLNFKLFNIQVKEVTDNNGVKTIANNLTSTVQVFTDSDYQLPYVLGSAHEGCLPPFPADVFMIPQYGYLTLNDGSQAVGRSSFYCLEYFPSQMLRTGNNFQFSYEFENVPFHSSYAHSQSLDRLMNPLIDQYLYYLSKTINGSGQNQQTLKFSVAGPSNMAVQGRNYIPGPSYRQQRVSTTVTQNNNSEFAWPGASSWALNGRNSLMNPGPAMASHKEGEDRFFPLSGSLIFGKQGTGRDNVDADKVMTTNEEEIKTTNPVATESYGQVATNHQSAQAQAQTGWVQNQGILPGMVWQDRDVYLQGPIWAKIPHTDGNFHPSPLMGGFGMKHPPPQILIKNTPVPADPPTAFNKDKLNSFITQYSTGQVSVEIEWELQKENSKRWNPEIQYTSNYYKSNNVEFAVNTEGVYSEPRPIGTRYLTRNL

SEQ ID NO: 708 - protein, 736 aa, Artificial Sequence
  Description of Artificial Sequence: Synthetic polypeptide
MAADGYLPDWLEDNLSEGIREWWALKPGAPQPKANQQHQDNARGLVLPGYKYLGPGNGLDKGEPVNAADAAALEHDKAYDQQLKAGDNPYLKYNHADAEFQERLKEDTSFGGNLGRAVFQTKKRLLEPLGLVEEAAKTAPGKKRPVEQSPQEPGSSAGIGKSGAQPAKKRLNFGQTGDTESVPDPQPIGEPPAAPSGVGSLTMASGGGAPVADNNEGADGVGSSSGNWHCDSQWLGDRVITTSTRTWALPTYNNHLYKQISNSTSGGSSNDNAYFGYSTPWGYFDFNRFHCHFSPRDWQRLINNNWGFRPKRLNFKLFNIQVKEVTDNNGVKTIANNLTSTVQVFTDSDYQLPYVLGSAHEGCLPPFPADVFMIPQYGYLTLNDGSQAVGRSSFYCLEYFPSQMLRTGNNFQFSYEFENVPFHSSYAHSQSLDRLMNPLIDQYLHYLSKTINGSGQNQQTLKFSVAGPSNMAVQGRNYIPGPSYRQQRVSTTVTQNNNSEFAWPGASSWALNGRNSLMNPGPAMASHKEGEDRFFPLSGSLIFGKQGTGRDNVDADKVMITNEEEIKTTNPVATESYGQVATNHQSAQAQAQTGWVQNQGILPGMVWQDRDVYLQGPIWAKIPHTDGNFHPSPLMGGFGMKHPPPQILIKNTPVPADPPTAFNKDKLNSFITQYSTGQVSVEIEWELQKENSKRWNPEIQYTSNYYKSNNVEFAVNTEGVYSEPRPIGTRYLTRNL

SEQ ID NO: 709 - protein, 736 aa, Artificial Sequence
  Description of Artificial Sequence: Synthetic polypeptide
MAADGYFPDWLEDNLSEGIREWWALKPGAPQPKANQQHQDNARGLVLPGYKYLGPGNGLDKGEPVNAADAAALEHDKAYDQQLKAGDNPYLKYNHADAEFQERLKEDTSFGGNLGRAVFQAKKRLLEPLGLVEEAAKTAPGKKRPVEQSPQEPDSSAGIGKSGAQPAKKRLNFGQTGDTESVPDPQPIGESPAAPSGVGSLTMASGGGAPVADNNEGADGVGSSSGNWHCDSQWLGDRVITTSTRTWALPTYNNHLYKQISNSTSGGSSNDNAYFGYSTPWGYFDFNRFHCHFSPRDWQRLINNNWGFRPKRLNFKLFNIQVKEVTDNNGVKTIANNLTSTVQVFTDSDYQLPYVLGSAHEGCLPPFPADVFMIPQYGYLTLNDGSQAVGRSSFYCLEYLPSQMLRTGNNFQFSYEFENVPFHSSYAHSQSLDRLMNPLIDQYLHYLSKTINGSGQNQQTLKFSVAGPSNMAVQGRNYIPGPSYRQQRVSTTVTQNNNSEFAWPGASSWALNGRNSLMNPGPAVASHKEGEDRFFPLSGSLIFGKQGTGRDNVDADKVMITNEEEIKTTNPVATESYGQVATNHQSAQAQAQTGWVQNQGILPGMVWQDRDVYLQGPIWAKIPHTDGNFHPSPLMGGFGMKHPPPQILIKNTPVPADPPTAFNKDKLNSFITQYSTGQVSVEIEWELQKENSKRWNPEIQYTSNYYKSNNVEFAVNTEGVYSEPRPIGTRYLTRNL

SEQ ID NO: 710 - protein, 736 aa, Artificial Sequence
  Description of Artificial Sequence: Synthetic polypeptide
MAADGYLPDWLEDNLSEGIREWWALKPGAPQPKANQQHQDNARGLVLPGYKYLGPGNGLDKGEPVNAADAAALEHDKAYDQQLKAGDNPYLKYNHADAEFQERLKEDTSFGGNLGRAVFQAKKRLLEPLGPVEEAAKTAPGKKRPVEQSPQEPDSSAGIGKSGAQPAKKRLNFGQTGDTESVPDPQPIGEPPAAPSGVGSLTMASGGGAPVADNNEGADGVGSSSGNWHCDSQWLGDRVITTSTRTWALPTYNNHLYKQISNSTSGGSSNDNAYFGYSTPWGYFDFNRFHCHFSPRDWQRLINNNWGFRPKRLNFKLFNIQVKEVTDNNGVKTIANNLTSTVQVFTDSDYQLPYVLGSAHEGCLPPFPADVFMIPQYGYLTLNDGSQAVGRSSFYCLEYFPSQMLRTGNNFQFSYEFENVPFHSSYAHSQSLDRLMNPLIDQYLYYLSKTINGSGQNQQTLKFSVAGPSNMAVQGRNYIPGPSYRQQRVSTTVTQNNNSEFAWPGASSWALNGRNSLMNPGPAMASHKEGEDRFFPLSGSLIFGKQGTGRDNVDADKVMITNEEEIKTTNPVATESYGQAATNHQSAQAQAQTGWVQNQGILPGMVWQDRDVYLQGPIWAKIPHTDGNFHPSPLMGGFGMKHPPPQILIKNTPVPADPPTAFNKDKLNSFITQYSTGQVSVEIEWELQKENSKRWNPEIQYTSNYYKSNNVEFAVNTEGVYSEPRPIGTRYLTRNL

SEQ ID NO: 711 - protein, 736 aa, Artificial Sequence
  Description of Artificial Sequence: Synthetic polypeptide
MAADGYLPDWLEDNLSEGIREWWALKPGAPQPKANQQHQDNARGLVLPGYKYLGPGNGLDKGEPVNAADAAALEHDKAYDQQLKAGDNPYLKYNHADAEFQERLKEDTSFGGNLGRAVFQAKKRLLEPLGPVEEAAKTAPGKKRPVEQSPQEPDSSAGIGKSGAQPAKKRLNFGQTGDTESVPDPQPIGEPPAAPSGVGSLTMASGGGAPVADNNEGADGVGSSSGNWHCDSQWLGDRVITTSTRTWALPTYNNHLYKQISNSTSGGSSNDNAYFGYSTPWGYFDFNRFHCHFSPRDWRRLINNNWGFRPKRLNFKLFNIQVKEVTDNNGVKTIANNLTSTVQVFTDSDYQLPYVLGSAHEGCLPPFPADVFMIPQYGYLTLNDGSQAVGRSSFYCLEYFPSQMLRTGNNFQFSYEFENVPFHSSYAHSQSLDRLMNPLIDQYLYYLSKTINGSGQNQQTLKFSVAGPSNMAVQGRNYIPGPSYRQQRVSTTVTQNNNSEFAWPGASSWALNGRNSLMNPGPAMASHKEGEDRFFPLSGSLIFGKQGTGRDNVDADKVMITNEEEIKTTNPVATESYGQVATNHQSAQAQAQTGWVQNQGILPGMVWQDRDVYLQGPIWAKIPHTDGNFHPSPLMGGFGMKHPPPQILIKNTPVPADPPTAFNKDKLNSFITQYSTGQVSVEIEWELQKENSKRWNPEIQYTSNYYKSNNVEFAVNTEGVYSEPRPIGTRYLTRNL

SEQ ID NO: 712 - protein, 736 aa, Artificial Sequence
  Description of Artificial Sequence: Synthetic polypeptide
MAADGYLPDWLEDNLSEGIREWWALKPGAPQPKANQQHQDNARGLVLPGYKYLGPGNGLDKGEPVNAADAAALEHDKAYDQQLKAGDNLYLKYNHADAEFQERLKEDTSFGGNLGRAVFQAKKRLLEPLGLVEEAAKTAPGKKRPVEQSPQEPDSSAGIGKSGAQPAKKRLNFGQTGDTESVPDPQPIGEPPAAPSGVGSLTMASGGGAPVADNNEGADGVGSSSGNWHCDSQWLGDRVITTSTRTWALPTYNNHLYKQISNSTSGGSSNDNAYFGYSTPWGYFDFNRFHCHFSPRDWQRLINNNWGFRPKRLNFKLFNIQVKEVTDNNGVKTIANNLTSTVQVFTDSDYQLPYVLGSAHEGCLPPFPADVFMIPQYGYLTLNDGSQAVGRSSFYCLEYFPSQMLRTGNNFQFSYEFENVPFHSSYAHSQSLDRLMNPLIDQYLHYLSKTINGSGQNQQTLKFSVAGPSNMAVQGRNYIPGPSYRQQRVSTTVTQNNNSEFAWPGASSWALNGRNSLMNPGPAMASHKEGEDRFFPLSGSLIFGKQGTGRDNVDADKVMITNEEEIKTTNPVATESYGQVATNHQSAQAQAQTGWVQNQGILPGMVWQDRDVYLQGPIWAKIPHTDGNFHPSPLMGGFGMKHPPPQILIKNTPVPADPPTAFNKDKLNSFITQYSTGQVSVEIEWELQKENSKRWNPEIQYTSNYYKSNNVEFAVNTEGVYSEPRPIGTRYLTRNL

SEQ ID NO: 713 - protein, 736 aa, Artificial Sequence
  Description of Artificial Sequence: Synthetic polypeptide
MAADGYLPDWLEDNLSEGIREWWALKPGAPQPKANQQHQDNARGLVLPGYKYLGPGNGLDKGEPVNAADAAALEHDKAYDQQLKAGDNPYLKYNHADAEFQERLKEDTSFGGNLGRAVFQAKKRLLEPLGLVEEAAKTAPGKKRPVEQSPQEPDSSAGIGKSGAQPAKKRLNFGQTGDTESVPDPQPIGEPPAAPSGVGSLTMASGGGAPVADNNEGADGVGSSSGNWHCDSQWLGDRVITTSTRTWALPTYNNHLYKQISNSTSGGSSNDNAYFGYSTPWGYFDFNRFHCHFSPRDWQRLINNNWGFRPKRLNFKLFNIQVKEVTDNNGVKTIANNLTSTVQVFTDSDYQLPYVLGSAHEGCLPPFPADVFMIPQYGYLTLNDGSQAVGRSSFYCLEYFPSQMLRTGNNFQFSYEFENVPFHSSYAHSQSLDRLMNPLIDQYLHYLSKTINGSGQNQQTLKFSVAGPSNMAVQGRNYIPGPSYRQQRVSTTVTQNNNSEFAWPGASSWALNGRNSLMNPGPAMASHKEGEDRFFPLSGSLIFGKQGTGRDNVDADKVMITNEEEIKTTNPVATESYGQVATNHQSAQAQAQTGWVQNQGILPGMVWQDRDVYLQGPIWAKIPHTDGNFHPSPLMGGFGMKHPPPQILIKNTPVPADPPTAFNKDKLNSFITQYSTGQVSVEIEWELQKENSKRWNPEIQYTSNYYKSNNVEFAVNTEGVYSEPRPIGTRYLTRNL

SEQ ID NO: 714 - protein, 736 aa, Artificial Sequence
  Description of Artificial Sequence: Synthetic polypeptide
  MOD_RES (442)..(442): Any naturally occurring amino acid
MAADGYLPDWLEDNLSEGIREWWALKPGAPQPKANQQHQDNARGLVLPGYKYLGPGNGLDKGEPVNAADAAALEHDKAYDQQLKAGDNPYLKYNHADAEFQERLKEDTSFGGNLGRAVFQAKKRLLEPLGLVEEAAKTAPGKKRPVEQSPQEPDSSAGIGKSGAQPAKKRLNFGQTGDTESVPDPQPIGEPPAAPSGVGSLTMASGGGAPVADNNEGADGVGSSSGNWHCDSQWLGDRVITTSTRTWALPTYNNHLYKQISTSTSGGSSNDNAYFGYSTPWGYFDFNRFHCHFSPRDWQRLINNNWGFRPKRLNFKLFNIQVKEVTDNNGVKTIANNLTSTVQVFTDSDYQLPYVLGSAHEGCLPPFPADVFMIPQYGYLTLNDGSQAVGRSSFYCLEYFPSQMLRTGNNFQFSYEFENVPFHSSYAHSQSLDRLMNPLIDXYLHYLSKTINGSGQNQQTLKFSVAGPSNMAVQGRNYIPGPSYRQQRVSTTVTQNNNSEFAWPGASSWALNGRNSLMNPGPAMASHKEGEDRFFPLSGSLIFGKQGTGRDNVDADKVMITNEEEIKTTNPVATESYGQVATNHQSAQAQAQTGWVQNQGILPDMVWQDRDVYLQGPIWAKIPHTDGNFHPSPLMGGFGMKHPPPQILIKNTPVPADPPTAFNKDKLNSFITQYSTGQVSVEIEWELQKENSKRWNPEIQYTSNYYKSNNVEFAVNTEGVYSEPRPIGTRYLTRNL

SEQ ID NO: 715 - protein, 736 aa, Artificial Sequence; identical to SEQ ID NO: 695
  Description of Artificial Sequence: Synthetic polypeptide

SEQ ID NO: 716 - protein, 736 aa, Artificial Sequence; identical to SEQ ID NO: 699
  Description of Artificial Sequence: Synthetic polypeptide

SEQ ID NO: 717 - protein, 736 aa, Artificial Sequence
  Description of Artificial Sequence: Synthetic polypeptide
MAADGYLPDWLEDNLSEGIREWWALKPGAPQPRANQQHQDNARGLVLPGYKYLGPGNGLDKGEPVNAADAAALEHDKAYDQQLKAGDNPYLKYNHADAEFQERLKEDTSFGGNLGRAVFQAKKRLLEPLGLVEEAAKTAPGKKRPVEQSPQEPDSSAGIGKSGAQPAKKRLNFGQTGDTESVPDPQPIGEPPAAPSGVGSLTMASGGGAPVADNNEGADGVGSSSGNWHCDSQWLGDRVITTSTRTWALPTYNNHLYKQISNSTSGGSSNDNAYFGYSTPWGYFDFNRFHCHFSPRDWQRLINNNWGFRPKRLNFKLFNIQVKEVTDNNGVKTIANNLTSTVQVFTDSDCQLPYVLGSAHEGCLPPFPADVFMIPQYGYLTLNDGSQAVGRSSFYCLEYFPSQMLRTGNNFQFSYEFENVPFHSSYAHSQSLDRLTNPLIDQYLYYLSKTINGSGQNQQTLKFSVAGPSNMAVQGRNYIPGPSYRQQRVSTTVTQNNNSEFAWPGASSWALNGRNSLMNPGPAMASHKEGEDRFFPLSGSLIFGKQGTGRDNVDADKVMITNEEEIKTTNPVATESHGQVATNHQSAQAQAQTGWVQNQGILPGMVWQDRDVYLQGPIWAKIPHTDGNFHPSPLMGGFGMKHPPPQILIKNTPVPADPPTAFNKDKLNSFITQYSTGQVSVEIEWELQKENSKRWNPEIQYTSNYYKSNNVEFAVNTEGVYSEPRPIGTRYLTRNL

SEQ ID NO: 718 - protein, 736 aa, Artificial Sequence
  Description of Artificial Sequence: Synthetic polypeptide
MAADGYLPDWLEDNLSEGIREWWALKPGAPQPKANQQHQDNARGLVLPGYKYLGPGNGLDKGEPVNAADAAALEHDKAYDQQLKAGDNPYLKYNHADAEFQERLKEDTSFGGNLGRAVFQAKKRLLEPLGLVEEAAKTAPGKKRPVEQSPQEPDSSAGIGKSGAQPAKKRLNFGQTGDTESVPDPQPIGEPPAAPSGVGSLTMASGGGAPVADNNEGADGVGSSSGNWHCDSQWLGDRVITTSTRTWALPTYNNHLYKQISNSTSGGSSNDNAYFGYSTPWGYFDFNRFHCHFSPRDWQRLINNNWGFRPKRLNFKLFNIQVKEVTDNNGVKTIANNLTSTVQVFTDSDYQLPYVLGSAHEGCLPPFPADVFMIPQYGYLTLNDGSQAVGRSSFYCLEYFPSQMLRTGNNFQFSYEFENVPFHSSYAHSQSLDRLMNPPIDQYLYYLSKTINGSGQNQQTLKFSVAGPSNMAVQGRNYIPGPSYRQQRVSTTVTQNNNSEFAWPGASSWALNGRNSLMNPGPAMASHKEGEDRFFPLSGSLIFGKQGTGRDNVDADKVMITNEEEIKTTNPVATESYGQVATNHQSAQAQAQTGWVQNQGILPGMVWQDRDVYLQGPIWAKIPHTDGNFHPSPLMGGFGMKHPPPQILIKNTPVPADPPTAFNKDKLNSFITQYSTGQVSVEIEWELQKENSKRWNPEIQYTSNYYKSNNVEFAVNTEGVYGEPRPIGTRYLTRNL

SEQ ID NO: 719 - protein, 736 aa, Artificial Sequence
  Description of Artificial Sequence: Synthetic polypeptide
MAADGYLPDWLEDNLSEGIREWWALKPGAPQPKANQQHQDNARGLVLPGYKYLGPGNGLDKGEPVNAADAAALEHDKAYDQQLKAGDNPYLKYNHADAEFQERLKEDTSFGGNLGRAVFQAKKRLLEPLGLVEEAAKTAPGKKRPVEQSPQEPDSSAGIGKSGAQPAKKRLNFGQTGDTESVPDPQPIGEPPAAPSGVGSLTMASGGGAPVADNNEGADGVGSSSGNWHCDSQWLGDRVITTSTRTWALPTYNNHLYKQISNSTSGGSSNDNAYFGYSTPWGYFDFNRFHCHFSPRDRQRLINNNWGFRPKRLNFKLFNIQVKEVTDNNGVKTIANNLTSTVQVFTDSDYQLPYVLGSAHEGCLPPFPADVFMIPQYGYLTLNDGSQAVGRSSFYCLEYFPSQMLRTGNNFQFSYEFENVPFHSSYAHSQSLDRLMNPLIDQYLYYLSKTINGSGQNQQTLKFSVAGPSNMAVQGRNYIPGPSYRQQRVSTTVTQNNNSEFAWPGASSWALNGRNSLMNPGPAMASHKEGEDRFFPLSGSLIFGKQGTGRDNVDADKVMITNEEEIKTTNPVATESYGQVATNHQSAQAQAQTGWVQNQGILPGMVWQDRDVYLQGPIWAKIPHTDGNFHPSPLMGGFGMKHPPPQILIKNTPVPADPPTAFNKDKLNSFITQYSTGQVSVEIEWELQKENSKRWNPEIQYTSNYYKSNNVEFAVNTEGVYSEPRPIGTRYLTRNL

SEQ ID NO: 720 - protein, 736 aa, Artificial Sequence
  Description of Artificial Sequence: Synthetic polypeptide
MAADGYLPDWLEDNLSEGIREWWALKPGAPQPKANQQHQDNARGLVLPGYKYLGPGNGLDKGEPVNAADAAALEHDKAYDQQLKAGDNPYLKYNHADAEFQERLKEDTSFGGNLGRAVFQAKKRLLEPLGLVEEAAKTAPGKKRPVEQSPQEPDSSAGIGKSGAQPAKKRLNFGQTGDTESVPDPQPIGEPPAAPSGVGSLTMASGGGAPVADNNEGADGVGSSSGNWHCNSQWLGDRVITTSTRTWALPTYNNHLYKQISNSTSGGSSNDNAYFGYSTPWGYFDFNRFHCHFSPRDWQRLINNNWGFRPKRLNFKLFNIQVKEVTDNNGVKTIANNLTSTVQVFTDSDYQLPYVLGSAHEGCLPPFPADVFMIPQYGYLTLNDGSQAVGRSSFYCLEYFPSQMLRTGNNFQFSYEFENVPFHSSYAHSQSLDRLMNPLIDQYLYYLSKTINGSGQNQQTLKFSVAGPGNMAVQGRNYIPGPSYRQQRVSTTVTQNNNSEFAWPGASSWALNGRNSLMNPGPAMASHKEGEDRFFPLSGSLIFGKQGTGRDNVDADKVMITNEEEIKTTNPVATESYGQVATNHQSAQAQAQTGWVQNQGILPGMVWQDRDVYLQGPIWAKIPHTDGNFHPSPLMGGFGMKHPPPQILIKNTPVPADPPTAFNKDKLNSFITQYSTGQVSVEIEWELQKENSKRWNPEIQYTSNYYKSNNVEFAVNTEGVYSEPRPIGTRYLTRNL

SEQ ID NO: 721 - protein, 736 aa, Artificial Sequence
  Description of Artificial Sequence: Synthetic polypeptide
MAADGYLPDWLEDNLSEGIREWWALKPGAPQPKANQQHQDNARGLVLPGYRYLGPGNGLDKGEPVNAADAAALEHDKAYDQQLKAGDNPYLKYNHADAEFQERLKEDTSFGGNLGRAVFQAKKRLLEPLGLVEEAAKTAPGKKRPVEQSPQEPDSSAGIGKSGAQPAKKRLNFGQTGDTESVPDPQPIGEPPAAPSGVGSLTMASGGGAPVADNNEGADGVGSSSGNWHCDSQWLGDRVITTSTRTWALPTYNNHLYKQISNSTSGGSSNDNAYFGYSTPWGYFDFNRFHCHFSPRDWQRLINNNWGFRPKRLNFKLFNIQVKEVTDNNGVKTVANNLTSTVQVFTDSDYQLPYVLGSAHEGCLPPFPADVFMIPQYGYLTLNDGSQAVGRSSFYCLEYFPSQMLRTGNNFQFSYEFENVPFHSSYAHSQSLDRLMNPLIDQYLYYLSKTINGSGQNQQTLKFSVAGPSNMAVQGRNYIPGPSYRQQRVSTTVTQNNNSEFAWPGASSWALNGRNSLMNPGPAMASHKEGEDRFFPLSGSLIFGKQGTGRDNVDADKVMITNEEEIKTTNPVATESYGQVATNHQSAQAQAQTGWVQNQGILPGMVWQDRDVYLQGPIWAKIPHTDGNFHPSPLMGGFGMKHPPPQILIKNTPVPADPPTAFNKDKLNSFITQYSTGQVSVEIEWELQKENSKRWNPEIQYTSNYYKSNNVEFAVNTEGVYSGPRPIGTRYLTRNL

SEQ ID NO: 722 - protein, 736 aa, Artificial Sequence; identical to SEQ ID NO: 132
  Description of Artificial Sequence: Synthetic polypeptide

SEQ ID NO: 723 - protein, 736 aa, Artificial Sequence
  Description of Artificial Sequence: Synthetic polypeptide
MAADGYLPDWLEDNLSEGIREWWALKPGAPQPKANQQRQDNARGLVLPGYKYLGPGNGLDKGEPVNAADAAALEHDKAYDQQLKAGGNPCLKYNHADAEFQERLKEDTSFGGNLGRAVFQAKKRLLEPLGLVEEAAKTAPGKKRPVEQSPQEPDSSAGIGRSGAQPAKKRLNFGQTGDTESVPDPQPIGEPPAAPSGVGSLTMASGGGAPVADNNEGADGVGSSSGNWHCDSQWLGDRVITTSTRTWALPTYNNHLYKQISNSTSGGSSNDNAYFGYSTPWGYFDFNRFHCHFSPRDWQRLINNNWGFRPKRLNFKLFNIQVKEVTDNNGVKAIANNLTSTVQVFTDSDYQLPYVLGSAHEGCLPPFPADVFMIPQYGYLTLNDGSQAVGRSSFYCLEYFPSQMLRTGNNFQFSYEFENVPFHSSYAHSQSLDRLMNPLIDQYLYYLSKTIDGSGQNQQTLKFSVAGPSNMAVQGRNYIPGPSYRQQRVSTTVTQNNNSEFAWPGASSWALNGRNSLMDPGPAMASHKEGEDRFFPLSGSLIFGKQGTGRDNVDADKVMITNEEEIKTTNPVATESYGQVATNHQSAQAQAQTGWVQNQGILPGMVWQDRDVYLQGPIWAKIPHTGGNFHPSPLMGGFGMKHPPPQILIKNTPVPADPPTAFNKDKLNSFITQYSTGQVSVEIEWELQKENSKRWNPEIQYTSNYYKSNNVEFAVNTEGVYSEPRPIGTRYLTRNL

SEQ ID NO: 724 - protein, 736 aa, Artificial Sequence
  Description of Artificial Sequence: Synthetic polypeptide
MAADGYLPDWLEDNLSEGIREWWALKPGAPQPKANQQHQDNARGLVLPGYKYLGPGNGLDKGEPVNAADAAALEHDKAYDQQLKAGDNPYLKYNHADAEFQERLKEDTSFGGNLGRAVFQAKKRLLEPLGLVEEAAKTAPGKKRPVEQSPQEPDSSAGIGKSGAQPAKKRLNFGQTGDTESVPDPQPIGEPPAAPSGVGSLTMASGGGAPVADNNEGADGVGSSSGNWHCDSQWLGDRVITTSTRTWALPTYNNHLYKQISNSTSGGSSNDNAYFGYSTPWGYFDFNRFHCHFSPRDWQRLINNNWGFRPKRLNFKLFNIQVKEVTDNNGVKTIANNLTSTVQVFTDSDYQLPYVLGSAHEGCLPPFPADVFMIPQYGYLTLNDGSQAVGRSSFYCLEYFPSQMLRTGNNFQFSYEFENVPFHSSYAHSQSLDRLMNPLIDQYLYYLSKTINGSGQNQQTLKFSVAGPSNMAVQGRNYIPGPSYRQQRVSTTVTQNNNSEFAWPGASSWALNGRNSLMNPGPAMASHKEGEDRFFPLSGSLIFGKQGTGRDNVDADKVMITNEEEIKTTNPVATESYGQVATNHQSAQAQAQTGWVQNQGILPGMVWQDRDVYLQGPIWAKIPHTDGNFHPSPLMGGFGMKHPPPQILIKNTPVPADPPTAFNKDKLNSFITQYSTGQVSVEIEWELQKENSKRWNPEIQYTSNYYKPNNVEFAVNTEGVYSEPRPIGTRYLTRNL

SEQ ID NO: 725 - protein, 736 aa, Artificial Sequence
  Description of Artificial Sequence: Synthetic polypeptide
MAADGYLPDWLEDNLSEGIREWWALKPGAPQPKANQQHQDNARGLVLPGYKYLGPGNGLDKGEPVNAADAAALEHNKAYDQQLKAGDNPYLKCNHADAEFQERLKEDTSFGGNLGRAVFQAKKRPLEPLGLVEEAAKTAPGKKRPVEQSPQEPDSSAGIGKSGAQPAKKRLNFGQTGDTESVPDPQPIGEPPAAPSGVRSLTMASGGGAPVADNNEGADGVGSSSGNWHCDSQWLGDRVITTSTRTWALPTYNNHLYKQISNSTSGGSSNDNAYLGYSTPWGYFDFNRFHCHFSPRDWQRLINNNWGFRPKRLNFKLFNIQVKEVTDNNGVKTIANNLTSTVQVFTDSDYQLPYVLGSAHEGCLPPFPADVFMIPQYGYLTLNDGSQAVGRSSFYCLEYFPSQMLRTGNNFQFSYEFENVPFHSSYAHSQSLDRLMNPLIDQYLYYLSKTINGSGQNQQTLKFSVAGPSNMAVQGRNYIPGPSYRQQRVSTTVTQNNNSEFAWPGASSWALNGRNSLMNPGPTMASHKEGEDRFFPLSGSLIFGKQGTGRDNVDADKVMITNEEEIKTTNPVATESYGQVATNHQSAQAQAQTGWVQNQGILPGMVWQDRDVYLQGPIWAKIPHTDGNFHPSPLMGGFGMKHPPPQILIKNTPVPADPPTAFNKDKLNSFITQYSTGQVSVEIEWELQKENSKRWNPEIQYTSNYYKSNNVEFAVNTEGVYSEPRPIGTRYLTRNL

SEQ ID NO: 726 - protein, 736 aa, Artificial Sequence
  Description of Artificial Sequence: Synthetic polypeptide
MAADGYLPDWLEDNLSEGIREWWALKPGAPQPKANQQHQDNARGLVLPGYKYLGPGNGLDKGEPVNAADAAALVHDKAYDQQLKAGDNPYLKCNHADAEFQERLKEDTSFGGNLGRAVFQAKKRLLEPLGLVEEAAKTAPGKKRPVEQSPQEPDSSAGIGKSGAQPAKKRLNFGQTGDTESVPDPQPIGEPPAAPSGVGSLTMASGGGAPVADNNEGADGVGSSSGNWHCDSQWLGDRVITTSTRTWALPTYNNHLYKQISNSTSGGSSNDNAYLGYSTPWGYFDFNRFHCHFSPRDWQRLINNNWGFRPKRLNFKLFNIQVKEVTDNNGVKTIANNLTSTVQVFTDSDYQLPYVLGSAHEGCLPPFPADVFTIPQYGYLTLNDGSQAVGRSSFYCLEYFPSQMLRTGNNFQFSYEFENVPFHSSYAHSQSLDRLMNPLIDQYLYYLSKTINGSGQNQQTLKFSVAGPSNMAVQGRNYIPGPSYRQQRVSTTVTQNNNSEFAWPGASSWALNGRNSLMNPGPAMASHKEGEDRFFPLSGSLIFGKQGTGRDNVDADKVMITNEEEIKTTNPVATESYGQVATNHQSAQAQAQTGWVQNQGILPGMVWQDRDVYLQGPIWAKIPHTDGNFHPSPLMGGFGMKHPPPQILIKNTPVPADPPTAFNKDKLNSFITQYSTGQVSVEIEWELQKENSKRWNPEIQYTSNYYKSNNVEFAVNTEGVYSEPRPIGPRYLTRNF

SEQ ID NO: 727 - protein, 736 aa, Artificial Sequence
  Description of Artificial Sequence: Synthetic polypeptide
MAADGYLPDWLEDNLSEGIREWWALKPGAPQPKANQQHQDNARGLVLPGYKYLGPGNGLDKGEPVNAADAAALEHNKAYDQQLKAGDNPYLKCNHADAEFQERLKEDTSFGGNLGRAVFQAKKRLLEPLGLVEEAAKTAPGKKRPVEQSPQEPDSSAGIGKSGAQPAKKRLNFGQTGDTESVPDPQPIGEPPAAPSGVRSLTMASGGGAPVADNNEGADGVGSSSGNWHCDSQWLGDRVITTSTRTWALPTYNNHLYKQISNSTSGGSSNDNAYLGYSTPWGYFDFNRFHCHFSPRDWQRLINNNWGFRPKRLNFKLFNIQVKEVTDNNGVKTIANNLTSTVQVFTDSDYQLPYVLGSAHEGCLPPFPADVFMIPQYGYLTLNDGSQAVGRSSFYCLEYFPSQMLRTGNNFQFSYEFENVPFHSSYAHSQSLDRLMNPLIDQYLYYLSKTINGSGQNQQTLKFSVAGPSNMAVQGRNYIPGPSYRQQRVSTTVTQNNNSEFAWPGASSWALNGRNSLMNPGPAMASHKEGEDRFFPLSGSLIFGKQGTGRDNVDADKVMITNEEEIKTTNPVATESYGQVATNHQSAQAQAQTGWVQNQGILPGMVWQDRDVYLQGPIWAKIPHTDGNFHPSPLMGGFGMKHPPPQILIKNTPVPADPPTAFNKDKLNSFITQYSTGQVSVEIEWELQKENSKRWNPEIQYTSNYYKSNNVEFAVNTEGVYSEPRPIGTRYLTRNL

SEQ ID NO: 728 - protein, 736 aa, Artificial Sequence
  Description of Artificial Sequence: Synthetic polypeptide
MAADGYLPDWLEDNLSEGIREWWALKPGAPQPKANQQHQDNARGLVLPGYKYLGPGNGLDKGEPVNAADAAALEHDKAYDQQLKAGDNPYLKCNHADAEFQERLKEDTSFGGNLGRAVFQAKKRLLEPLGLVEEAAKTAPGKKRPVEQSPQEPDSSAGIGKSGAQPAKKRLNFGQTGDTESVPDPQPIGEPPAAPSGVGSLTMASGGGAPVADNNEGADGVGSSSGNWHCDSQWLGDRVITTSTRTWALPTYNNHLYKQISNSTSGGSSNDNAYLGYSTPWGYFDFNRFHCHFSPRDWQRLINNNWGFRPKRLNFELFNIQVKEVTDNNGVKTIANNLTSTVQVFTDSDYQLPYVLGSAHEGCLPPFPADVFMIPQYGYLTLNDGSQAVGRSSFYCLEYFPSQMLRTGNNFQSSYEFENVPFHSSYAHSQSLDRLMNPLIDQYLYYLSKTINGSGQNQQTLKFSVAGPSNMAVQGRNYIPGPSYRQQRASTTVTQNNNSEFAWPGASSWALNGRNSLMNPGPAMASHKEGEDRFFPLSGSLIFGKQGTGRDNVDADKVMITNEEEIKTTNPVATESYGQVATNHQSAQAQAQTGWVQNQGILPGMVWQDRDVYLQGPIWAKIPHTDGNFHPSPLMGGFGMKHPPPQILIKNTPVPADPPTAFNKDKLNSFITQYSTGQVSVEIEWELQKENSKRWNPEIQYTSNYYKSNNVEFAVNTEGVYSEPRPIGTRYLTRNL

SEQ ID NO: 729 - protein, 736 aa, Artificial Sequence
  Description of Artificial Sequence: Synthetic polypeptide
MAADGYLPDWLEDNLSEGIREWWALKPGAPQPKANQQHQDNARGLVLPGYKYLGPGNGLDKGEPVNAADAAALEHDKAYDQQLKAGDNPYLKCNHADAEFQERLKEDTSFGGNLGRAVFQAKKRLLEPLGLVEEAAKTAPGKKRPVEQSPQEPDSSAGIGKSGAQPAKKRLNFGQTGDTESVPDPQPIGEPPAAPPGVGSLTMASGGGAPVADNNEGADGVGSSSGNWHCDSQWLGDRVITTSTRTWALPTYNNHLYKQISNSTSGGSSNDNAYLGYSTPWGYFDFNRFHCHFSPRDWQRLINNNWGFRPKRLNFKLFNIQVKEVTDNNGVKTIANNLTSTVQVFTDSDYQLPYVLGSAHEGCLPPFPADVFMIPQYGYLTLNDGSQAVGRSSFYCLEYFPSQMLRTGNNFQFSYEFENVPFHSSYAHSQSLDRLMNPLIDQYLYYLSKTISGSGQNQQTLKFSVAGPSNMAVQGRNYIPGPSYRQQRVSTTVTQNNSSEFAWPGASSWALNGRNSLMNPGPAMASHKEGEDRFFPLSGSLIFGKQGTGRDNVDADKVMITNEEEIKTTNPVATESYGQVATNHQSAQAQAQTGWVQNQGILSGMVWQDRDVYLQGPIWAKIPHTDGNFHPSPLMGGFGMKHPPPQILIKNTPVPADPPTAFNKDKLNSFITQYSTGQVSVEIEWELQKENSKRWNPEIQYTSNYYKSNNVEFAVNTEGVYSEPRPIGTRYLTRNL

SEQ ID NO: 730 - protein, 736 aa, Artificial Sequence
  Description of Artificial Sequence: Synthetic polypeptide
MAADGYLPDWLEDNLSEGIREWWALKPGAPQPKANQQHQDNARGLVLPGYKYLGPGNGLDKGEPVNAADAAALEHDKAYDQQLKAGDNPYLKCNHADAEFQERLKEDTSFGGNLGRAVFQAKKRLLEPLGLVEEAAKTAPGKKRPVEQSPQEPDSSAGIGKSGAQPAKKRLNFGQTGDTESVPDPQPIGEPPAAPSGVGSLTMASGGGAPVADNNEGADGVGSSSGNWHCDSQWLGDRVITTSTRTWALPTYNNHLYKQISNSTSGGSSNDNAYLGYSTPWGYFDFNRFHCHFSPRDWQRLINNNWGFRPKRLNFKLFNIQVKEVTDNNGVKTIANNLTSTVQVFTDSDYQLPYVLGSAHEGCLPPFPADVFMIPQYGYLTLNDGSQAVGRSSFYCLEYFPSQMLRTGNNFQFSYEFENVPFHSSYAHSQSLDRLMNPLIDQYLYYLSKTINGSGQNQQTLKFSVAGPSNMAVQGRNYIPGPSYRQQRVSTTVTQNNNSEFAWPGASSWALNGRNSLMNPGPAMASHKEGEDRFFPLSGSLIFGKQGTGRDNVDADKVMITNEEEIKTTNPVATESYGQVATNHQSAQAQAQTGWVQNQGILPGMVWQDRDVYLQGPIWAKIPHTDGNFHPSPLMGGFGMKHPPPQILIKNTPVPADPPTAFNKDKLNSFITQYSTGQVSVEIEWELQKENSKRWNPEIQYTSNYYKSNNVEFAVNTEGVYSEPRPIGTRYLTRNL

SEQ ID NO: 731 - protein, 736 aa, Artificial Sequence; identical to SEQ ID NO: 730
  Description of Artificial Sequence: Synthetic polypeptide

SEQ ID NO: 732 - protein, 736 aa, Artificial Sequence
  Description of Artificial Sequence: Synthetic polypeptide
MAADGYLPDWLEDNLSEGIREWWALKPGAPQPKANQQHQDNARGLVLPGYKYLGPGNGLDKGEPVNAADAAALEHDKAYDQQLKAGDNPYLKCNHADAEFQERLKEDTSFGGNLGRAVFQAKKRLLEPLGLVEEAAKTAPGKKRPVEQSPQEPDSSAGIGKSGAQPAKKRLNFGQTGDTESVPDPQPIGEPPAAPSGVGSLTMASGGGAPVADNNEGADGVGSSSGNWHCDSQWLGDRVITTSTRTWALPTYNNHLYKQISNSTSGGSSNDNAYLDYSTPWGYFDFNRFHCHFSPRDWQRLINNNWGFRPKRLNFKLFNIQVKEVTDNNGVKTIANNLTSTVQVFTDSDYQLPYVLGSAHEGCLPPFPADVFMIPQYGYLTLNDGSQAVGRSSFYCLEYFPSQMLRTGNNFQFSYEFENVPFHSSYAHSQSLDRLMNPLIDQYLYYLSKTINGSGQNQQTLKFSVAGPSNMAVQGRNYIPGPSYRQQRVSTTVTQNNNSEFAWPGASSWALNGRNSLMNPGPAMASHKEGEDRFFPLSGSLIFGKQGTGRDNVDADKVMITNEEEIKTTNPVATESYGQVATNHQSAQAQAQTGWVQNQGILPGMVWQGRDVYLQGPIWAKIPHTDGNFHPSPLMGGFGMKHPPPQILIKNTPVPADPPTAFNKDKLNSFITQYSTGQVSVEIEWELQKENSKRWNPEIQYTSNYYKSNNVEFAVNTEGVYSEPRPIGTRYLTRNL

SEQ ID NO: 733 - protein, 736 aa, Artificial Sequence; identical to SEQ ID NO: 730
  Description of Artificial Sequence: Synthetic polypeptide

SEQ ID NO: 734 - protein, 736 aa, Artificial Sequence
  Description of Artificial Sequence: Synthetic polypeptide
MAADGYPPDWLEDNLSEGIREWWALKPGAPQPKANQQHQDNARGLVLPGYKYLGPGNGLDKGEPVNAADAAALEHDKAYDQQLKAGDNPHLKYNHADAEFQERLKEDTSFGGNLGRAVFQAKKRLLEPLGLVEEAAKTAPGKKRPVEQSPQEPDSSAGIGKSGAQPAKKRLNFGQTGDTESVPDPQPIGEPPAAPSGVGSLTMASGGGAPVADNNEGADGVGSSSGNWHCDSQWLGDRVITTSTRTWALPTYNNHLYKQISNSTSGGSSNDNAYFGYSTPWGYFDFNRFHCHFSPRDWQRLINNNWGFRPKRLNFKLFNIQVKEVTDNNGVKTIANNLTSTVQVFTDSDYQLPYVLGSAHEGCLPPFPADVFMIPQYGYLTLNDGSQAVGRSSFYCLEYFPSQMLRTGNNFQFSYEFENVPFHSSYAHSQSLDRLMNPLIDQYLYYLSKTINGSGQNQQTLKFSVAGPSNMAVQGRNYIPGPSYRQQRVSTTVTQNNNSEFAWPGASSWALNGRNSLMNPGPAMASHKEGEDRFFPLSGSLIFGKQGTGRDNVDADKVMITNEEEIKTTNPVATESYGQVATNHQSAQAQAQTGWVQNQGILPGMVWQDRDVYLQGPIWAKIPHTDGNFHPSPLMGGFGVKHPPPQILIKNTPVPADPPTAFNKDRLNSFITQYSTGQVSVEIEWELQKENSKRWNPEIQYTSNYYKSNNVEFAVNTEGVYSEPRPIGTRYLTRNL

SEQ ID NO: 735 - protein, 736 aa, Artificial Sequence
  Description of Artificial Sequence: Synthetic polypeptide
MAADGYLPDWLEDNLSEGIREWWALKPGAPQPKANQQHQDNARGLVLPGYKYLGPGNGLDKGEPVNAADAAALEHDKAYDQQLKAGDNPYLKYNHADAEFQERLKEDTSFGGNLGRAVFQAKKRLLEPLGLVEEAAKTAPGKKRPVEQSPQEPDSSAGIGKSGAQPAKKRLNFGQTGDTESVPDPQPIGEPPAAPSGVGSLTMASGGGAPVADNNEGADGVGSSSGNWHCDSQWLGDRVITTSTRTWALPTYNNHLYKQISNSTSGGSSNDNAYFGYSTPWGYFDFNRFHCHFSPRDWQRLINNNWGFRPKRLNFKLFNIQVKEVTDNNGVKTIANNLTSTVQVFTDSDYQLPYVLGSAHEGCLPPFPADVFMIPQYGYLTLNDGSQAVGRSSFYCLEYFPSQMLRTGNNFQFSYEFENVPFHSSYAHSQSLDRLMNPLIDQYLYYLSKTINGSGQNQQTLKFSVAGPSNMAVQGRNYIPGPSYRQQRVSTTVTQNNNSEFAWPGASSWALNGRNSLMNPGPAMASHKEGEDRFFPLSGSLIFGKQGTGRDNVDADKVMITNEEEIKTTNPVATESYGQVATNHQSAQAQAQTGWVQNQGILPGMVWQDRDVYLQGPIWAKIPHTDGNFHPSPLMGGFGVKHPPPQILIKNTPVPADPPTAFNKDKLNSFITQYSTGQVSVEIEWELQKENSKRWNPEIQYTSNYYKSNNVEFAVNTEGVYSEPRPIGTRYLTRNL

SEQ ID NO: 736 - protein, 736 aa, Artificial Sequence
  Description of Artificial Sequence: Synthetic polypeptide
MAADGYLPDWLEDNLSEGIREWWALKPGAPQPKANQQHQDNARGLVLPGYKYLGPGNGLDKGEPVNAADAAALEHDKAYDQQLKAGDNPYLKYNHADAEFQERLKEDTSFGGNLGRAVFQAKKRLLEPLGLVEEAAKTAPGKKRPVEQSPQEPDSSAGIGKSGAQPAKKRLNFGQTGDTESVPDPQPIGEPPAAPSGVGSLTMASGGGAPVADNNEGADGVGSSSGNWHCDSQWLGDRVITTSTRTWALPTYNNHLYKQISNSTSGGSSNDNAYFGYSTPWGYFDFNRFHCHFSPRDWQRLTNNNWGFRPKRLNFKLFNIQVKEVTDNNGVKTIANNLTSTVQVFTDSDYQLPYVLGSAHEGCLPPFPADVFMIPQYGYLTLNDGSQAVGRSSFYCLEYIPSQMLRTGNNFQFSYEFENVPFHSSYAHSQSLDRLMNPLIDQYLYYLSKTINGSGQNQQTLKFSVAGPSNMAVQGRNYIPGPSYRQQRVSTTVTQNNNSEFAWPGASSWALNGRNSLMNPGPAMASHKEGEDRFFPLSGSLIFGKQGTGRDNVDADKVMITNEEEIKTTNPVATESYGQVATNHQSAQAQAQTGWVQNQGILPGMVWQDRDVYLQGPIWAKIPHTDGNFHPSPLMGGFGVKHPPPQILIKNTPVPADPPTAFNKDKLNSFITQYSTGQVSVEIEWELQKENSKRWNPEIQYTSNYYKSNNVEFAVNTEGVYSEPRPIGTRYLTRNL

SEQ ID NO: 737 - protein, 736 aa, Artificial Sequence
  Description of Artificial Sequence: Synthetic polypeptide
MAADGYLPDWLEDNLSEGIREWWALKPGAPQPKANQQHQDNARGLVLPGYKYLGPGNGLDKGEPVNAADAAALEHDKAYDQQLKAGDNPYLKYNHADAEFQERLKEDTSFGGNLGRAVFQAKKRLLEPLGLVEEAAKTAPGKKRPVEQSPQEPDSSAGIGKSGAQPAKKRLNFGQTGDTESVPDPQPIGEPPAAPSGVGSLTMASGGGAPVADNNEGADGVGSSSGNWHCDSQWLGDRVITTSTRTWALPTYNNHLYKQISNSTSGGSSNDNAYFGYSTPWGYFDFNRFHCHFSPRDWQRLINNNWGFRPKRLNFKLFNIQVKEVTDNNGVKTIANNLTSTVQVFTDSDYQLPYVLGSAHEGCLPPFPADVFMIPQYGYLTLNDGSQAVGRSSFYCLEYFPSQMLRTGNNFQFSYEFENVPFHSSYAHSQSLDRLMNPLIDQYLYYLSKTINGSGQNQQTLKFSVAGPSNMAVQGRNYIPGPSYRQQRVSTTVTQNNNSEFAWPGASSWALNGRNSLMNPGPAMASHKEGEDRFFPLSGSLISGKQGTGRDNVDANKVMITNEEEIKTTNPVATESYGQVATNHQSAQAQAQTGWVQNQGILPGMVWQDRDVYLQGPIWAKIPHTDGNFHPSPLMGGFEMKHPPPQILIKNTPVPADPPTAFNKDKLNSFITQYSTGQVSVEIEWELQKENSKRWNPEIQYTSNYYKSNNVEFAVNTEGVYSEPRPIGTRYLTRNL

SEQ ID NO: 738 - protein, 736 aa, Artificial Sequence
  Description of Artificial Sequence: Synthetic polypeptide
MAADGYLPDWLEDNLSEGIREWWALKPGAPQPKANQQHQDNARGLVLPGYKYLGPGNGLDKGEPVNAADAAALEHDKAYDQQLKAGDNPYLKYNHADAEFQERLKEDTSFGGNLGRAVFQAKKRLLEPLGLVEEAAKTAPGKKRPVEQSPQEPDSSAGIGKSGAQPAKKRLNFGQTGDTESVPDPQPIGEPPAAPSGVGSLTIASGGGAPVADNNEGADGVGSSSGNWHCDSQWLGDRVITTSTRTWALPTYNNHLYKRISNSTSGGSSNDNAYFGYSTPWGYFDFNRFHCHFSPRDWQRLINNNWGFRPKRLNFKLFNIRVKEVTDNNGVKTITNNLTSTVQVFTDSDYQLPYVLGSAHEGCLPPFPADVFMIPQYGYLTLNDGSQAVGRSSFYCLEYFPSQMLRTGNNFQFSYEFENVPFHSSYAHSQSLDRLMNPLIDQYLYYLSKTINGSGQNQQTLKFSVAGPSNMAVQGRNYIPGPSYRQQRVSTTVTRNNNSEFAWPGASSWALNGRNSLMNPGPAMASHKEGEDRFFPLSGSLIFGKQGTGRDNVDADKVMITNEEEIKTTNPVATESYGQVATNHQSAQAQAQTGWVQNQGILPGMVWQDRDVYLQGPIWAKIPHTDGNFHPSPLMGGFGVKHPPPQILIKNTPVPADPPTAFNKDKLNSFITQYSTGQVSVEIEWELQKENSKRWNPEIQYTSNYYKSNNVEFAVNTEGVYSEPRPIGTRYLTRNL

SEQ ID NO: 739 - protein, 736 aa, Artificial Sequence
  Description of Artificial Sequence: Synthetic polypeptide
MAADGYLPDWLEDNLSEGIREWWALKPGAPQPKANQQHQDNARGLVLPGYKYLGPGNGLDKGEPVNAADAAALEHDKAYDQQLKAGDNPYLKYNHADAEFQERLKEDTSFGGNLGRAVFQAKKRLLEPLGLVEEAAKTAPGKKRPVEQSPQEPDSSAGIGKSGAQPAKKRLNFGQTGDTEPVPDPQPIGEPPAAPSGVGSLTMASGGGAPVADNNEGADGVGSSSGNWHCDSQWLGDRVITTSTRTWALPTYNNHLYKQISNSTSGGSSNDNAYFGYSTPWGYFDFNRFHCHFSPRDWQRLINNNWGFRPKRLNFKLFNIQVKEVTDNNGVKTIANNLTSTVQVFTDSDYQLPYVLGSAHEGCLPPFPAGVFMIPQYGYLTLNDGSQAVGRSSFYCLEYFPSQMLRTGNNFQFSYEFENVPFHSSYAHSQSLDRLMNPLIDQYLYYLSKTINGSGQNQQTLKFSVAGPSNMAVQGRNYIPGPSYRQQRVSTTATQNNNSEFAWPGASSWALNGRNSLMNPGPAMASHKEGEDRFFPLSGSLIFGKQGTGRDNVDADKVMITNEEEIKTTNPVATESYGQVATNHQSAQAQAQTGWVQNQGILPGMVWQDRDVYLQGPIWAKIPHTDGNFHPSPLMGGFGMKHPPPQILIKNTPVPADPPTAFNKDKLNSFITQYSTGQVSVEIEWELQKENSKRWNPEIQYTSNYYKSNNVEFAVNTEGVYSEPRPIGTRYLTRNL

SEQ ID NO: 740 - protein, 736 aa, Artificial Sequence
  Description of Artificial Sequence: Synthetic polypeptide
MAADGYLPDWLEDNLSEGIREWWALKPGAPQPKANQQHQDNARGLVLPGYKYLGPGNGLDKGEPVNAADAAALEHDKAYDQQLKAGDNPYLKYNHADAGFQERLKEDTSFGGNLGRAVFQAKKRLLEPLGLVEEAAKTAPGKKRPVEQSPQEPDSSAGIGKSGAQPAKKRLNFGQTGDTESVPVPQPIGEPPAAPSGVGSLTMASGGGAPVADNNEGADGVGSSSGNWHCDSQWLGDRVITTSTRTWALPTYNNHLYKQISNSTSGGSSNDNAYFGYSTPWGYFDFNRFHCHFSPRDWQRLINNNWGFRPKRLNFKLFNIQVKEVTDNNGVKTIANNLTSTVQVFTDSDYQLPYVLGSAHEGCLPPFPADVFMIPQYGYLTLNDGSQAVGRSSFYCLEYFPSQMLRTGNNFQFSYEFENVPFHSSYAHSQSLDRLMNPLIDQYLYYLSKTINGSGQNQQTLKFSVAGPSNMAVQGRNYIPGPSYRQQRVSTTVTQNNNSEFAWPGASSWALNGRNSLMNPGPAMASHKEGEDRFFPLSGSLIFGKQGAGRDNVDADKVMITNEEEIKTTNPVATESYGQVATNHQSAQAQAQTGWVQNQGILPGMVWQDRDVYLQGPIWAKIPHTDGNFHPSPLMGGFGMKHPPPQILIKNTPVPADPPTAFNKDKLNSFITQYSTGQVSVEIEWELQKENSKRWNPEIQYTSNYYKSNNVEFAVNTEGVYSEPRPIGTRYLTRNL

SEQ ID NO: 741 - protein, 736 aa, Artificial Sequence
  Description of Artificial Sequence: Synthetic polypeptide
  MOD_RES (126)..(126): Any naturally occurring amino acid
MAADGYLPDWLEDNLSEGIRERWALKPGAPQPKANQQHQDNARGLVLPGYKYLGPGNGLDKGEPVNAADAAALEHDKAYDQQLKAGDNPYLKYNHADAEFQERLKEDTSFGGNLGRAVFQAKKRLXEPLGLVEEAAKTAPGKKRPVEQSPQEPDSSAGIGKSGAQPAKKRLNFGQTGDTESVPDPQPIGEPPAAPSGVGSLTMASGGGAPVADNNEGADGVGSSSGNWHCDSQWLGDRVITTSTRTWALPTYNNHLYKQISNSTSGGSSNDNAYFGYSTPWGYFDFNRFHCHFSPRDWQRLINNNWGFRPKRLNFKLFNIQVKEVTDNNGVKTIANNLTSTVQVFTDSDYQLPYVLGSAHEGCLPPFPADVFMIPQYGYLTLNDGSQAVGRSSFYCLEYFPSQMLRTGNNFQFSYEFENVPFHSSYAHSQSPDRLMNPLIDQYLYYLSKTINGSGQNQQTLKFSVAGPSNMAVQGRNYIPGPSYRQQRVSTTVTQNNNSEFAWPGASSWALNGRNSLMNPGPAMASHKEGEDRFFPLSGSLIFGKQGTGRDNVDADKVMITNEEEIKTTNPVATESYGQVATNHQSAQAQAQTGWVQNQGILPGMVWQDRDVYLQGPIWAKIPHTDGNFHPSPLMGGFGVKHPPPQILIKNTPVPADPPTAFNKDKLNSFITQYSTGQVSVEIEWELQKENSKRWNPEIQYTSNYYKSNNVEFAVNTEGVYSEPRPIGTRYLTRNL

SEQ ID NO: 742 - protein, 736 aa, Artificial Sequence
  Description of Artificial Sequence: Synthetic polypeptide
MAADGYLPDWLEDNLSEGIREWWALKPGAPQPKANQQHQDNARGLVLPGYKYLGPGNGLDKGEPVNAADAAALEHDKAYDQQLKAGDNPYLKYNHADAEFQERLKEDTSFGGNLGRAVFQAKKRLLEPLGLVEEAAKTAPGKKRPVEQSPQEPDSSAGIGKSGAQPAKKRLNFGQTGDTESVPDPQPIGEPPAAPSGVGSLTMASGGGAPVADNNEGADGVGSSSGNWHCDSQWLGDRVITTSTRTWALPTYNNHLYKQISNSTSGGSSNDNAYLGYSTPWGYFDFNRFHCHFSPRDWQRLINNNWGFRPKRLNFKLFNIQVKEVTDNNGVKTIANNLTSTVQVFTDSDYQLPYVLGSAHEGCLPPFPADVFMIPQYGYLTLNDGSQAVGRSSFYCLEYFPSQMLRTGNNFQFSYEFENVPFHSSYAHSQSLDRLMNPLIDQYLYYLSKTINGSGQNQQTLKFSVAGPSNMAVQGRNYIPGPSYRQQRVSTTVTQNNNSEFAWPGASSWALNGRNSLMNPGPAMASHKEGEDRFFPLSGSLIFGKQGTGRDNVDADKVMITNEEEIKTTNPVATESYGQVATNHQSAQAQAQTGWVQNQGILPGMVWQDRDVYLQGPIWAKIPHTDGNFHPSPLMGGFGMKHPPPQILIKNTPVPADPPTAFNKDKLNSFITQYSTGQVSVEIEWELQKENSKRWNPEIQYTSNYYKSNNVEFAVNTEGVYSEPRPIGTRYLTRNL

SEQ ID NO: 743 - protein, 736 aa, Artificial Sequence
  Description of Artificial Sequence: Synthetic polypeptide
MAADGYLPDWLEDNLSEGIREWWALKPGAPQPKANQQHQDNARGLVLPGYKYLGPGNGLDKGEPVNAADAAALEHDKAYDQQLKAGDNPYLKYNHADAEFQERLKEDTSFGGNLGRAVFQAKKRLLEPLGLVEEAAKTAPGKKRPVEQSPQEPDSSAGIGKSGAQPAKKRLNFGQTGDTESVPDPQPIGEPPAAPSGVGSLTMASGGGAPVADNNEGADGVGSSSGNWHCDSQWLGDRVITTSTRTWALPTYNNHLYKQISNSTSGGSSNDNAYFGYSTPWGYFDFNRFHCHFSPRDWQRLINNNWGFRPKRLNFKLFNIQVKEVTDNNGVKTIANNLTSTVQVFTDSDYQLPYVLGSAHEGCLPPFPADVFMIPQYGYLTLNDGSQAVGRSSFYCLEYFPSQMLRTGNNFQFSYEFENVPFHSSYAHSQSLDRLMNPLIDQYLYYLSKTINGSGQNQQTLKFSVAGPSNMAVQGRNYIPGPSYRQQRVSTTVTQNNNSEFAWPGASSWALNGRNSLMNPGPAMASHKEGEDRFFPLSGSLIFGKQGTGRDNVDADKVMITNEEEIKTTNPVATESYGQVATNHQSAQAQAQTGWVQNQGILPGMVWQDRDVYLQGPIWAKIPHTDGNFHPSPLMGGFGMKHPPPQILIKNTPVPADPPTAFNKDKLDSFITQYSTGQVSVEIEWELQKENSKRWNPVIQYTSNYYKSNNVEFAVNTEGVYSEPRPIGTRYLTRNL

SEQ ID NO: 744 - protein, 736 aa, Artificial Sequence
  Description of Artificial Sequence: Synthetic polypeptide
MAADGYLPDWLEDNLSEGIREWWDLKPGAPKPKANQQKQDDGRGLVLPGYKYLGPFNGLDKGEPVNAADAAALEHDKAYDQQLKAGDNPYLRYNHADAEFQERLQEDTSFGGNLGRAVFQAKKRVLEPLGLVEEGAKTAPGKKRPVEQSPQEPDSSSGIGKTGQQPAKKRLNFGQTGDSESVPDPQPLGEPPATPAAVGPTTMASGGGAPMADNNEGVDGVGNASGNWHCDSTWLGDRVITTSTRTWALPTYNNHLYKQISSASTGASNDNHYFGYSTPWGYFDFNRFHCHFSPRDWQRLINNNWGFRPKRLNFKLFNIQVKEVTTNDGVTTIANNLTSTVQVFSDSEYQLPYVLGSAHQGCLPPFPADVFMIPQYGYLTLNNGSQAVGRSSFYCLEYFPSQMLRTGNNFTFSYTFEEVPFHSSYAHSQSLDRLMNPLIDQYLYYLNRTQNQSGSAQNKDLLFSRGSPAGMSVQPKNWLPGPCYRQQRVSKTKTDNNNSNFTWTGASKYNLNGRESIINPGTAMASHKDDEDKFFPMSGVMIFGKESAGASNTALDNVMITDEEEIKATNPVATERFGTVAVNFQSSSTDPATGDVHAMGALPGMVWQDRDVYLQGPIWAKIPHTDGHFHPSPLMGGFGLKNPPPQILIKNTPVPANPPAEFSATKLASFITQYSTGQVSVEIEWELQKENSKRWNPEVQYTSNYAKSANVDFTVDNNGLYTEPRPIGTRYLTRPL

SEQ ID NO: 745 - protein, 736 aa, Artificial Sequence
  Description of Artificial Sequence: Synthetic polypeptide
MAADGYLPDWLEDNLSEGIREWWDLKPGAPKPKANQQKQDDGRGLVLPGYKYLGPFNGLDKGEPVNAADAAALEHDKAYDQQLKAGDNPYLRYNHADAEFQERLQEDTSFGGNLGRAVFQAKKRVLEPLGLVEEGAKTAPGKRRPVEQSPQEPDSSSGIGKTGQQPAKKRLNFGQTGDSESVPDPQPLGEPPATPAAVGPTTMASGGGAPMADNNEGADGVGNASGNWHCDSTWLGDRVITTSTRTWALPTYNNHLYKQISSASTGASNDNHYFGYSTPWGYFDFNRFHCHFSPRDWQRLINNNWGFRPKRLNFKLFNIQVKEVTTNDGVTTIANNLTSTVQVFSDSEYQLPYVLGSAHQGCLPPFPADVFMIPQYGYLTLNNGSQAVGRSSFYCLEYFPSQMLRTGNNFTFSYTFEEVPFHSSYAHSQSLDRLMNPLIDQYLYYLNRTQNQSGSAQNKDLLFSRGSPAGMSVQPKNWLPGPCYRQQRVSKTKTDNNNSNFTWTGASKYNLNGRESIINPGTAMASHKDDEDKFFPMSGVMIFGKESAGASNTALDNVMITDEEEIKATNPVATERFGTVAVNFQSSSTDPATGDVHAMGALPGMVWQDRDVYLQGPIWAKIPHTDGHFHPSPLMGGFGLKNPPPQILIKNTPVPANPPAEFSATKFASFITQYSTGQVSVEIEWELQKENSKRWNPEVQYTSNYAKSANVDFTVDNNGLYTEPRPIGTRYLTRPL

SEQ ID NO: 746 - protein, 736 aa, Artificial Sequence
  Description of Artificial Sequence: Synthetic polypeptide
MAADGYLPDWLEDNLSEGIREWWDLKPGAPKPKANQQKQDDGRGLVLPGYKYLGPFNGLDKGEPVNAADAAALEHDKAYDQQLKAGDNPYPRYNHADAEFQERLQEDTSFGGNLGRAVFQAKKRVLEPLGLVGEGAKTAPGKKRPVEQSPQEPDSSSGIGKTGQQPAKKRLNFGQTGDSESVPDPQPLGEPPATPAAVGPTTMASGGGAPMADNNEGADGVGNASGNWHCDSTWLGDRVITTSTRTWALPTYNNHLYKQISSASTGASNDNHYFGYSTPWGYFDFNRFHCHFSPRDWQRLINNNWGFRPKRLNFKLFNIQVKEVTTNDGVTTIANNLTSTVQVFSDSEYQLPYVLGSAHQGCLPPFPADVFMIPQYGYLTLNNGSQAVGRSSFYCLEYFPSQMLRTGNNFTFSYTFEEVPFHSSYAHSQSLDRLMNPPIDQYLYYLNRTQNQSGSAQNKDLLFSRGSPAGMSVQPKNWLPGPCYRQQRVSKTKTDNNNSNFTWTGASKYNLNGRESIINPGTAMASHKDDEDKFFPMSGVMIFGKESAGASNTALDNVMITDEEEIKATNPVATERFGTVAVNFQSSSTDPATGDVHAMGALPGMVWQDRDVYLQGPIWAKIPHTDGHFHPSPLMGGFGLKNPPPQILIKNTPVPANPPAEFSATKFASFITQYSTGQVSVEIEWELQKENSKRWNPEVQYTSNYAKSANVDFTVDNNGLYTEPRPIGTRYLTRPL

SEQ ID NO: 747 - protein, 736 aa, Artificial Sequence
  Description of Artificial Sequence: Synthetic polypeptide
MAADGYLPDWLEDNLSEGIREWWDLKPGAPKPKANQQKQDDGRGLVLPGYKYLGPFNGLDKGEPVNAADAAALEHDKAYDQQLKAGDNPYLRYNHADAEFQERLQEDTSFGGNLGRAVFQAKKRVLEPLGLVEEGAKTAPGKKRPVEQSPQEPDSSSGIGKTGQQPAKKRLNFGQTGDSESVPDPRPLGEPPATPAAVGPTTMASGGGAPMADNNEGADGVGNASGNWHCDSTWLGDRVITTSTRTWALPTYNNHLYKQISSASTGASNDNHYFGYSTPWGYFDFNRFHCHFSPRDWQRLINNNWGFRPKRLNFKLFNIQVKEVTTNDGVTTIANNLTSTVQVFSDSEYQLPYVLGSAHQGCLPPFPADVFMIPQYGYLTLNNGSQAVGRSSFYCLEYFPSQMLRTGNNFTFSYTFEEVPFHSSYAHSQSLDRLMNPLIDQYLYYLNRTQNQSGSAQNKDLLFSRGPPAGMSVQPKNWLPGPCYRQQRVSKTKTDNNNSNFTWTGASKYNLNGRESIINPGTAMASHKDDEDKFFPMSGVMIFGKESAGASNTALDNVMITDEEEIKATNPVATERFGTVAVNFQSSSTDPATGDVHAMGALPGMVWQDRDVYLQGPIWAKIPHTDGHFHPSPLMGGFGLKNPPPQILIKNTPVPANPPAEFSATKFASFITQYSTGQVSVEIEWELQKENSKRWNPEVQYTSNYAKSANVDFTVDNNGLYTEPRPIGTRYLTRPL

SEQ ID NO: 748 - protein, 736 aa, Artificial Sequence
  Description of Artificial Sequence: Synthetic polypeptide
MAADGYLPDWLEDNLSEGIREWWDLKPGAPKPKANQQKQDDGRGLVLPGYKYLGPFNGLDKGEPVNAADAAALEHDKAYDQQLKAGDNPYLRYNHADAEFQERLQEDTSFGGNLGRAVFQAKKRVLEPLGLVEEGAKTAPGKKRPVEQSPQEPDSSSGIGKTGQQPAKKRLNFGQTGGSESVPDPQPLGEPPATPAAVGPTTMASGGGAPMADNNEGADGVGNASGNWHCDSTWLGDRVITTSTRTWALPTYNNHLYKQISSASTGASNDNHYFGYSTPWGYFDFNRFHCHFSPRDWQRLINNNWGFRPKRLNFKLFNIQVKEVTTNDGVTTIANNLTSTVQVFSDSEYQLPYVLGSAHQGCLPPFPADVFMIPQYGYLTLNNGSQAVGRSSFYCLEYFPSQMLRTGNNFTFSYTFEEVPFHSSYAHSQSLDRLMNPPIDQYLYYLNRTQNQSGSAQNKDLLFSRGSPAGMSVQPKNWLPGPCYRQQRVSKTKTDNNNSNFTWTGASKYNLNGRESIINPGTAMASHKDDEDKFFPMSGVMIFGKESAGASNTALDNVMITDEEEIKATNPVATERFGTVAVNFQSSSTDPATGDVHAMGALPGMVWQDRDVYLQGPIWAKIPHTDGHFHPSPLMGGFGLKNPPPQILIKNTPVPANPPAEFSATKFASFITQYSTGQVSVEIEWELQKENSKRWNPEVQYTSNYAKSANVDFTVDNNGLYTEPRPIGTRYLTRPL

SEQ ID NO: 749 - protein, 736 aa, Artificial Sequence
  Description of Artificial Sequence: Synthetic polypeptide
MAADGYLPDWLEDNLSEGIREWWDLKPGAPKPKANQQKQDDGRGLVLPGYKYLGPFNGLDKGEPVNAADAAALEHDKAYDQQLKAGDNPYLRYNHADAEFQERLQEDTSFGGNLGRAVFQAKKRVLEPLGLVEEGAKTAPGKKRPVEQSPQEPDSSSGIGKTGQQPAKKRLNFGQTGDSESVPDPQPLGEPPATPAAVGPTTMASGGGAPMADNNEGADGVGNASGNWHCDSTWLGDRVITTSTRTWALPTYNNHLYKQISSASTGASNDNHYFGYSTPWGYFDFNRFHCHFSPRDWQRLINNNWGFRPKRLNFKLFNIQVKEVTTNDGVTTIANNLTSTVQVFSDSEYQLPYVLGSAHQGCLPPFPADVFMIPQYGYLTLNNGSQAVGRSSFYCLEYFPSQMLRTGNNFTFSYTFEEVPFHSSYAHSQSLDRLMNPLIDQYLYYLNRTQNQSGSAQNKDLLFSRGSPAGMSVQPKNWLPGPCYRQQRVSKTKTDNNNSNFTWTGASKYNLNGRESIINPGTAVASHKDDEDKFFPMSGVMIFGKESAGASNTALDNVMITDEEEIKATNPVATERFGTVAVNFQSSSTDPATGDVHAMGALPGMVWQDRDVYLQGPIWAKIPHTDGHFHPSPLMGGFGLKNPPPQILIKNTPVPANPPAEFSATKFASFITQYSTGQVSVEIEWELQKENSKRWNPEVQYTSNYAKSANVDFTVDNNGLYTEPRPIGTRYLTRPL

SEQ ID NO: 750 - protein, 736 aa, Artificial Sequence
  Description of Artificial Sequence: Synthetic polypeptide
MAADGYLPDWLEDNLSEGIREWWDLKPGAPKPKANQQKQDDGRGLVLPGYKYLGPFNGLDKGEPVNAADAAALEHDKAYDQQLKAGDNPYLRYNHADAEFQERLQEDTSFGGNLGRAVFQAKKRVLEPLGLVEEGAKTAPGKKRPVEQSPQEPDSSSGIGKTGQQPAKKRLNFGQTGDSESVPDPQPLGEPPATPAAVGPTTMASGGGAPMADNNEGADGVGNASGNWHCDSTWLGDRVITTSTRTWALPTYNNHLYKQISSASTGASNDNHYFGYSTPWGYFDFNRFHCHFSPRDWQQLINNNWGFRPKRLNFKLFNIQVKEVTTNDGVTTIANNLTSTVQVFSDSEYQLPYVLGSAHQGCLPPFPADVFMIPQYGYLTLNNGSQAVGRSSFYCLEYFPSQMLRTGNNFTFSYTFEEVPFHSSYAHSQSLDRLMNPLIDQYLYYLNRTQNQSGSAQNKDLLFSRGSPAGMSVQPKNWLPGPCYRQQRVSKTKTDNNNSNFTWTGASKYNLNGRESIINPGTAMASHKDDEDKFFPMSGVMIFGKESAGASNTALDNVMITDEEEIKATNPVATERFGTVAVNFQSTSTDPATGDVHAMGALPGMVWQDRDVYLQGPIWAKIPHTDGHFHPSPLMGGFGLKNPPPQILIKNTPVPANPPAEFSATKFASFITQYSTGQVSVEIEWELQKENSKRWNPEVQYTSNYAKSADVDFTVDNNGLYTEPRPIGTRYLTRPL

SEQ ID NO: 751 - protein, 736 aa, Artificial Sequence
  Description of Artificial Sequence: Synthetic polypeptide
MAADGYLPDWLEDNLSEGIREWWDLKPGAPKPKANQQKQDDGRGLVLPGYKYLGPFNGLDKGEPVNAADAAALEHDKAYDQQLKAGDNPYLRYNHADAEFQERLQEDTSFGGNLGRAVFQAKKRVLEPLGLVEEGAKTAPGKKRPVEQSPQEPDSSSGIGKTGQQPAKKRLNFGQTGDSESVPDPQPLGEPPATPAAVGPTTMASGGGAPMADNNEGADGVGNASGNWHCDSTWLGDRVITTSTRTWALPTYNNHLYKQISSASTGASNDNHYFGYSTPWGYFDFNRFHCHFSPRDWQRLINNNWGFRPKRLNFKLFNIQVKEVTTNDGVTTIANNLTSTVQVFSDSEYQPPYVLGSAHQGCLPPFPADVFMIPQYGHLTLNNGSQAVGRSSFYCLEYFPSQMLRTGNNFTFSYTFEEVPFHSSYAHSQSLDRLTNPLIDQYLYYLNRTQNQSGSAQNKDLLFSRGSPAGMSVQPKNWLPGPCYRQQRVSKTKTDNNNSNFTWTGASKYNLNGRESIINPGTAMASHKDDEDKFFPMSGVMIFGKESAGASNTALDNVMITDEEEIKATNPVATERFGTVAVNFQSSSTDPATGDVHAMGALPGMVWQDRDVYLQGPIWAKIPHTDGHFHPSPLMGGFGLKNPPPQILIKNTPVPANPPAEFSATKFASFITQYSTGQVSVEIEWELQKENSKRWNPEVQYTSNYAKSANVDFTVDNNGLYTEPRPIGTRYLTRPL

SEQ ID NO: 752 - protein, 736 aa, Artificial Sequence
  Description of Artificial Sequence: Synthetic polypeptide
MAADGYLPDWLEDNLSEGIREWWDLKPGAPKPKANQQEQDDGRGLVLPGYKYLGPFNGLDKGEPVNAADAAALEHDKAYDQQLKAGDNPYLRYNHADAEFQERLQEDTSFGGNLGRAVFQAKKRVLEPLGLVEEGAKTAPGKKRPVEQSPQEPDSSSGIGKTGQQPAKKRLNFGQTGDSESVPDPQPLGEPPATPAAVGPTTMASGGGAPMADNNEGADGVGNASGNWHCDSTWLGDRVITTSTRTWALPTYNNHLYKQISSASTGASNDNHYFGYSTPWGYFDFNRFHCHFSPRDWQRLINNNWGFRPKRLNFKLFNIQVKEVTTNDGVTTIANNLTSTVQVFSDSEYQLPYVLGSAHQGCLPPFPADVFMIPQYGYLTLNNGSQAVGRSSFYCLEYFPSQMLRTGNNFTFSYTFEEVPFHSSYAHSQSLDRLMNPLIDQYLYYLNRTQNQSGSAQNKDLLFSRGSPAGMSVQPKNWLPGPCYRQQRVSKTKTDNNNSNFTWTGASKYNLNGRESIINPGTAMASHKDDEDKFFPMSGVMIFGKESAGASNTALDNVMITDEEEIKATNPVATERFGTVAVNFQSSSTDPATGDVHATGTLPGMVWQDRDVYLQGPIWAKIPHTDGHFHPSPLMGGFGLKNPPPQILIKTTPVPANPPAEFSATKFASFITQYSTGQVSVEIEWELQKENSKRWNPEVQYTSNYAKSANVDFTVDDNGLYTEPRPIGTRYLTRPL

SEQ ID NO: 753 - protein, 736 aa, Artificial Sequence
  Description of Artificial Sequence: Synthetic polypeptide
MAADGYLPDWLEDNLSEGIREWWDLKPGAPKPKANQQKQDDGRGLVLPGYKYLGPFNGLDKGEPVNAADAAALEHDKAYDQQLKAGDNPYLRYNHADAEFQERLQEDTSFGGNLGRAVFQAKKRVLEPLGLVEEGAKTAPGKKRPVEQSLQEPDSSSGIGKTGQQPAKKRLNFGQTGDSESVPDPQPLGEPPATPAAVGPTTMASGGGAPMADNNEGADGVGNASGNWHCDSTWLGDRVITTSTRTWALPTYNNHLYKQISSASTGASNDNHYFGYSTPWGYFDFNRFHCHFSPRDWQRLINNNWGFRPKRLNFKLFNIQVKEVTTNDGVTTIANNLTSTVQVFSDSEYQLPYVLGSAHQGCLPPFPADVFMIPQYGYLTLNNGSQAVGRSSFYCLEYFPSQMLRTGNNFTFSYTFEEVPFHSSYAHSQSLDRLMNPLIDQYLYYLNRTQNQSGSAQNKDLLFSRGSPAGMSVQPKNWLPGPCYRQQRVSKTKTDNDNSNFTWTGASKYNLNGRESIINPGTAMASHKDDEDKFFPMSGVMIFGKESAGASNTALDNVMITDEEEIKATNPVATERFGTVAVNFQSSSTDPATGDVHAMGALPGMVWQDRDVYLQGPIWAKIPHTDGHFHPSPLMGGFGLKNPPPQILIKNTPVPANPPAEFSATKFASFITQYSTGQVSVEIEWELQKENSKRWNPEVQYTSNYAKSANVDFTVDNNGLYTEPRPIGTRYLTRPL

SEQ ID NO: 754 - protein, 736 aa, Artificial Sequence
  Description of Artificial Sequence: Synthetic polypeptide
MAADGYLPDWLEDNLSEGIREWWDLKPGAPKPKANQQKQDDGRGLVLPGYKYLGPFNGLDKGEPVNAADAAALEHDKAYDQQLKAGDNPYLRYNHADAEFQERLQEDTSFGGNLGRAVFQAKKRVLEPLGLVEEGAKTAPGKKRPVEQSPQEPDSSSGIGKTGQQPAKKRLNFGQTGDSESVPDPQPLGEPPATPAAVGPTTMASGGGAPMADNNEGADGVGNASGNWHCDSTWLGDRVITTSTRTWALPTYNNHLYKQISSASTGASNDNHYFGYSTPWGYFDFNRFHCHFSPRDWQRLINNNWGFRPKRLNFKLFNIQVKEVTTNDGVTTIANNLTSTVQVFSDSEYQLPYVLGSAHQGCLPPFPADVFMIPQYGYLTLNNGSQAVGRSSFYCLEYFPSQMLRTGNNFTFSYTFEEAPFHSSYAHSQSLDRLMNPLIDQYLYYLNRTQNQSGSAQNKDLLFSRGSPAGMSVQPKNWLPGPCYRQQRVSKTKTDNNNSNFTWTGASKYNLNGRESIINPGTAMASHKDDEDKFFPMSGVMIFGKESAGASNTALDNVMITDEEEIKATNPVATERFGTVAVNFQSSSTDPATGDVHAMGALPGMVWQDRDVYLQGPIWAKIPHTDGHFHPSPLMGGFGLKNPPPQILIKNTPVPANPPAEFSATKFASFITQYSTGQVSVEIEWELQKENSKRWNPEVQYTSNYAKSANVDFTVDNNGLYTEPRPVGTRYLTRPL

SEQ ID NO: 755 - protein, 736 aa, Artificial Sequence
  Description of Artificial Sequence: Synthetic polypeptide
MAADGYLPDWLEDNLSEGIREWWDLKPGAPKPKANQQKQDDGRGLVLPGYKYLGPFNGLDKGEPVNAADAAALEHDKAYDQQLKAGDNPYLRYNHADAEFQERLQENTSFGGNLGRAVFQAKKRVLEPLGLVEEGAKTAPGKKRPVEQSPQEPDSSSGIGKTGQQPAKKRLNFGQTGDSESVPDPQPLGEPPATPAAVGPTTMASGGGAPMADNNEGADGVGNASGNWHCDSTWLGDRVITTSTRTWALPTYNNHLYKQISSASTGASNDNHYFGYSTPWGYFDFNRFHCHFPPRDWQRLINNNWGFRPKRLNFKLFNIQVKEVTSNDGVTTIANNLTSTVQVFSDSEYQLPYVLGSAHQGCLPPFPADVFMIPQYGYLTLNNGSQAVGRSSFYCLEYFPSQMLRTGNNFTFSYTFEEVPFHSSYAHSQSLDRLMNPLIDQYLYYLNRTQNQSGSAQNKDLLFSRGSPAGMSVQPKNWLPGPCYRQQRVSKTKTDNNNSNFTWTGASKYNLNGRESIINPGTAMASHKDDEDKFFPMSGVMIFGKESAGASNTALDNVMITDEEEIKATNPVATERFGTVAVNFQSSSTDPATGDVHAMGALPGMVWQDRDVYLQGPIWAKIPHTDGHFHPSPLMGGFGLKNPPPQILIKNTPVPANPPAEFSATKFASFITQYSTGQVSVEIEWELQKENSKRWNPEVQYTSNYAKSANVDFTVDNNGLYTEPRPIGTRYLTRPL

SEQ ID NO: 756 - protein, 736 aa, Artificial Sequence
  Description of Artificial Sequence: Synthetic polypeptide
MAADGYLPDWLEDNLSEGIREWWDLKPGAPKPKANQQKQDDGRGLVLPGYKYLGPFNGLDKGEPVNAADAAALEHDKAYDQQLKAGDNPYLRYNHADAEFQERLQEDTSFGGNLGRAVFQAKKRVLEPLGLVEEGAKTAPGKKRPVEQSPQEPDSSSGIGKTGQQPAKKRLNFGQTGDSESVPDPQPLGEPPATPAAVGPTTMASGGGAPMADNNEGADGVGNASGNWHCDSTWLGDRVITTSTRTWALPTYNNHLYKQISSASTGASNDNHYFGYSTPWGYFDFNRFHCHFSPRDWQRLINNNWGFRPKRLNFKLFNIQVKEVTTNDGVTTIANNLTSTVQVFSDSEYQLPYVLGSAHQGCLPPFPADVFMIPQYGYLTLNNGSQAVGRSSFYCLEYFPSQMLRTGNNFTFSYTFEEVPFHSSYAHSQSLDRLMNPLIDQYLYYLNRTQNQSGSAQNKDLLFSRGSPAGTSVQPKNWLPGPCYRQQRVSKTKTDNNNSNFTWTGASKYNLNGRESIINPGTAMASHKDDEDKFFPMSGVMIFGKESAGASNTALDNVMITDEEEIKATNPVATERFGTVAVNFQSSSTDPATGDVHAMGALPGMVWQDRDVYLQGPIWAKIPHTDGHFHPSPLMGGFGLKNPPPQILIKNTPVPANPPAEFSATKFASFITQYSTGQVSVEIEWELQKENSKRWNPEVQYTSNYAKSANVDFTVDNNGLYTGPRPIGTRYLTRPL

SEQ ID NO: 757 - protein, 736 aa, Artificial Sequence
  Description of Artificial Sequence: Synthetic polypeptide
MAADGYLPDWLEDNLSEGIREWWDLKPGAPKPKANQQKQDDGRGLVLPGYKYLGPFNGLDKGEPVNAADAAALEHDKAYDQQLKAGDNPYLRYNHADAEFQERLQEDTSFGGNLGRAVFQAKKRVLEPLGLVEEGAKTAPGKKRPVEQSPQEPDSSSGIGKTGQQPAKKRLNFGQTGDSESVPDPQPLGEPPATPAAVGPTTMASGGGAPMADNNEGADGVGNAPGNWHCDSTWLGDRVITTSTRTWALPTYNNHLYKQISSASTGASNDNHYFGYSTPWGYFDFNRFHCHFSPRDWQRLINNNWGFRPKRLNFKLFNIQVKEVTTNDGVTTIANNLTSTVQVFSDSEYQLPYVLGSAHQGCLPPFPADVFMIPQYGYLTLNNGSQAVGRSSFYCLEYFPSQMLRTGNNFTFSYTFEEVPFHSSYAHSQSLDRLMNPLIDQYLYYLNRTQNQSGSAQNKDLLFSRGSPAGMSVQPKNWLPGPCYRQQRVSKTKTDNNNSNFTWTGASKYNLNGRESIINPGTAMASHKDDEDKFFPMSGVMIFGKESAGASNTALDNVMITGEEEIKATNPVATERFGTVAVNFQSSSTDPATGDVHAMGALPGMVWQDRDVYLQGPIWAKIPHTDGHFHPSPLMGGFGLKNPPPQILIKNTPVPANPPAEFSATKFASFITQYSTGQVSVEIEWELQKENSKRWNPEVQYTSNYAKSANVDFTVDNNGLYTEPRPIGTRYLTRPL

SEQ ID NO: 758 - protein, 736 aa, Artificial Sequence
  Description of Artificial Sequence: Synthetic polypeptide
MAADGYLPDWLEDNLSEGIREWWDLKPGAPKPKANQQKQDDGRGLVLPGYKYLGPFNRLDKGEPVNAADAAALEHDKAYDQQLKAGDNPYLRYNHADAEFQERLQEDTSFGGNLGRAVFQAKKRVLEPLGLVEEGAKTAPGRKRPVEQSPQEPDSSSGIGKTGQQPAKKRLNFGQTGDSESVPDPQPLGEPPATPAAVGPTTMASGGGAPMADNNEGADGVGNASGNWHCDSTWLGDRVITTSTRTWALPTYNNHLYKQISSASTGASNDNHYFGYSTPWGYFDFNRFHCHFSPRDWQRLINNNWGFRPKRLNFKLFNIQVKEVTTNDGVTTIANNLTSTVQVFSDSEYQLPYVLGSAHQGCLPPFPADVFMIPQYGYLTLNNGGQAVGRSSFYCLEYFPSQMLRTGNNFTFSYTFEEVPFHSSYAHSQSLDRLMNPLIDQYLYYLNRTQNQSGSAQNKDLLFSRGSPAGMSVQPKNWLPGPCYRQQRVSKTKTDNNNSNFTWTGASKYSLNGRESIINPGTAMASHKDDEDKFFPMGGVMIFGKESAGASNTALDNAMITDEEEIKATNPVATERFGTVAVNFQSSSTDPATGDVHAMGALPGMVWQDRDVYLQGPIWAKIPHTDGHFHPSPLMGGFGLKNPPPQILIKNTPVPANPPAEFSATKFASFITQYSTGQVSVEIEWELQKENSKRWNPEVQYTSNYAKSANVDFTVDNNGLYTEPRPIGTRYLTRPL

SEQ ID NO: 759 - protein, 736 aa, Artificial Sequence
  Description of Artificial Sequence: Synthetic polypeptide
MAADGYLPDWLEDNLSEGIREWWDLKPGAPKPKANQQKQDDGRGLVLPGYKYLGPFNGLDKGEPVNAADAAALEHDKAYDQQLKAGDNPYLRYNHADAEFQERLQEDTSFGGNLGRAVFQAKKRVLEPLGLVEEGAKTAPGKKRPVEQSPQEPDSSSGIGKTGQQPAKKRLNFGQTGDSESVPDPQPLGEPPATPAAVGPTTMASGGGAPMADNNEGADGVGNASGNWHCDSTWLGGRVITTSTRTWALPTYNNHLYKQISSASTGASNDNHYFGYSTPWGYFDFNRFHCHFSPRDWQRLINNNWGFRPKRLNFKLFNIQVKEVTTNDGVTTIANNLTSTVQVFSDSEYQLPYVLGSAHQGCLPPFPADVFMIPQYGYLTLNNGSQAVGRSSFYCLEYFPSQMLRTGNNSTFSYTFEEVPFHSSYAHSQSLDRLMNPLIDQYLYYLNRTQNQSGSAQNKDLLFSRGSPAGMSVQPKNWLPGPCYRQQRVSKTKTDNNNSNFTWTGASKYNLNGRESIINPGTAMASHKDDEDKFFPMSGVMIFGKESAGASNTALDNVMITDEEEIKATNPVATERFGTVAVNFQSSSTDPATGDVHAMGTLPGMVWQDRDVYLQGPIWAKIPHTDGHFHPSPLMGGFGLKNPPPQILIKNTPVPANPPAEFSATKFASFITQYSTGQVSVEIEWELQKENSKRWNPEVQYTSNYAKSANVDFTVDNNGLYTEPRPIGTRYLTRPL

SEQ ID NO: 760 - protein, 736 aa, Artificial Sequence
  Description of Artificial Sequence: Synthetic polypeptide
MAADGYLPDWLEDNLSEGIREWWDLKPGAPKPKANQQKQDDGRGLVLPGYKYLGPFNGLDKGEPVSAADAAALEHDKAYDQQLKAGDNPYLRYNHADAEFQERLQEDTSFGGNLGRAVFQAKKRVLEPLGLVEEGAKTAPGKKRPVEQSPQEPDSSSGIGKTGQQPAKERLNFGQTGDSESVPDPQPLGEPPATPAAVGPTTMASGGGAPMADNNEGADGVGNASGNWHCDSTWLGDRVITTSTRTWALPTYNNHLYKQISSASTGASNDNHYFGYSTPWGYFDFNRFHCHFSPRDWQRLINNNWGFRPKRLNFKLFNIQVKEVTTNDGVTTIANNLTSTVQVFSDSEYQLPYVLGSAHQGCLPPFPADVFMIPQYGYLTLNNGSQAVGRSSFYCLEYFPSQMLRTGNNFTFSYTFEEVPFHSSYAHSQSLDRLMNPLIDQYLYYLNRTQNQSGSAQNKDLLFSRGSPAGMSVQPKNWLPGPCYRQQRVSKTKTDNNNSNFTWTGASKYNLNGRESIINPGTAMASHKDDEDKFFPMSGVMIFGKESAGASNTALDNVMITDEEEIKATNPVATERFGTVAVNFQSSSTDPATGDVHAMGALPGMVWQDRDVYLQGPIWAKIPHTDGHFHPSPLMGGFGLKNPPPQILIKNTPVPANPPAEFSATKFASFITQYSTGQVSVEIEWELQKENSKRWNPEVQYTSNYAKSANVDFTVDNNGLYTEPRPIGTRYLTRPL

SEQ ID NO: 761 - protein, 736 aa, Artificial Sequence
  Description of Artificial Sequence: Synthetic polypeptide
MAADGYLPDWLEDNLSEGIREWWDLKPGAPKPKANQQKQDDGRGLVLPGYKYLGPFNGLDKGEPVNAADAAALEHDKAYDQQLKAGDNPYLRYNHADAEFQERLQEDTSFGGNLGRAVFQAKKRVLEPLGLVEEGAKTAPGKKRPVEQSPQEPDSSSGIGKTGQQPAKKRLNFGQTGDSESVPDPQPLGEPPATPAAVGPTTMASGGGAPMADNNEGADGVGNASGNWHCDSTWLGDRVITTSTRTWALPTYNNHLYKQISSASTGASNDNHYFGYSTPWGYFDFNRFHCHFSPRDWQRLINNNWGFRPKRLNFKLFNIQVKEVTTNDGVTTIANNLTSTVQVFSDSEYQLPYVLGSAHQGCLPPFPADVFMIPQYGYLTLNNGSQAVGRSSFYCLEYFPSQMLRTGNNFTFSYTFEEVPFHSSYAHSQSLDRLMNPLIDQYLYYLNRTQNQSGSAQNKDLLFSRGSPAGMSVQPKNWLPGPCYRQQRVSKTKTDNNNSNFTWTGASKYNLNGRESIINPGTAMASHKDDEDKFFPMSGVMIFGKESAGASNTALDNVMITDEGEIKATNPVATERFGTVAVNFQSSSTDPATGDVHAMGALPGMVWQDRDVYLQGPIWAKIPHTDGHFHPSPLMGGFGLKNPPPQILIKNTPVPANPPAEFSATKFASFITQYSTGQVSVEIEWELQKENSKRWNPEVQYTSNYAKSANVDFTVDNNGLYTEPRPIGTRYLTRPL

SEQ ID NO: 762 - protein, 736 aa, Artificial Sequence
  Description of Artificial Sequence: Synthetic polypeptide
MAADGYLPDWLEDNLSEGIREWWDLKPGAPKPKANQQKQDDGRGLVLPGYKYLGPFNGLDKGEPVNAADAAALEHDKAYDQQLKAGDNPYLRYNHADAEFQERLQEDTSFGGNLGRAVFQAKKRVLEPFGLVEEGAKTAPGKKRPVEQSPQEPDSSSGIGKTGQQPAKKRLNFGQTGDSESVPDPQPLGEPPATPAAVGPTTMASGGGAPMADNNEGADGVGNASGNWHCDSTWLGDRVITTSTRTWALPTYNNHLYKQISSASTGASNDNHYFGYSTPWGYFDFNRFHCHFSPRDWQRLINNNWGFRPKRLNFKLFNIQVKEVTTNDGVTTIANNLTSTVQVFSDSEYQLPYVLGSAHQGCLPPFPADVFMIPQYGYLTLNNGSQAVGRSSFYCPEYFPSQMLRTGNNFTFSYTFEEVPFHSSYAHSQSLDRLMNPLIDQYLYYLNRTQNQSGSAQNKDLLFSRGSPAGMSVQPKNWLPGPCYRQQRVSKTKTDNNNSNFTWTGASKYNLNGRESIINPGTAMASHKDDKDKFFPMSGVMIFGKESAGASNTALDNVMITDEEEIKATNPVATERFGTVAVNFQSSNTDPATGDVHVMGALPGMVWQDRDVYLQGPIWAKIPHTDGHFHPSPLMGGFGLKHPPPQILIKNTPVPANPPAEFSATKFASFITQYSTGQVSVEIEWELQKENSKRWNPEVQYTSNYAKSANVDFTVDNNGLYTEPRPIGTRYLTRPL

SEQ ID NO: 763 - protein, 736 aa, Artificial Sequence
  Description of Artificial Sequence: Synthetic polypeptide
MAADGYLPDWLEDNLSEGIREWWDLKPGAPKPKANQQKQDDGRGLVLPGYKYLGPFNGLDKGEPVNAADAAALEHDKAYDQQLKAGDNPYLRYNHADAEFQERLQEDTSFGGNLGRAVFQAKKRVLEPFGLVEEGAKTAPGKKRPVEQSPQEPDSSSGIGKTGQQPAKKRLNFGQTGDSESVPDPQPLGEPPATPAAVGPTTMASGGGAPMADNNEGADGVGNASGNWHCDSTWLGDRVITTSTRTWALPTYNNHLYKQISSASTGASNDNHYFGYSTPWGYFDFNRFHCHFSPRDWQRLINNNWGFRPKRLNFKLFNIQVKEVTTNDGVTTIANNLTSTVQVFSDSEYQLPYVLGSAHQGCLPPFPADVFMIPQYGYLTLNNGSQAVGRSSFYCLEYFPSQMLRTGNNFTFSYTFEEVPFHSSYAHSQSLDRLMNPLIDQYLYYLNRTQNQSGSAQNKDLLFSRGSPAGMSVQPKNWLPGPCYRQQRVSKTKTDNNNSNFTWTGASKYNLNGRESIINPGTAMASHKDDKDKFFPMSGVMIFGKESAGASNTALDNVMITDEEEIKATNPVATERFGTVAVNFQSSDTDPATGDVHVMGALPGMVWQDRDVYLQGPIWAKIPHTDGHFHPSPLMGGFGLKHPPPQILIKNTPVPANPPAEFSATKFASFITQYSTGQVSVEIEWELQKENSKRWNPEVQYTSNYAKSANVDFTVDNNGLYTEPRPIGTRYLTRPL

SEQ ID NO: 764 - protein, 736 aa, Artificial Sequence
  Description of Artificial Sequence: Synthetic polypeptide
MAADGYLPDWLEDNLSEGIREWWDLKPGAPKPKANQQKQGDGRGLVLPGYKYLGPFNGLDKGEPVNAADAAALEHDKAYDQQLKAGDNPYLRYNHADAEFQERLQEDTSFGGNLGRAVFQAKKRVLEPFGLVEEGAKTAPGKKRPVEQSPQEPDSSSGIGKTGQQPAKKRLNFGQTGDSESVPDPQPLGEPPATPAAVGPTTMASGGGAPMADNNEGADGVGNASGNWHCDSTWLGDRVITTNTRTWALPTYNNHLYKQISSASTGASNDNHYFGYSTPWGYFDFNRFHCHFSPRDWQRLINNNWGFRPKRLNFKLFNIQVKEVTTNDGVTTIANNLTSTVQVFSDSEYQLPYVLGSAHQGCLPPFPADVFMIPQYGYLTLNNGSQAVGRSSFYCLEYFPSQMLRTGNNFTFSYTFEEVPFHSSYGHSQSLDRLMNLLIDQYLYYLNRTQNQSGSAQNKDLLFSRGSPAGMFVQPKNWLPGPCYRQQRVSKTKTDNNNSNFTWTGASKYNLNGRESIINPGTAMASHKDDEDKFFPMSGVMIFGKESAGASNTALDNVMITDEEEIKATNPVATERFGTVAVNFQSSSTDPATGDVHVMGALPGMVWQDRDVYLQGPIWAKIPHTDGHFHPSPLMGGFGLKHPPPQILIKNTPVPANPPAEFSATKFASFITQYSTGQVSVEIEWELQKENSKRWNPEVQYTSNYAKSANVDFTVDNNGLYTEPRPIGTRYLTRPL

SEQ ID NO: 765 - protein, 736 aa, Artificial Sequence
  Description of Artificial Sequence: Synthetic polypeptide
MAADGYLPDWLEDNLSEGIREWWDLKPGAPKPKANQQKQDDGRGLVLPGYKYLGPFNGLDKGEPVNAADAAALEHDKAYDQQLKAGDNPYLRYNHADAEFQERLQEDTSFGGNLGRAVFQAKKRVLEPFGLVEEGAKTAPGKKRPVEQSPQEPDSSSGIGKTGQQPAKKRLNFGQTGDSESVPDPQPLGEPPATPAAVGPTTMASGGGAPMADNNEGADGVGNASGNWHCDSTWLGDRVITTNTRTWALPTYNNHLYKQISSASTGASNDNHYFGYSTPWGYFDFNRFHCHFSPRDWQRLINNNWGFRPKRLNFKLFNIQVKEVTTNDGVTTIANNLTSTVQVFSDSEYQLPYVLGSAHQGCLPPFPADVFMIPQYGYLMLNNGSQAVGRSSFYCLEYFPSQMLRTGNNFTFSYTFEEVPFHSSYAHSQSLDRLMNPLIDQYLYYLNRTQNQSGSAQNKDLLFSRGSPAGMSVQPKNWLPGPCYRQQRVSKTKTDNNNSNFTWTGASKYNLNGRESIINPGTAMASHKDDEDKFFPMSGVMIFGKESAGASNTALDNVMITDEEEIKATNPAATERFGTVAVNFQSSSTDPATGDVHVMGALPGMVWQDRDVYLQGPIWAKIPHTDGHFHPSPLMGGFGLKHPPPQILIKNTPVPANPPAEFSATKFASFITQYSTGQVSVEIEWELQKENSKRWNPEVQYTSNYAKSANVDFTVDNNGLYTEPRPIGTRYLTRPL

SEQ ID NO: 766 - protein, 736 aa, Artificial Sequence
  Description of Artificial Sequence: Synthetic polypeptide
MAADGYLPDWLEDNLSEGIREWWDLKPGAPKPKANQQKQDDGRGLVLPGYKYLGPFNGLDKGEPVNAADAAALEHDKAYDQQLKAGDNPYLRYNHADAEFQERLQEDTSFGGNLGRAVFQAKKRVLEPFGLVEEGAKTAPGKKRPVEQSPQEPDSSSGIGKTGQQPAKKRLNFGQTGDSESVPDPQPLGEPPATPAAVGPTTMASGGGAPMADNNEGADGVGNASGNWHCDSTWLGDRVITTSTRTWALPTYNNHLYKQISSASTGASNDNHYFGYSTPWGYFDFNRFHCHFSPRDWQRLINNNWGFRPKRLNFKLFNIQVKEVTTNDGVTTIANNLTSTVQVFSDSEYQLPYVLGSAHQGCLPPFPADVFMIPQYGYLTLNNGSQAVGRSSFYCLEYFPSQMLRTGNNFTFSYTFEEVPFHSSYAHSQSLDRLMNPLIDQYLYYLNRTQNQSGSAQNKDLLFSRGSPAGMSVQPKNWLPGPCYRQQRVSKTKTDNNNSNFTWTGASKYNLNGRESIINPGTAMASHKDDEDKFFPMSGVMIFGKESAGASNTALDNVMITDEEEIKATNPVATERFGTVAVNFQSSSTDPATGDVHVMGALPGMVWQDRDVYLQGPIWAKIPHTDGHFHPSPLMGGFGLKHPPPQILIKNTPVPANPPAEFSATKFASFITQYSTGQVSVEIEWELQKENSKRWNPEVQYTSNYAKSANVDFTVDNNGLYTEPRPIGTRYLTRPL

SEQ ID NO: 767 - protein, 736 aa, Artificial Sequence
  Description of Artificial Sequence: Synthetic polypeptide
  MOD_RES (102)..(102): Any naturally occurring amino acid
MAADGYLPDWLEDNLSEGIREWWDLKPGAPKPKANQQKQDDGRGLVLPGYKYLGPFNGLDKGEPVNAADAAALEHDKAYDQQLKAGDNPYLRYNHADAEFQXRLQEDTSFGGNLGRAVFQAKKRVLEPFGLVEEGAKTAPGKKRPVEQSPQEPDSSSGIGKTGQQPAKKRLNFGQTGDSESVPDPQPLGEPPATPAAVGPTTMASGGGAPMADNNEGADGVGNASGNWHCDSTWLGGRVITTSTRTWALPTYNNHLYKQISSASTGASNDNHYFGHSTPWGYFDFNRFHCHFSPRDWQRLINNNWGFRPKRLNFKLFNIQVKEVTTNDGVTTIANNLTSTVQVFSDSEYQLPYVLGSAHQGCLPPSPADVFMIPQYGYLTLNNGSQAVGRSSFYCLEYFPSQMLRTGNNFTFSYTFEEVPFHSSYAHSQSLDRLMNPLIDQYLYYLNRTQNQSGSAQNKDLLFSRGSPAGMSVQPKNWLPGPCYRQQRVSKTKTDNNNSNFTWTGASKYNLNGRESIINPGTAMASHKDDKDKFFPMSGVMIFGKESAGASNTALDNVMITDEEEIKATNPVATERFGTVAVNFQSSNTDPATGDVHVMGALPGMVWQDRDVYLQGPIWAKIPHTDGHFHPSPLMGGFGLKHPPPQILIKNTPVPANPPAEFSATKFASFITQYSTGQVSVEIEWELQKENSKRWNPEVQYTSNYAKSANVDFTVDNNGLYTEPRPIGTRYLTRPL

SEQ ID NO: 768 - protein, 736 aa, Artificial Sequence
  Description of Artificial Sequence: Synthetic polypeptide
MAADGYFPDWLEDNLSEGIREWWDLKPGAPKPKANQQKQDDGRGLVLPGYKYLGPFNGLDKGEPVNAADAAALEHDKAYDQQLKAGDNPYLRYNHADAEFQERLQEDTSFGGNLGRAVFQAKKRVLEPFGLVEEGAKTAPGKKRPVEQSPQEPDSSSGIGRTGQQPAKKRLNFGQTGDSESVPDPQPLGEPPATPAAVGPTTMASGGGAPMADNNEGADGVGNASGNWHCDSTWLGDRVITTSTRTWALPTYNNHLYKQISSASTGASNDNHYFGYSTPWGYFDFNRFHCHFSPRDWQRLINNNWGFRPKRLNFKLFNIQVKEVTTNDGVTTIANNLTSTVQVFSDSEYQLPYVLGSAHQGCLPPFPADVFMIPQYGYLTLNNGSQAVGRSSFYCLEYFPSQMLRTGNNFTFSYTFEEVPFHSSYAHSQSLDRLMNPLIDQYLYYLNRTQNQSGSAQNKDLLFSRGSPAGMSVQPKNWLPGPCYRQQRVSKTKTDNNNSNFTWTGASKYNLNGRESIINPGTAMASHKDDEDKFFPMSGVMIFGKESAGASNTALDNVMITDEEEIKATNPVATERFGTVAVNFQSSSPDPATGDVHVMGALPGMVWQDRDVYLQGPIWAKIPHTDGHFHPSPLMGGFGLKHPPPQILIKNTPVPANPPAEFSATKFASFITQYSTGQVSVEIEWELQKENSKRWNPEVQYTSNYAKSANVDFTVDNNGLYSEPRPIGTRYLTRPL

SEQ ID NO: 769 - protein, 736 aa, Artificial Sequence
  Description of Artificial Sequence: Synthetic polypeptide
MAADGYLPDWLEDNLSEGIREWWDLKPGAPKPKANQQKQDDGRGLVLPGYKYLGPFNGLDKGEPVNAADAAALEHDKAYDQQLKAGDNPYLRYNHADAEFQERLQEDTSFGGNLGRAVFQAKKRVLEPFGLVEEGAKTAPGKKRPVEQSPQEPDSSSGIGKTGQQPAKKRLNFGQTGDSESVPDPQPLGEPPATPAAVGPTTMASGGGAPMADNNEGADGVGNASGNWHCDSTWLGDRVITTSTRTWALPTYNNHLYKQTSSASTGASNDNHYFGYSTPWGYFDFNRFHCHFSPRDWQRLINNNWGFRPKRLNFKLFNIQVKEVTTNDGVTTIANNLTSTVQVFSDSEYQLPYVLGSAHQGCLPPFPADVFMIPQYGYLTLNNGSQAVGRSSFYCLEYFPSQMLRTGNNFTFSYTFEEVPFHSSYAHSQSLDRLMNPLIDQYLYYLNRTQNQSGSAQNKDLLFSRGSPAGMSVQPKNWLPGPCYRQQRVSKTKTDYNNSNFTWTGASKYNLNGRESIINPGTAMASHKDDEDKFFPMSGVMIFGKESAGASNTALDNVMITDEEEIKATNPVATERFGTVAVNFQSSSTDPATGDVHVMGALPGMVWQDRDVYLQGPIWAKIPHTDGHFHPSPLMGGFGLKHPPPQILIKNTPVPANPPAEFSATKFASFITQYSTGQVSVEIEWELQKENSKRWNPEVQYTSNYAKSANVDFTVDNNGLYTEPRPIGTRYLTRPL

SEQ ID NO: 770 - protein, 736 aa, Artificial Sequence
  Description of Artificial Sequence: Synthetic polypeptide
MAADGYPPDWLEDNLSEGIREWWDLKPGVPKPKANQQKQDDGRGLVLPGYKYLGPFNGLDKGEPVNAADAAALEHDKAYDQQLKAGDNPYLRYNHADAEFQERLQEDTSFGGNLGRAVFQAKKRVLEPFGLVEEGAKTAPGKKRPVEQSPQEPDSSSGIGKTGQQPAKKRLNFGQTGDSESVPDPQPLGEPPATPAAVGPTTMASGGGAPMADNNEGADGVGNASGNWHCDSTWLGDRVITTSTRTWALPTYNNHLYKQISSASTGASNDNHYFGYSTPWGYFDFNRFHCHFSPRDWQRLINNNWGFRPKRLNFKLFNIQVKEVTTNDGVTTIANNLTSTVQVFSDSEYQLPYVLGSAHQGCLPPFPADVFMIPQYGYLTLNNGSQAVGRSSFYCLEYFPSQMLRTGNNFTFSYTFEEVPFHSSYAHSQSLDRLMNPLIDQYLYYLNRTQNQSGSAQNKDLLFSRGSPAGMSVQPKNWLPGPCYRQQRVSKTKTDNNNSNFTWTGASKYNLNGRESIINPGTAMASHKDDEDKFFPMSGVMIFGKESAGASNTALDNVMITDEEEIKATNPVATERFGTVAVNFQSSSTDPATGDVHVMGALPGMVWQDRDVYLQGPIWAKIPHTDGHFHPSPLMGGFGLKHPPPQILIKNTPVPANPPAEFSATKFASFITQYSTGQVSVEIEWELQKENSKRWNPEVQYTSNYAKSANVDFTVDNNGLYTEPRPIGTRYLTRPL

SEQ ID NO: 771 - protein, 732 aa, Artificial Sequence
  Description of Artificial Sequence: Synthetic polypeptide
MAADGYLPDWLEDNLSEGIREWWDLKPGAPKPKANQQKQDDGRGLVLPGYKYLGPFNGLDKGEPVNAADAAALEHDKAYDQQLKAGDNPYLRYNHADAEFQERLQEDTSFGGNLGRAVFQAKKRVLEPFGLVEEGAKTAPGKKRPVEQSPQEPDSSSGIGKTGQQPAKKRLNFGQTGDSESVPDPQPLGEPPATPAAVGPTTMASGGGAPMADNNEGADGVGNASGNWHCDSTWLGDRVITTSTRTWALPTYNNHLYKQISSASTGASNDNHYFGYSTPWGYFDFNRFHCHFSPRDWQRLINNNWGFRPKRLNFKLFNIQVKEVTTNDGVTTIANNLTSTVQAFSDSEYQLPYVLGSAHQGCLPPFPADVFMIPQYGYLTLNNGSQAVGRSSFYCLEYFPSQMLRTGNNFTFSYTFEEVPFHSSYAHSQSLDRLMNPLIDPYLYYLNRTQNQSGSAQNKDLLFSRGSPAGMSVQPKNWLPGPCYRQQRVSKTKTDNNNSNFTWTGASKYNLNGRESIINPGTAMASHKDDEDKFFPMSGVMIFGKESAGASNTALDNVMITDEEEIKATNPVATERFGTVAVNFQSSSTDPATGDVHVMGALPGMVWQDRDVYLQGPIWAKIPHTDGHFHPSPLMGGFGLKHPPPQILIKNTPVPANPPAEFSATKFASFITQYSTGQVSVEIEWELQKENSKRWNPEVQYTSNYAKSANVDFTVDNNGLYTEPRPIGTRYL

SEQ ID NO: 772 - protein, 736 aa, Artificial Sequence
  Description of Artificial Sequence: Synthetic polypeptide
MAADGYLPDWLEDNLSEGIREWWDLKPGAPKPKANQQKQDDGRGLVLPGYKYLGPFNGLDKGEPVNAADAAALEHDKAYDQQLKAGDNPYLRYNHADAEFQERLQEDTSFGGNLGRAVFQAKKRVLEPFGLVEEGAKTAPGKKRPVEQSPQEPDSSSGIGKTGQQPAKKRLNFGQTGDSESVPDPQPLGEPPATPAAVGPTTMASGGGAPMADNNEGADGVGNASGNWHCDSTWLGDRVITTSTRTWALPTYNNHLYKQISSASTGASNDNHYFGYSTPWGYFDFNRFHCHFSPRDWQRLINNNWGFRPKRLNFKLFNIQVKEVTTNDGVTTIANNLTSTVQVFSDSEYQLPYVLGSAHQGCLPPFPADVFMIPQYGYLTLNNGSQAVGRSSFYCLEYFPSQMLRTGNNFTFSYTFEEVPFHSSYAHSQSLDRLMNPLIDQYLYYLNRTQNQSGSAQNKDLLFSRGSPAGMSVQPKNWLPGPCYRQQRVSKTKTDNNNSNFTWTGASKYNLNGRESIINPGTAMASHKDDEDKFFPMSGVMIFGKESAGASNTALDNVMITDEEEIKATNPVATERFGTVAVNFQSSSTDPATGDVHVMGALPGMVWQDRDVYLQGPIWAKIPHTDGHSHPSPLMGGFGLKHPPPQILIKNTPVPANPPAEFSATKFASFITQYSTGQVSVEIEWELQKENSKRWNPEVQYTSNYAKSANVDFTVDNNGLYTEPRPIGTRYLTRPL

SEQ ID NO: 773 - protein, 736 aa, Artificial Sequence
  Description of Artificial Sequence: Synthetic polypeptide
MAADGYLPDWLEDNLSEGIREWWDLKPGAPKPKANQQKQDDGRGLVLPGYKYLGPFNGLDKGEPVNAADAAALEHDKAYDQQLKAGDNPYLRYNHADAEFQERLQEDTSFGGNLGRAVFQAKKRVLEPFGLVEEGAKTAPGKKRPVEQSPQEPDSSSGIGKTGQQPAKKRLNFGQTGDSESVPDPQPLGEPPATPAAVGPTTMASGGGAPMADNNEGADGVGNASGNWHCDSTWLGDRVITTSTRTWALPTYNNHLYKQISSASTGASNDNHYFGYSTPWGYFDFNRFHCHFSPRDWQRLINNNWGFRPKRLNFKLFNIQVKEVTTNDGVTTIANNLTSTVQVFSDSEYQLPYVLGSAHQGCLPPFPADVFMIPQYGYLTLNNGSQAVGRSSFYCLEYFPSQMLRTGNNFTFSYTFEEVPFHSSYAHSQSLDRLMNPLIDLYLYYLNRTQNQSGSAQNKDLLFSRGSPAGMSVQPKNWLPGPCYRQQRVSKTKTDNNNSNFTWTGASKYNLNGRESIINPGTAMASHKDDEDKFFPMSGVMIFGKESAGTSNTALDNVMITDEEEIKATNPVATERFGTVAVNFQSSSTDPATGDVHVMGALPGMVWQDRDVYLQGPIWAKIPHTDGHFHPSPLMGGFGLKHPPPQILIKNTPVPANPPAEFSATKFASFITQYSTGQVSVEIEWELQKENSKRWNPEVQYTSNYAKSANVDFTVDNNGLYTEPRPIGTRYLTRPL

SEQ ID NO: 774 - protein, 736 aa, Artificial Sequence
  Description of Artificial Sequence: Synthetic polypeptide
MAADGYLPDWLEDSLSEGIREWWDLKPGAPKPKANQQKQDDGRGLVLPGYKYLGPFNGLDKGEPVNAADAAALEHDKAYDQQLKAGDNPYLRYNHADAEFQERLQEDTSFGGNLGRAVFQAKKRVLEPFGLVEEGAKTAPGKKRPVEQSPQEPDSSSGIGKTGQQPAKKRLNFGQTGDSESVPDPQPLGEPPATPAAVGPTTMASGGGAPMADNNEGADGVGNASGNWHCDSTWLGDRVITTSTRTWALPTYNNHLYKQISSASTGASNDNHYFGYSTPWGYFDFNRFHCHFSPRDWQRLINNNWGFRPKRLNFKLFNIQVKEVTTNDGVTTIANNLTSTVQVFSDSEYQLPYVLGSAHQGCLPPFPADVFMIPQYGYLTPNNGSQAVGRSSFYCLEYFPSQMLRTGNNFTFSYTFEEVPFHSSYAHSQSLDRLMNPLIDQYQYYLNRTQNQSGSAQNKDLLFSRGSPAGMSVQPKNWLPGPCYRQQRVSKTKTDNNNSNFTWTGASKYNLNGRESIINPGTAMASHKDDEDKFFPMSGVMIFGKESAGASNTALDNVMITDEEEIKATNPVATERFGTVAVNFQSSSTDPATGDVHVMGALPGMVWQDRDVYLQGPIWAKIPHTDGHFHPSPLMGGFGLKHPPPQILIKNTPVPANPPAEFSATKFASFITQYSTGQVSVEIEWELQKENSKRWNPEVQYTSNYAKSANVDFTVDNNGLYTEPRPIGTRYLTRPL

SEQ ID NO: 775 - protein, 736 aa, Artificial Sequence; identical to SEQ ID NO: 766
  Description of Artificial Sequence: Synthetic polypeptide

SEQ ID NO: 776 - protein, 735 aa, Artificial Sequence
  Description of Artificial Sequence: Synthetic polypeptide
MAADGYLPDWLEDTLSEGIRQWWKLKPGPPPPKPAERHKDDSRGLVLPGYKYLGPFNGLDKGEPVNEADAAALEHDKAYDRQLDSGDNPYLKYNHADAEFQERLKEDTSFGGNLGRAVFQAKKRVLEPLGLVEEPVKTAPGKKRPVEHSPVEPDSSSGTGKAGQQPARKRLNFGQTGDADSVPDPQPLGQPPAAPSGLGTNTMATGSGAPMADNNEGADGVGNSSGNWHCDSTWMGDRVITTSTRTWALPTYNNHLYKQISSQSGASNDNHYFGYSTPWGYFDFNRFHCHFSPRDWQRLINNNWGFRPKRLNFKLFNIQVKEVTQNDGTTTIANNLTSTVQVFTDSEYQLPYVLGSAHQGCLPPFPADVFMVPQYGYLTLNNGSQAVGRSSFYCLEYFPSQMLRTGNNFTFSYTFEDVPFHSSYAHSQSLDRLMNPLIDQYLYYLSRTNTPSGTTTQSRLQFSRAGASDIRDQSRNWLPGPCYRQQRVSKTSADNNNSEYSWTGATKYHLNGRDSLVNPGPAMASHKDDEEKFFPQSGVLIFGKQGSEKTNVDIEKVMITDEEEIRTTNPVATEQYGSVSTNLQRGNRQAATADVNTQGVLPGMVWQDRDVYLQGPIWAKIPHTDGHFHPSPLMGGFGLKHPPPQILIKNTPVPANPSTTFSAAKFASFITQYSTGQVSVEIEWELQKENSKRWNPEIQYTSNYNKSVNVDFTVDTNGVYSEPRPIGTRYLTRNL

SEQ ID NO: 777 - DNA, 2211 bp, Artificial Sequence
  Description of Artificial Sequence: Synthetic polynucleotide
atggctgctgacggttatcttccagattggctcgaggacaacctttctgaaggcattcgtgagtggtgggctctgaaacctggagtccctcaacccaaagcgaaccaacaacaccaggacaaccgtcggggtcttgtgcttccgggttacaaatacctcggacccggtaacggactcgacaaaggagagccggtcaacgaggcggacgcggcagccctcgaacacgacaaagcttacgaccagcagctcaaggccggtgacaacccgtacctcaagtacaaccacgccgacgccgagtttcaggagcgtcttcaagaagatacgtcttttgggggcaaccttggcagagcagtcttccaggccaaaaagaggatccttgagcctcttggtctggttgaggaagcagctaaaacggctcctggaaagaagaggcctgtagatcagtctcctcaggaaccggactcatcatctggtgttggcaaatcgggcaaacagcctgccagaaaaagactaaatttcggtcagactggcgactcagagtcagtcccagaccctcaacctctcggagaaccaccagcagcccccacaagtttgggatctaatacaatggcttcaggcggtggcgcaccaatggcagacaataacgagggtgccgatggagtgggtaattcctcaggaaattggcattgcgattcccaatggctgggcgacagagtcatcaccaccagcaccagaacctgggccctgcccacttacaacaaccatctctacaagcaaatctccagccaatcaggagcttcaaacgacaaccactactttggctacagcaccccttgggggtattttgactttaacagattccactgccacttctcaccacgtgactggcagcgactcattaacaacaactggggattccggcccaagaaactcagcttcaagctcttcaacatccaagttaaagaggtcacgcagaacgatggcacgacgactattgccaataaccttaccagcacggttcaagtgtttacggactcggagtatcagctcccgtacgtgctcgggtcggcgcaccaaggctgcctcccgccgtttccagcggacgtcttcatggtccctcagtatggatacctcaccctgaacaacggaagtcaagcggtgggacgctcatccttttactgcccggagtacttcccttcgcagatgctaaggactggaaataacttccaattcagctataccttcgaggatgtaccttttcacagcagctacgctcacagccagagtttggatcgcttgatgaatcctcttattgatcagtatctgtactacctgaacagaacgcaaggaacaacctctggaacaaccaaccaatcacggctgctttttagccaggctgggcctcagtctatgtctttgcaggccagaaattggctacctgggccctgctaccggcaacagagactttcaaagactgctaacgacaacaacaacagtaactttccttggacagcggccagcaaatatcatctcaatggccgcgactcgctggtgaatccaggaccagctatggccagtcacaaggacgatgaagaaaaatttttccctatgcacggcaatctaatatttggcaaagaagggacaacggcaagtaacgcagaattagataatgtaatgattacggatgaagaagagattcgtaccaccaatcctgtggcaacagagcagtatggaactgtggcaaataacttgcagagctcaaatacagctcccacgactagaactgtcaatgatcagggggccttacctggcatggtgtggcaagatcgtgacgtgtaccttcaaggacctatctgggcaaagattcctcacacggatggacactttcatccttctcctctgatgggaggctttggactgaaacatccgcctcctcaaatcatgatcaaaaatactccggtaccggcaaatcctccgacgactttcagcccggccaagtttgcttcatttatcactcagtactccactggacaggtcagcgtggaaattgagtgggagctacagaaagaaaacagcaaacgttggaatccagagattcagtacacttccaactacaacaagtctgttaatgtggactttactgtagacactaatggtgtttatagtgaacctcaccctattggaacccggtatctcacacgaaacttgtaa

SEQ ID NO: 778 - DNA, 2211 bp, Artificial Sequence
  Description of Artificial Sequence: Synthetic polynucleotide
atggctgctgatggttatcttccagattggctcgaggacaacctttctgaaggcattcgtgagtggtgggctctgaaacctggagtccctcaacccaaagcgaaccaacaacaccaggacaaccgtcggggtcttgtgcttccgggttacaaatacctcggacccggtaacggactcgacaaaggagagccggtcaacgaggcggacgcggcagccctcgaacacgacaaagcttacgaccagcagctcaaggccggtgacaacccgtacctcaagtacaaccacgccgacgccgagtttcaggagcgtcttcaagaagatacgtcttttgggggcaaccttggcagagcagtcttccaggccaaaaagaggatccttgagcctcttggtctggttgaggaagcagctaaaacggctcctggaaagaagaggcctgtagatcagtctcctcaggaaccggactcatcatctggtgttggcaaatcgggcaaacagcctgccagaaaaagactaaatttcggtcagactggcgactcagagtcagtcccagaccctcaacctctcggagaaccaccagcagcccccacaagtttgggatctaatacaatggcttcaggcggtggcgcaccaatggcagacaataacgagggtgccgatggagtgggtaattcctcaggaaattggcattgcgattcccaatggctgggcgacagagtcatcaccaccagcaccagaacctgggccctgcccacttacaacaaccatctctacaagcaaatctccagccaatcaggagcttcaaacgacaaccactactttggctacagcaccccttgggggtattttgactttaacagattccactgccacttctcaccacgtgactggcagcgactcattaacaacaactggggattccggcccaagaaactcagcttcaagctcttcaacatccaagttaaagaggtcacgcagaacgatggcacgacgactgttgccaataaccttaccagcacggttcaagtgtttacggactcggagtatcaactcccgtacgtgctcgggtcggcgcaccaaggctgtctcccgccgtttccagcggacgtcttcatggtccctcagtatggatacctcaccctgaacaacggaagtcaagcggtgggacgctcatccttttactgcctggagtacttcccttcgcagatgctaaggactggaaataacttccaattcagctataccttcgaggatgtaccttttcacagcagctacgctcacagccagagtttggatcgcttgatgaatcctcttattgatcagtatctgtactacctgaacagaacgcaaggaacaacctctggaacaaccaaccaatcacggctgctttttagccaggctgggcctcagtctatgtctttgcaggccagaaattggctacctgggccctgctaccggcaacagagactttcaaagactgctaacgacaacaacaacagtaactttccttggacagcggccagcaaatatcatctcaatggccgcgactcgctggtgaatccaggaccagctatggccagtcacaaggacgatgaagaaaaatttttccctatgcacggcaatctaatatttggcaaagaagggacaacggcaagtaacgcagaattagataatgtaatgattacggatgaagaagagattcgtaccaccaatcctgtggcaacagagcagtatggaactgtggcaaataacttgcagagctcaaatacagctcccacgactagaactgtcaatgatcagggggccttacctggcatggtgtggcaagatcgtgacgtgtaccttcaaggacctatctgggcaaagattcctcacacggatggacactttcatccttctcctctgatgggaggctttggactgaaacatccgcctcctcaaatcatgatcaaaaatactccggtaccggcaaatcctccgacgactttcagcccggccaagtttgcttcatttatcactcagtactccactggacaggtcagcgtggaaattgagtgggagctacagaaagaaaacagcaaacgttggaatccagagattcagtacacttccaactacaacaagtctgttaatgtggactttactgtagacactaatggtgtttatagtgaacctcgccctattggaacccggtatctcacacgaaacttgtaa

SEQ ID NO: 779 - DNA, 2211 bp, Artificial Sequence
  Description of Artificial Sequence: Synthetic polynucleotide
atggctgctgacggttatcttccagattggctcgaggacaacctttctgaaggcattcgtgagtggtgggctctgaaacctggagtccctcaacccaaagcgaaccaacaacaccaggacaaccgtcggggtcttgtgcttccgggttacaaatacctcggacccggtaacggactcgacaaaggagagccggtcaacgaggcggacgcggcagccctcgaacacgacaaagcttacgaccagcagctcaaggccggtgacaacccgtacctcaagtacaaccacgccgacgccgagtttcaggagcgtcttcaagaagatacgtcttttgggggcaaccttggcagagcagtcttccaggccaaaaagaggatccttgagcctcttggtctggttgaggaagcagctaaaacggctcctggaaagaagaggcctgtagatcagtctcctcaggaaccggactcatcatctggtgttggcaaatcgggcaaacagcctgccagaaaaagactaaatttcggtcagactggcgactcagagtcagtcccagaccctcaacctctcggagaaccaccagcagcccccacaagtttgggatctaatacaatggcttcaggcggtggcgcaccaatggcagacaataacgagggtgccgatggagtgggtaattcctcaggaaattggcattgcgattcccaatggctgggcgacagagtcatcaccaccagcaccagaacctgggccctgcccacttacaacaaccatctctacaagcaaatctccggccaatcaggagcttcaaacgacaaccactactttggctacagcaccccttgggggtattttgactttaacagattccactgccacttctcaccacgtgactggcagcgactcattaacaacaactggggattccggcccaagaaactcagcttcaagctcttcaacatccaagttaaagaggtcacgcagaacgatggcacgacgactattgccaataaccttaccagcacggttcaagtgtttacggactcggagtatcagctcccgtacgtgctcgggtcggcgcaccaaggctgtctcccgccgtttccagcggacgtcttcatggtccctcagtatggatacctcaccctgaacaacggaagtcaagcggtgggacgctcatccttttactgcctggagtacttcccttcgcagatgctaaggactggaaataacttccaattcagctataccttcgaggatgtaccttttcacagcagctacgctcacagccagagtttggatcgcttgatgaatcctcttattgatcagtatctgtactacctgaacagaacgcaaggaacaacctctggaacaaccaaccaatcacggctgctttttagccaggctgggcctcagtctatgtctttgcaggccagaaattggctacctgggccctgctaccggcaacagagactttcaaagactgctaacggcaacaacaacagtaactttccttggacagcggccagcaaatatcatctcaatggccgcgactcgctggtgaatccaggaccagctatggccagtcacaaggacgatgaagaaaaatttttccctatgcacggcaatctaatatttggcaaagaagggacaacggcaagtaacgcagaattagataatgtaatgattacggatgaagaagagattcgtaccaccaatcctgtggcaacagagcagtgtggaactgtggcaaataacttgcagagctcaaatacagctcccacgactagaactgtcaatgatcagggggccttacctggcatggtgtggcaagatcgtgacgtgtaccttcaaggacctatctgggcaaagattcctcacacggatggacactttcatccttctcctctgatgggaggctttggactgaaacatccgcctcctcaaatcatgatcaaaaatactccggtaccggcaaatcctccgacgactttcagcccggccaagtttgcttcatttatcactcagtactccactggacaggtcagcgtggaaattgagtgggagctacagaaagaaaacagcaaacgttggaatccagagattcagtacacttccaactacaacaagtctgttaatgtggactttactgtagacactaatggtgtttatagtgaacctcgccctattggaacccggtatctcacacgaaacttgtaa

SEQ ID NO: 780 - DNA, 2212 bp, Artificial Sequence
  Description of Artificial Sequence: Synthetic polynucleotide
  modified_base (1283)..(1283): a, c, g, or t
atggctgctgacggttatcttccagattggctcgaggacaacctttctgaaggcattcgtgagtggtgggctctgaaacctggagtccctcaacccaaagcgaaccaacaacaccaggacaaccgtcggggtcttgtgcttccgggttacaaatacctcggaccgggtaacggactcgacaaaggagagccggtcaacgaggcggacgcggcagccctcgaacacgacaaagcttacgaccagcagctcaaggccggtgacaacccgtacctcaagtacaaccacgccgacgccgagtttcaggagcgtcttcaagaagatacgtcttttgggggcaaccttggcagagcagtcttccaggccaaaaagaggatccttgagcctcttggtctggttgagggagcagctaaaacggctcctggaaagaagaggcctgtagatcagtctcctcaggaaccggactcatcatctggtgttggcaaatcgggcaaacagcctgccagaaaaagactaaatttcggtcagactggcgactcagagtcagtcccagaccctcaacctctcggagaaccaccagcagcccccacaagtttgggatctaatacaatggcttcaggcggtggcgcaccaatggcagacaataacgagggtgccgatggagtgggtaattcctcaggaaattggcattgcgattcccaatggctgggcgacagagtcatcaccaccagcaccagaacctgggccctgcccacttacaacagccatctctacaagcaaatctccagccaatcaggagcttcaaacgacaaccactactttggctacagcaccccttgggggtattttgactttaacagattccactgccacttctcaccacgtgactggcagcgactcattaacaacaactggggattccggcccaagaaactcagcttcaagctcttcaacatccaagttaaagaggtcacgcagaacgatggcacgacgactattgccaataaccttaccagcacggtccaagtgtttacggactcggagtatcagctcccgtacgtgctcgggtcggcgcaccaaggctgtctcccgccgtttccagcggacgccttcatggtccctcagtatggatacctcaccctgaacaacggaagtcaagcggtgggacgctcatccttttactgcctggagtacttcccttcgcagatgctaaggactggaaataacttccaattcagctataccttcgaggatgtaccttttcacggcagctacgctcacagccngagtttggatcgcttgatgaatcctcttattgatcagtatctgtactacctgaacagaacgcaaggaacaacctctggaacaaccaaccaatcacggctgctttttagccaggctgggcctcagtctatgtctttgcaggccagaaattggctacctgggccctgctaccggcaacagagacttttcaaagactgctaacgacaacaacaacagtaactttccttggacagcggccagcaaatatcatctcaatggccgcgactcgctggtgaatccaggaccagctatggccagtcacaaggacgatgaagaaaaatttttccctatgcacggcaatctaatatttggcaaagaagggacaacggcaagtaacgcagaattagataatgtaatgattacggatgaagaagagattcgtaccaccaatcctgtggcaacagagcagtatggaactgtggcaaataacttgcagagctcaaatacagctcccacgactagaactgtcaatgatcagggggccttacctggcatggtgtggcaagatcgtgacgtgtaccttcaaggacctatctgggcaaagattcctcacacggatggacactttcatccttctcctctgatgggaggctttggactgaaacatccgcctcctcaaatcatgatcaaaaatactccggtaccggcaaatcctccgacgactttcagcccggccaagtttgcttcatttatcactcagtactccactggacaggtcagcgtggaaattgagtgggagctacagaaagaaaacagcaaacgttggaatccagagattcagtacacttccaactacaacaagtctgttaatgtggactttactgtagacactaatggtgtttatagtgaacctcgccctattggaacccggtatctcacacgaaactcgtaa

SEQ ID NO: 781 - DNA, 2212 bp, Artificial Sequence
  Description of Artificial Sequence: Synthetic polynucleotide
atggctgctgacggttatcttccagattggctcgaggacaacctttctgaaggcattcgtgagtggtgggctctgaaacctggagtccctcaacccaaagcgaaccaacaacaccaggacaaccgtcggggtcttgtgcttccgggttacaaatacctcggacccggtaacggactcgacaaaggagagccggtcaacgaggcggacgcggcagccctcgaacacgacaaagcttacgaccagcagctcaaggccggtgacaacccgtacctcaagtacaaccacgccgacgccgagtttcaggagcgtcttcaagaagatacgtcttttgggggcaaccttggcagagcagtcttccaggccaaaaagaggatccttgagcctcttggtctggttgagggagcagctaaaacggctcctggaaagaagaggcctgtagatcagtctcctcaggaaccggactcatcatctggtgttggcaaatcgggcaaacagcttgccagaaaaagactaaatttcggtcagactggcgactcagagtcagtcccagaccctcaacctctcggagaaccaccagcagcccccacaagtttgggatctaatacaatggcttcaggcggtggcgcaccaatggcagacaataacgagggtgccgatggagtgggtaattcctcaggaaattggcattgcgattcccaatggctgggcgacagagtcatcaccaccagcaccagaacctgggccctgcccacttacaacagccatctctacaagcaaatctccggccaatcaggagcttcaaacgacaaccactactttggctacagcaccccctgggggtattttgactttaacagattccactgccacttctcaccacgtgactggcagcgactcattaacaacaactggggattccggcccaagaaactcagcttcaagctcttcaacatccaagttaaagaggtcacgcagaacgatggcacgacgactattgccaataaccttaccagcacggttcaagtgtttacggactcggagtatcagctcccgtacgtgctcgggtcggcgcaccaaggctgtctcccgccgtttccagcggacgtcttcatggtccctcagtatggatacctcaccctgaacaacggaagtcaagcggtgggacgctcatccttttactgcctggagtacttcccttcgcagatgctaaggactggaaataacttccaattcagctataccttcgaggatgtaccttttcacagcagctacgctcacagccagagtttggatcgcttgatgaatcctcttattgatcagtatctgtactacctgaacagaacgcaaggaacaacctctggaacaaccaaccaatcacggctgctttttagccaggctgggcctcagtctatgtctttgcaggccagaaattggctacctgggccctgctaccggcaacagagactttcaaagactgctaacgacaacaacaacagtaactttccttggacagcggccagcaaatatcatctcaatggccgcgactcgctggtgaatcccaggaccagctatggccagtcacaaggacgatgaagaaaaatttttccctatgcacggcaatctaatatttggcaaagaagggacaacggcaagtaacgcagaattagataatgtaatgattacggatgaagaagagattcgtaccaccaatcctgtggcaacagagcagtatggaactgtggcaaataacttgcagagctcaaatacagctcccacgactagaactgtcaatgatcagggggccttacctggcatggtgtggcaagatcgtgacgtgtaccttcaaggacctatctgggcaaagattcctcacacggatggacactttcatccttctcctctgatgggaggctttggactgaaacatccgcctcctcaaatcatgatcaaaaatactccggtaccggcaaatcctccgacgactttcagcccggccaagtttgcttcatttatcactcagtactccactggacaggtcagcgtggaaattgagtgggagctacagaaagaaaacagcaaacgttggaatccagagattcagtacacttccaactacaacaagtctgttaatgtggactttactgtagacactaatggtgtttatagtgaacctcgccctattggaacccggtatctcacacgaaacttgtaa

SEQ ID NO: 782 - DNA, 2212 bp, Artificial Sequence
  Description of Artificial Sequence: Synthetic polynucleotide
atggctgctgacggttatcttccagattggctcgaggacaacctttctgaaggcattcgtgagtggtgggctctgaaacctggagtccctcaacccaaagcgaaccaacaacaccaggacgaccgtcggggtcttgtgcttccgggttacaaatacctcggacccggtaacggactcgacaaaggagagccggtcaacgaggcggacgcggcagccctcgaacacgacaaagcttacgaccagcagctcaaggccggtgacaacccgtgcctcaagtacaaccacgccgacgccgagtttcaggagcgtcttcaagaagatacgtcttttgggggcaaccttggcagagcagtcttccaggccaaaaagaggatccttgagcctcttggtctggttgaggaagcagctaaaacggctcctggaaagaagaggcctgtagatcagtctcctcaggaaccggactcatcatctggtgttggcaaatcgggcaaacagcctgccagaaaaagactaaatttcggtcagactggcgactcagagtcagtcccagaccctcaacctctcggagaaccaccagcagcccccacaagtttgggatctaatacaatggcttcaggcggtagcgcaccaatggcagacaataacgagggtgccgatggagtgggtaattcctcaggaaattggcattgcgattcccaatggctgggcgacagagtcatcaccaccagcaccagaacctgggccctgcccacttacaacaaccatctctacaagcaaatctccagccaatcaggagcttcaaacgacaaccactactttggctacagcaccccttgggggtattttgactttaacagattccactgccacttctcaccacgtgactggcagcgactcattaacaacaactggggattccggcccaagaaactcagcttcaagctcttcaacatccaagttaaagaggtcacgcagaacgatggcacgacgactattgccaataaccttaccagcacggttcaagtgtttacggactcggagtatcagctcccgtacgtgctcgggtcggcgcaccaaggctgtctcccgccgtttccagcggacgtcttcatggtccctcagtatggatacctcaccctgaacaacggaagtcaagcggtgggacgctcatccttttactgcctggagtacttcccttcgcagatgctaaggactggaaataacttccaattcagctataccttcgaggatgtaccttttcacagcagctacgctcacagccagagtttggatcgcttgatggatcctcttattgatcagtatctgtactacctgaacagaacgcaaggaacaacctctggaacaaccaaccaatcacggctgctttttagccaggctgggcctcagtctatgtctttgcaggccagaaattggctacctgggccctgctaccggcaacagagactttcaaagactgctaacgacaacaacaacagtaactttccttggacagcggccagcaaatatcatctcaatggccgcgactcgctggtgaatccaggaccagctatggccagtcacaaaggacgatgaagaaaaatttttccctatgcacggcaatctaatatttggcaaagaagggacaacggcaagtaacgcagaattagataatgtaatgattacggatgaagaagagattcgtaccaccaatcctgtggcaacagagcagtatggaactgtggcaaataacttgcagagctcaaatacagctcccacgactagaactgtcaatgatcagggggccttacctggcatggtgtggcaagatcgtgacgtgtaccttcaaggacctatctgggcaaagattcctcacacggatggacactttcatccttctcctctgatgggaggctttggactgaaacatccgcctcctcaaatcatgatcaaaaatactccggtaccggcaaatcctccgacgactttcagcccggccaagtttgcttcatttatcactcagtactccactggacaggtcagcgtggaaattgagtgggagctacagaaagaaaacagcaaacgttggaatccagagattcagtacacttccaactacaacaagtctgttaatgtggactttactgtagacactaatggtgtttatagtgaacctcgccctattggaacccggtatctcacacgaaacctgtaa

SEQ ID NO: 783 - DNA, 2211 bp, Artificial Sequence
  Description of Artificial Sequence: Synthetic polynucleotide
atggctgctgacggttatcttccagattggctcgaggacaacctttctgaaggcattcgtgagtggtgggctctgaaacctggagtccctcaacccaaagcgaaccaacaacaccaggacgaccgtcggggtcttgtgcttccgggttacaaatacctcggacccggtaacggactcgacaaaggagagccggtcaacgaggcggacgcggcagccctcgaacacgacaaagcttacgaccagcagctcaaggccggtgacaacccgtacctcaagtacaaccacgccgacgccgagtttcaggagcgtcttcaagaagatacgtcttttgggggcaaccttggcagagcagtcttccaggccaaaaagaggatccttgagcctcttggtctggttgaggaagcagctaaaacggctcctggaaagaagaggcctgtagatcagtctcctcaggaaccggactcatcatctggtgttggcaaatcgggcaaacagcctgccagaaaaagactaaatttcggtcagactggcgactcagagtcagtcccagaccctcaacctctcggagaaccaccagcagcccccacaagtttgggatctaatacaatggcttcaggcggtggcgcaccaatggcagacaataacgagggtgccgatggagtgggtaattcctcaggaaattggcattgcgattcccaatggctgggcaacagagtcatcaccaccagcaccagaacctgggccctgcccacttacaacaaccatctctacaagcaaatctccagccaatcaggagcttcaaacgacaaccactactttggctacagcaccccttgggggtattttgactttaacagattccactgccacttctcaccacgtgactggcagcgactcattaacaacaactggggattccggcccaagaaactcagcttcaagctcttcaacatccaagttaaagaggtcacgcagaacgatggcacgacgactattgccaataaccttaccagcacggttcaagtgtttacggactcggagtatcagctcccgtacgtgctcgggtcggcgcaccaaggctgtctcccgccgtttccagcggacgtcttcatggtccctcagtatggatacctcaccctgaacaacggaagtcaagcggtgggacgctcatccttttactgcctggagtacttcccttcgcagatgctaaggactggaaataacttccaattcagctataccttcgaggatgtaccttttcacagcagctacgctcacagccagagtttggatcgcttgatgaatcctcttattgatcagtatctgtactacctgaacagaacgcaaggaacaacctctggaacaaccaaccaatcacggctgctttttagccaggctgggcctcagtctatgtctttgcaggccagaaattggctacctgggccctgctaccggcaacagagactttcaaagactgctaacgacaacaacaacagtaactttccttggacagcggccagcaaatatcatctcaatggccgcgactcgctggtgaatccaggaccagctatggccagtcacaaggacgatgaagaaaaatttttccctatgcacggcaatctaatatttggcaaagaagggacaacggcaagtaacgcagaattagataatgtaatgattacggatgaagaagagattcgtaccaccaatcctgtggcaacagagcagtatggaactgtggcaaataacttgcagagctcaaatacagctcccacgactagaactgtcaatgatcagggggccttacctggcatggtgtggcaagatcgtgacgtgtaccttcaaggacctatctgggcaaagattcctcacacggatggacactttcatccttctcctctgatgggaggctttggactgaaacatccgcctcctcaaatcatgatcaaaaatactccggtaccggcaaatcctccgacgactttcagcccggccaagtttgcttcatttatcactcagtactccactggacaggtcagcgtggaaattgagtgggagctacagaaagaaaacagcaaacgttggaatccagagattcagtacacttccaactacaacaagtctgttaatgtggactttactgtagacactaatggtgtttatagtgaacctcgccctattggaacccggtatctcacacgaaacttgtaa

SEQ ID NO: 784 - DNA, 2211 bp, Artificial Sequence
  Description of Artificial Sequence: Synthetic polynucleotide
atggctgctgacggttatcttccagattggctcgaggacaacctttctgaaggcattcgtgagtggtgggctctgaaacctggagtccctcaacccaaagcgaaccaacaacaccaggacgaccgtcggggtcttgtgcttccgggttacaaatacctcggacccggtaacggactcgacaaaggagagccggtcaacgaggcggacgcggcagccctcgaacacgacaaagcttacgaccagcagctcaaggccggtgacaacccgtacctcaagtacaaccacgccgacgccgagtttcaggagcgtcttcaagaagatacgtcttttgggggcaaccttggcagagcagtcttccaggccaaaaagaggatccttgagcctcttggtctggttgaggaagcagctaaaacggctcctggaaagaagaggcctgtagatcagtctcctcaggaaccggactcatcatctggtgttggcaaatcgggcaaacagcctgccagaaaaagactaaatttcggtcagactggcgactcagagtcagtcccagaccctcaacctctcggagaaccaccagcagcccccacaagtttgggatctaatacaatggcttcaggcggtggcgcaccaatggcggacaataacgagggtgccgatggagtgggtaattcctcaggaaattggcattgcgattcccaatggctgggcgacagagtcatcaccaccagcaccagaacctgggccctgcccacttacaacaaccatctctacaagcaaatctccagccaatcaggagcttcaaacgacaaccactactttggctacagcaccccttgggggtattttgactttaacagattccactgccacttctcaccacgtgactggcagcgactcattaacaacaactggggattccggcccaagaaactcagcttcaagctcttcaacatccaagttaaagaggtcacgcagaacgatggcacgacgactattgccaataaccttaccagcacggttcaagtgtttacggactcggagtatcagctcccgtacgtgctcgggtcggcgcaccaaggctgtctcccgccgtttccagcggacgtcttcatggtccctcagtatggatacctcaccctgaacaacggaagtcaagcggtgggacgctcatccttttactgcctggagtacttcccttcgcagatgctaaggactggaaataacttccaattcagctataccttcgaggatgtaccttttcacagcagctacgctcacagccagagtttggatcgcttgatgaatcctcttattgatcagtatctgtactacctgaacagaacgcaaggaacaacctctggaacaaccaaccaatcacggctgctttttagccaggctgggcctcagtctatgtctttgcaggccagaaattggctacctgggccctgctaccggcaacagagactttcaaagactgctaacgacaacaacaacagtaactttccttggacagcggccagcaaatatcatctcaatggccgcgactcgctggtgaatccaggaccagctatggccagtcacaaggacgatgaagaaaaatttttccctatgcacggcaatctaatatttggcaaagaagggacaacggcaagtaacgcagaattagataatgtaatgattacggatgaagaagagattcgtaccaccaatcctgtggcaacagtgcagtatggaactgtggcaaataacttgcagagctcaaatacagctcccacgactagaactgtcaatgatcagggggccttacctggcatggtgtggcaagatcgtgacgtgtaccttcaaggacctatctgggcaaagattcctcacacggatggacactttcatccttctcctctgatgggaggctttggactgaaacatccgcctcctcaaatcatgatcaaaaatactccggtaccggcaaatcctccgacgactttcagcccggccaagtttgcttcatttatcactcagtactccactggacaggtcagcgtggaaattgagtgggagctacagaaagaaaacagcaaacgttggaatccagagattcagtacacttccaactacaacaagtctgttaatgtggactttactgtagacactaatggtgtttatagtgaacctcgccctattggaacccggtatctcacacgaaacttgtaa

SEQ ID NO: 785 - DNA, 2211 bp, Artificial Sequence
  Description of Artificial Sequence: Synthetic polynucleotide
atggctgctgacggttatcttccagattggctcgaggacaacctttctgaaggcattcgtgagtggtgggctctgaaacctggagtccctcaacccaaagcgaaccaacaacaccaggacaaccgtcggggtcttgtgcttccgggttacaaatacctcggacccggtaacggactcgacaaaggagagccggtcaacgaggcggacgcggcagccctcgaacacgacaaagcttacgaccagcagctcaaggccggtgacaacccgtacctcaagtacaaccacgccgacgccgagtttcaggagcgtcttcaagaagatacgtcttttgggggcaaccttggcagagcagtcttccaggccaaaaaggggatccttgagcctcttggtctggttgaggaagcagctaaaacggctcctggaaagaagaggcctgtagatcagtctcctcaggaaccggactcatcatctggtgttggcaaatcgggcaaacagcctgccagaaaaagactaaatttcggtcagactggcgactcagagtcagtcccagaccctcaacctctcggagaaccaccagcagcccccacaagtttgggatctaatacaatggcttcaggcggtggcgcaccaatggcagacaataacgagggtgccgatggagtgggtaattcctcaggaaattggcattgcgattcccaatggctgggcgacagagtcatcaccaccagcaccagaacctgggccctgcccacttacaacaaccatctctacaagcaaatctccagccaatcaggagcttcaaacgacaaccactactttggctacagcaccccttgggggtattttgactttaacagattccactgccacttctcaccacgtgactggcagcgactcattaacaacaactggggattccggcccaagaaactcagcttcaagctcttcaacatccaagttaaagaggtcacgcagaacgatggcacgacgactattgccaataaccttaccagcacggttcaagtgtttacggactcggagtatcagctcccgtacgtgttcgggtcggcgcaccaaggctgtctcccgccgtttccagcggacgtcttcatggtccctcagtatggatacctcaccctgaacaacggaagtcaagcggtgggacgctcatccttttactgcctggagtacttcccttcgcagatgctaaggactggaaataacttccaattcagctataccttcgaggatgtaccttttcacagcagctacgctcacagccagagttcggatcgcttgatgaatcctcttattgatcagtatctgtactacctgaacagaacgcaaggaacaacctctggaacaaccaaccaatcacggctgctttttagccaggctgggcctcagtctatgtctttgcaggccagaaattggctacctgggccctgctaccggcaacagagactttcaaagactgctaacgacaacaacaacagtaactttccttgaacagcggccagcaaatatcatctcaatggccgcgactcgctggtgaatccaggaccagctatggccagtcacaaggacgatgaagaaaaatttttccctatgcacggcaatctaatatttggcaaagaagggacaacggcaagtaacgcagaattagataatgtaatgattacggatgaagaagagattcgtaccaccaatcctgtggcaacagagcagtatggaactgtggcaaataacttgcagagctcaaatacagctcccacgactagaactgtcaatgatcagggggccttacctggcatggtgtggcaagatcgtgacgtgtaccttcaaggacctatctgggcaaagattcctcacacggatggacactttcatccttctcctctgatgggaggctttggactgaaacatccgcctcctcaaatcatgatcaaaaatactccggtaccggcaaatcctccgacgactttcagcccggccaagtttgcttcatttatcactcagtactccactggacaggtcagcgtggaaattgagtgggagctacagaaagaaaacagcaaacgttggaatccagagattcagtacacttccaactacaacaagtctgttaatgtggactttactgtagacactaatggtgtttatagtgaacctcgccctattggaacccggtatctcacacgaaacttgtaa

SEQ ID NO: 786 - DNA, 2211 bp, Artificial Sequence
  Description of Artificial Sequence: Synthetic polynucleotide
atggctgctgacggttatcttccagattggctcgaggacaacctttctgaaggcattcgtgagtggtgggctctgaaacctggagtccctcaacccaaagcgaaccaacaacaccaggacaaccgtcggggtcttgtgcttccgggttacaaatacctcggacccggtaacggactcgacgaaggagagccggtcaacgaggcggacgcggcagccctcgaacacgacaaagcttacgaccagcagctcaaggccggtgacaacccgtacctcaagtacaaccacgccgacgccgagtttcaggagcgtcttcaagaagatacgtcttttgggggcaaccttggcagagcagtcttccaggccaaaaagaggatccttgagcctcttggtctggttgagggagcagctaaaacggctcctggaaagaagaggcctgtagatcagtctcctcaggaaccggactcatcatctggtgttggcaaatcgggcaaacagcctgccagaaaaagactaaatttcggtcagactggcgactcagagtcagtcccagaccctcaacctctcggagaaccaccagcagcccccacaagtttgggatctaatacaatggcttcaggcggtggcgcaccaatggcagacaataacgagggtgccgatggagtgggtaattcctcaggaaattggcattgcgattcccaatggctgggcgacagagtcatcaccaccagcaccagaacctgggccctgcccacttacaacagccacctctacaagcaaatctccagccaatcaggagcttcaaacgacaaccactactttggctacagcaccccttgggggtattttgactttaacagattccactgccacttctcaccacgtgactggcagcgactcattaacaacaactggggattccggcccaagaaactcagcttcaagctcttcaacatccaagttaaagaggtcacgcagaacgatggcacgacgactattgccaataaccttaccagcacggttcaagtgtttacggactcggagtatcagctcccgtacgtgctcgggtcggcgcaccaaggctgtctcccgccgtttccagcggacgtcttcatggtccctcagtatggatacctcaccctgaacaacggaagtcaagcggtgggacgctcatccttttactgcctggagtacttcccttcgcagatgctaaggactggaaataacttccaattcagctataccttcgaggatgtaccttttcacagcagctacgctcacagccagagtttggatcgcttgatgaatcctcttattgatcagtatctgtactacctgaacagaacgcaaggaacaacctctggaacaaccaaccaatcacggctgctttttagccaggctgggcctcagtctatgtctttgcaggccagaaattggctacctgggccctgctaccggcaacagagactttcaaagactgctaacgacaacaacaacagtaactttccttggacagcggccagcaaatatcatctcaatggccgcgactcgctggtgaatccaggaccagctatggccagtcacaaggacgatgaagaaaaatttttccctatgcacggcaatctaatatttggcaaagaagggacaacggcaagtaacgcagaattagataatgtaatgattacggatgaagaagagattcgtaccaccaatcctgtggcaacagagcagtatggaactgtggcaaataacttgcagagctcaaatacagctcccacgactagaactgtcaatgatcagggggccttacctggcatggtgtggcaagatcgtgacgtgtaccttcaaggacctatctgggcaaagattcctcacacggatggacactttcatccttctcctctgatgggaggctttggactgaaacatccgcctcctcaaatcatgatcaaaaatactccggtaccggcaaatcctccgacgactttcagcccggccaagtttgcttcatttatcactcagtactccactggacaggtcagcgtggaaattgagtgggagctacagaaagaaaacagcaaacgttggaatccagagattcagtacacttccaactacaacaagtctgttaatgtggactttactgtagacactaatggtgtttatagtgaacctcgccctattggaacccggtatctcacacgaaacttgtaa

SEQ ID NO: 787 - DNA, 2211 bp, Artificial Sequence
  Description of Artificial Sequence: Synthetic polynucleotide
atggctgctgacggttatcttccagattggctcgaggacaacctttctgaaggcattcgtgagtggtgggctctgaaacctggagtccctcaacccaaagcgaaccaacaacaccaggacaaccgtcggggtcttgtgcttccgggttacaaatacctcggacccggtaacggactcgacaaaggagagccggtcaacgaggcggacgcggcagccctcgaacacgacaaagcttacgaccagcagctcaaggccggtgacaacccgtacctcaagtacaaccacgccgacgccgagtttcaggagcgtcttcaagaagatacgtcttttgggggcaaccttggcagagcagtcttccaggccaaaaagaggatccttgagcctcttggtctggttgagggagcagctaaaacggctcctggaaagaagaggcctgtagatcagtctcctcaggaaccggactcatcatctggtgttggcaaatcgggcaaacagcctgccagaaaaagactaaatttcggtcagactggcgactcagagtcagtcccagaccctcaacctctcggagaaccaccagcagcccccacaagtttgggatctaatacaatggcttcaggcggtggcgcaccaatggcagacaataacgagggtgccgatggagtgggtaattcctcaggaaattggcattgcgattcccaatggctgggcgacagagtcatcaccaccagcaccagaacctgggccctgcccacttacaacagccatctctacaagcaaatctccagccaatcaggagcttcaaacgacaaccactactttggctacagcaccccttggggtattttgactttaacagattccactgccacttctcaccacgtgactggcagcgactcattaacaacaactggggattccggcccaagaaactcagcttcaagctcttcaacatccaagttaaagaggtcacgcagaacgatggcacgacgactattgccaataaccttaccagcacggttcaagtgtttacggactcggagtatcagctcccgtacgtgctcgggtcggcgcaccaaggctgtctcccgccgtttccagcggacgccttcatggtccctcagtatggatacctcaccctgaacaacggaagtcaagcggtgggacgctcatccttttactgcctggagtacttcccttcgcagatgctaaggactggaaataacttccaattcagctataccctcgaggatgtaccttttcacagcagctacgctcacagccagagtttggatcgcttgatgaatcctcttattgatcagtatctgtactacctgaacagaacgcaaggaacaacctctggaacaaccaaccaatcacggctgctttttagccaggctgggcctcagtctatgtctttgcaggccagaaattggctacctgggccctgctaccggcaacagagactttcaaagactgctaacgacaacaacaacagtaactttccttggacagcggccagcaaatatcatctcaatggccgcgactcgctggtgaatccaggaccagctatggccagtcacaaaggacgatgaagaaaaatttttccctatgcacggcaatctaatatttggcaaagaagggacaacggcaagtaacgcagaattagatagtgtaatgattacggatgaagaagagattcgtaccaccaatcctgtggcaacagagcagtatggaactgtggcaaataacttgcagagctcaaatacagctcccacgactagaactgtcaatgatcagggggccttacctggcatggtgtggcaagatcgtgacgtgtaccttcaaggacctatctgggcaaagattcctcacacggatggacactttcatccttctcctctgatgggaggctttggactgaaacatccgcctcctcaaatcatgatcaaaaatactccggtaccggcaaatcctccgacgactttcagcccggccaagtttgcttcatttatcactcagtactccactggacaggtcagcgtggaaattgagtgggagctacagaaagaaaacagcaaacgttggaatccagagattcagtacacttccaactacaacaagtctgttaatgtggactttactgtagacactaatggtgtttatagtgaacctcgccctattggaacccggtatctcacacgaaacttgtaa

SEQ ID NO: 788 - DNA, 2205 bp, Artificial Sequence
  Description of Artificial Sequence: Synthetic polynucleotide
atgactgacggttaccttccagattggctagaggacaacctctctgagggcgttcgagagtggtgggcgctgcaacctggagcccctaaacccaaggcaaatcaacaacatcaggacaacgctcggggtcttgtgcttccgggttacaaatacctcggacccggcaacggactcgacaagggggaacccgtcaacgcagcggacgcggcagccctcgagcacgacaaggcctacgaccagcagctcaaggccggtgacaacccctacctcaagtacaaccacgccgacgcggagttccagcagcggcttcagggcgacacatcgtttgggggcaacctcggcagagcagtcttccaggccaaaaagagggttcttgaacctcttggtctggttgagcaagcgggtgagacggctcctggaaagaagagaccgttgattgaatccccccagcagcccgactcctccacgggtatcggcaaaaaaggcaagcagccggctaaaaagaagctcgttttcgaagacgaaactggagcaggcgacggaccccctgagggatcaacttccggagccatgtctgatgacagtgagatgcgtgcagcaactggcggagctgcagtcgagggcggacaaggtgccgatggagtgggtaatgcctcgggtgattggcattgcgattccacctggtctgagggccacgtcacgaccaccagcaccagaacctgggtcttgcccacctacaacaaccacctctacaagcgactcggagagagcctgcagtccaacacctacaacggattctccaccccctggggatactttgacttcaaccgcttccactgccacttctcaccacgtgactggcagcgactcatcaacaacaactggggcatgcgacccaaagccatgcgggtcaaaatcttcaacatccaggtcaaggaggtcacgacgtcgaacggcgagacaacggtggctaataaccttaccagcacggttcagatctttgcggactcgtcgtacgaactgccgtacgtgatggatgcgggtcaagagggcagcctgcctccttttcccaacgacgtctttatggtgccccagtacggctactgtggactggtgaccggcaacacttcgcagcaacagactgacagaaatgccttctactgcctggagtactttccttcgcagatgctgcggactggcaacaactttgaaattacgtacagttttgagaaggtgcctttccactcgatgtacgcgcacagccagagcctggaccggctgatgaaccctctcatcgaccagtacctgtggggactgcaatcgaccaccaccggaaccaccctgaatgccgggactgccaccaccaactttaccaagctgcggcctaccaacctttccaactttaaaaagaactggctgcccgggccttcaatcaagcagcagggcttctcaaagactgccaatcaaaactacaagatccctgccaccgggtcagacagtctcatcaaatacgagacgcacagcactctggacggaagatggagtgccctgacccccggacctccaatggccacggctggacctgcggacagcaagttcagcaacagccagctcatctttgcggggcctaaacagaacggcaacacggccaccgtacccgggactctgatcttcacctctgaggaggagctggcagccaccaacgctaccgatacggacatgtggggcaacctacctggcggtgaccagagcaacagcaacctgccgaccgtggacagactgacagccttgggagccgtgcctggaatggtctggcaaaacagagacatttactaccagggtcccatttgggccaagattcctcataccgatggacactttcacccctcaccgctgattggtgggtttgggctgaaacacccgcctcctcaaatttttatcaagaacaccccggtacctgcgaatcctgcgacgaccttcagctctactccggtaaactccttcattactcagtacagcactggccaggtgtcggtgcagattgactgggagatccagaaggagcggtccaaacgctggaaccccgaggtccagtttacctccaactacggacagcaaaactctctgttgtgggctcccgatgcggctgggaaatacactgagcctagggctatcggtacccgctacctcacccaccacctgtaa

SEQ ID NO: 789 - DNA, 2205 bp, Artificial Sequence
  Description of Artificial Sequence: Synthetic polynucleotide
atgactgacggttaccttccagattggctagaggacaacctctctgaaggcgttcgagagtggtgggcgctgcaacctggagcccctaaacccaaggcaaatcaacaacatcaggacaacgctcggggtcttgtgcttccgggttacaaatacctcggacccggcaacggactcgacaagggggaacccgtcaacgcagcggacgcggcagccctcgagcacgacaaggcctacgaccagcagctcaaggccggtgacaacccctacctcaagtacaaccacgccgacgcggagttccagcagcggcttcagggcgacacatcgtttgggggcaacctcggcagagcagtcttccaggccaaaaagagggttcttgaacctcttggtctggttgagcaagcgggtgagacggctcctggaaagaagagaccgttgattgaatccccccagcagcccgactcctccacgggtatcggcaaaaaaggcaagcagccggctaaaaagaagctcgttttcgaagacgaaactggagcaggcgacggaccccctgagggatcaacttccggagccatgtctgatgacagtgagatgcgtgcagcagctggcggagctgcagtcgagggcggacaaggtgccgatggagtgggtaatgcctcgggtgattggcattgcgattccacctggtctgagggccacgtcacgaccaccagcaccagaacctgggtcttgcccacctacaacaaccacctctacaagcgactcggagagagcctgcagtccaacacctacaacggattctccaccccctggggatactttgacttcaaccgcttccactgccacttcttaccacgtgactggcagcgactcatcaacaacaactggggcgtgcgacccaaagccatgcgggtcaaaatcttcaacatccaggtcaaggaggtcacgacgtcgaacggcgagacaacggtggctaataaccttaccagcacggttcagatctttgcggactcgtcgtacgaactgccgtacgtgatggatgcgggtcaagagggcagcctgcctccttttcccaacgacgtctttatggtgccccagtacggctactgtggactggtgaccggcgacacttcgcagcaacagactgacagaaatgccttctactgcctggagtactttccttcgcagatgctgcggactggcaacaactttgaaattacgtacagttttgagaaggtgcctttccactcgatgtacgcgcacagccagagcctggaccggctgatgaaccctctcatcgaccagtacctgtggggactgcaatcgaccaccaccggaaccaccctgaatgccgggactgccaccaccaactttaccaagctgcggcctaccaacttttccaactttaaaaagaactggctgcccgggccttcaatcaagcagcagggcttctcaaagactgccaatcaaaactacaagatccctgccaccgggtcagacagtctcatcaaatacgagacgcacagcactctggacggaagatggagtgccctgacccccggacctccaatggccacggctggacctgcggacagcaagttcagcaacagccagctcatctttgcggggcctaaacagaacggcaacacggccaccgtacccgggactctgatcttcacctctgaggaggagctggcagccaccaacgccaccgatacggacatgtggggcaacctacctggcggtgaccagagcaacagcaacctgccgaccgtggacagactgacagccttgggagccgtgcctggaatggtctggcaaaacagagacatttactaccagggtcccatttgggccaagattcctcataccgatggacactttcacccctcaccgctgattggtgggtttgggctgaaacacccgcctcctcaaatttttatcaagaacaccccggtacctgcgaatcctgcgacgaccttcagctctactccggtaaactccttcattactcagtacagcactggccaggtgtcggtgcagattgactgggagatccagaaggagcggtccaaacgctggaaccccgaggtccagtttacctccaactacggacagcaaaactctctgttgtgggctcccgatgcggctgggaaatacactgagcctagggctatcggtacccgctacctcacccaccacctgtaa

SEQ ID NO: 790 - DNA, 2205 bp, Artificial Sequence
  Description of Artificial Sequence: Synthetic polynucleotide
atgactgacggttaccttccagattggctagaggacaacctctctgaaggcgttcgagagtggtgggcgctgcaacctggagcccctaaacccaaggcaaatcaacaacatcaggacaacgctcggggtcttgtgcttccgggttacaaatacctcggacccggcaacggactcgacgagggggaacccgtcaacgcagcggacgcggcagccctcgagcacgacaaggcctacgaccagcagctcaaggccggtgacaacccctacctcaagtacaaccacgccgacgcggagttccagcagcggcttcagggcgacacatcgtttgggggcaacctcggcagagcagtcttccaggccaaaaagagggttcttgaacctcttggtctggttgagcaagcgggtgagacggctcctggaaagaagagaccgttgattgaatccccccagcagcccgactcctccacgggtatcggcaaaaaaggcaagcagccggctaaaaagaagctcgttttcgaagacgaaactggagcaggcgacggaccccctgagggatcaacttccggagccatgtctgatgacagtgagatgcgtgcagcagctggcggagctgcagtcgagggcggacaaggtgccgatggagtgggtaatgcctcgggtgattggcattgcgattccacctggtctgagggccacgtcacgaccaccagcaccagaacctgggtcttgcccacctacaacaaccacctctacaagcgactcggagagagcctgcagtccaacacctacaacggattctccaccccctggggatactttgacttcaaccgcttccactgccacttctcaccacgtgactggcagcgactcatcaacaacaactggggcatgcgacccaaagccatgcgggtcaaaatcttcaacatccaggtcaaggaggtcacgacgtcgaacggcgagacaacggtggctaataaccttaccagcacggttcagatctttgcggactcgtcgtacgaactgccgtacgtgatggatgcgggtcaagagggcagcctgcctccttttcccaacgacgtctttatggtgccccagtacggctactgtggactggtgaccggcaacacttcgcagcaacagactgacagaaatgccttctactgcctggagtactttccttcgcagatgctgcggactggcaacaactttgaaattacgtacagttttgagaaggtgcctttccactcgatgtacgcgcacagccagagcctggaccggctgatgaaccctctcatcgaccagtacctgtggggactgcaatcgaccaccaccggaaccaccctgaatgccgggactgccaccaccaactttaccaagctgcggcctaccaacttttccaactttaaaaagaactggctgcccgggccttcaatcaagcagcagggcttctcaaagactgccaatcaaaactacaagatccctgccaccgggtcagacagtctcatcaaatacgagacgcacagcactctggacggaagatggagtgccctgacccccggacctccaatggccacggctggacctgcggacagcaagttcagcaacagccagctcatctttgcggggcctaaacagaacggcaacacggccaccgtacccgggactctgatcttcacctctgaggaggagctggcagccaccaacgctaccgatacggacatgtggggcaacctacctggcggtgaccagagcaacagcaacctgccgaccgtggacagactgacagccttgggagccgtgcctggaatggtctggcaaaacagagacatttactaccagggtcccatttgggccaagattcctcataccgatggacactttcacccctcaccgctgattggtgggtttgggctgaaacacccgcctcctcaaatttttatcaagaacaccccggtacctgcgaatcctgcgacgaccttcagctctactccggtaaactccttcattactcagtacagcactggccaggtgtcggtgcagattgactgggagatccagaaggagcggtccaaacgctggaaccccgaggtccagtttacctccaactacggacagcaaaactctctgttgtgggctcccgatgcggctgggaaatacactgagcctagggctatcggtacccgctacctcacccaccacctgtaa

SEQ ID NO: 791 - DNA, 2205 bp, Artificial Sequence
  Description of Artificial Sequence: Synthetic polynucleotide
atgactgacggttaccttccagattggctagaggacaacctctctgaaggcgttcgagagtggtgggcgctgcaacctggagcccctaaacccaaggcaaatcaacaacatcaggacaacgctcggggtcttgtgcttccgggttacaaatacctcggacccggcaacggactcgacaagggggaacccgtcaacgcagcggacgcggcagccctcgagcacgacaaggcctacgaccagcagctcaaggccggtgacaacccctacctcaagtacaaccacgccgacgcggagttccagcagcggcttcagggcgacacatcgtttgggggcaacctcggcagagcagtcttccaggccaaaaagagggttcttgaacctcttggtctggttgagcaagcgggtgagacggctcctggaaagaagagaccgttgattgaatccccccagcagcccgactcctccacgggtatcggcaaaaaaggcaagcagccggctaaaaagaagctcgttttcgaagacggaactggagcaggcgacggaccccctgagggatcaacttccggagccatgtctgatgacagtgagatgcgtgcagcagctggcggagctgcagtcgagggcggacaaggtgccgatggagtgggtaatgcctcgggtgattggcattgcgattccacctggtctgagggccacgtcacgaccaccagcaccagaacctgggtcttgcccacctacaacaaccacctctacaagcgactcggagagagcctgcagtccaacacctacaacggattccccaccccctggggatactttgacttcaaccgcttccactgccacttctcaccacgtgactggcagcgactcatcaacaacaactggggcatgcgacccaaagccatgcgggtcaaaatcttcaacatccaggtcaaggaggtcacgacgtcgaacggcgagacaacggcggctaataaccttaccagcacggttcagatctttgcggactcgtcgtacgaactgccgtacgtgatggatgcgggtcaagagggcagcctgcctccttttcccaacgacgtctttatggtgccccagtacggctactgtggactggtgaccggcaacacttcgcagcaacagactgacagaaatgccttctactgcctggagtactttccttcgcagatgctgcggactggcaacaactttgaaattacgtacagttttgagaaggtgcctttccactcgatgtacgcgcacagccagagcctggaccggctgatgaaccctctcatcgaccagtacctgtggggactgcaatcgaccaccaccggaaccaccctgaatgccgggactgccaccaccaactttaccaagctgcggcctaccaacttttccaactttaaaaagaactggctgcccgggccttcaatcaagcagcagggcttctcaaagactgccaatcaaaactacaagatccctgccaccgggtcagacagtctcatcaaatacgagacgcacagcactctggacggaagatggagtgccctgacccccggacctccaatggccacggctggacctgcggacagcaagttcagcaacagccagctcatctttgcggggcctaaacagaacggcaacacggccaccgtacccgggactctgatcttcacctctgaggaggagctggcagccaccaacgccaccgatacggacatgtggggcaacctacctggcggtgaccagagcaacagcaacctgccgaccgtggacagactgacagccttgggagccgtgcctggaatggtctggcaaaacagagacatttactaccagggtcccatttgggccaagattcctcataccgatggacactttcacccctcaccgctgattggtgggtttgggctgaaacacccgcctcctcaaatttttatcaagaacaccccggtacctgcgaatcctgcgacgaccttcagctctactccggtaaactccttcattactcagtacagcactggccaggtgtcggtgcagattgactgggagatccagaaggagcggtccaaacgctggaaccccgaggtccagtttacctccaactacggacagcaaaactctctgttgtgggctcccgatgcggctgggaaatacactgagcctagggctatcggtacccgctacctcacccaccacctgtaa

SEQ ID NO: 792 - DNA, 2205 bp, Artificial Sequence
  Description of Artificial Sequence: Synthetic polynucleotide
atgactgacggttaccttccagattggctagaggacaacctctctgaaggcgttcgagagtggtgggcgctgcaacctggagcccctaaacccaaggcaaatcaacaacatcaggacaacgctcggggtcttgtgcttccgggttacaaatacctcggacccggcaacggactcgacaagggggaacccgtcaacgcagcggacgcggcagccctcgagcacgacaaggcctacgaccagcagctcaaggccggtgacaacccctacctcaagtacaaccacgccgacgcggagttccagcagcggcttcagggcgacacatcgtttgggggcaacctcggcagagcagtcttccaggccaaaaagagggttcttgaacctcttggtctggttgagcaagcgggtgagacggctcctggaaagaagagaccgttgattgaatccccccagcagcccgactcctccacgggtatcggcaaaaaaggcaagcagccggctaaaaagaagctcgttttcgaagacgaaactggagcaggcgacggaccccctgagggatcaacttccggagccatgtctgatgacagtgagatgcgtgcagcagctggcggagctgcagtcgagggcggacaaggtgccgatggagtgggtaatgcctcgggtgattggcattgcgattccacctggtctgagggccacgtcacgaccaccagcaccagaacctgggtcttgcccacctacaacaaccacctctacaagcgactcggagagagcctgcagtccaacacctacaacggattctccaccccctggggatactttgacttcaaccgcttccactgccacttctcaccacgtgactggcagcgactcatcaacaacaactggggcatgcgacccaaagccatgcgggtcaaaatcttcaacatccaggtcaaggaggtcacgacgtcgaacggcgagacaacggtggctaataaccttaccagcacggttcagatctttgcggactcgtcgtacgaactgccgtacgtgatggatgcgggtcaagagggcagcctgcctccttttcccaacgacgtctttatggtgccccagtacggctaccgtggactggtgaccggcaacacttcgcagcaacagactgacagaaatgccttctactgcctggagtactttccttcgcagatgctgcggactggcaacaactttgaaattacgtacagttttgagaaggtgcctttccactcgatgtacgcgcacagccagagcctggaccggctgatgaaccctctcatcgaccagtacctgtggggactgcaatcgaccaccaccggaaccaccctgaatgccgggactgccaccaccaactttaccaagctgcggcctaccaacttttccaactttaaaaagaactggctgcccgggccttcaatcaagcagcagggcttctcaaagactgccaatcaaaactacaagatccctgccaccgggtcagacagtctcatcaaatacgagacgcacagcactctggacggaagatggagtgccctgacccccggacctccaatggccacggctggacctgcggacagcaagttcagcaacagccagctcatctttgcggggcctaaacagaacggcaacacggccaccgtacccgggactctgatcttcacctctgaggaggagctggcagccaccaacgccaccgatacggacatgtggggcaacctacctggcggtgaccagagcaacagcaacctgccgaccgtggacagactgacagccttgggagccgtgcctggaatggtctggcaaaacagagacatttactaccagggtcccatttgggccaagattcctcataccgatggacactttcacccctcaccgctgattggtgggtttgggctgaaacacccgcctcctcaaatttttatcaagaacaccccggtacctgcgaatcctgcgacgaccttcagctctactccggtaaactccttcattactcagtacagcactggccaggtgtcggtgcagattgactgggagatccagaaggagcggtccaaacgctggaaccccgaggtccagtttacctccaactacggacagcaaaactctctgttgtgggctcccgatgcggctgggaaatacactgagcctagggctatcggtacccgctacctcacccaccacctgtaa

SEQ ID NO: 793 - DNA, 2205 bp, Artificial Sequence
  Description of Artificial Sequence: Synthetic polynucleotide
atgactgacggttaccttccagattggctagaggacaacctctctgaaggcgttcgagagtggtgggcgctgcaacctggagcccctaaacccaaggcaaatcaacaacatcaggacaacgctcggggtcttgtgcttcagggttacaaatacctcggacccggcaacggactcgacaagggggaacccgtcaacgcagcggacgcggcagccctcgagcacgacaaggcctacgaccagcagctcaaggccggtgacaacccctacctcaagtacaaccacgccgacgcggagttccagcagcggcttcagggcgacacatcgtttgggggcaacctcggcagagcagtcttccaggccaaaaagagggttcttgaaccccttggtctggttgagcaagcgggtgagacggctcctggaaagaagagaccgttgattgaatccccccagcagcccgactcctccacgggtatcggcaaaaaaggcaagcagccggctaaaaagaagctcgttttcgaagacgaaactggagcaggcgacggaccccctgagggatcaacttccggagccatgtctgatgacagtgagatgcgtgcagcagctggcggagctgcagtcgagggcggacaaggtgccgatggagtgggtaatgcctcgggtgattggcattgcgattccacccggtctgagggccacgtcacgaccaccagcaccagaacctgggtcttgcccacctacaacaaccacctctacaagcgactcggagagagcctgcagtccaacacctacaacggattctccaccccctggggatactttgacttcaaccgcttccactgccacttctcaccacgtgactggcagcgactcatcaacaataactggggcatgcgacccaaagccatgcgggtcaaaatcttcaacatccaggtcaaggaggtcacgacgtcgaacggcgagacaacggtggctaataaccttaccagcacggttcagatctttgcggactcgtcgtacgaactgccgtacgtgatggatgcgggtcaagagggcagcctgcctccttttcccaacgacgtctttatggtgccccagtacggctactgtggactggtgaccggcaacacttcgcagcaacagactgacagaaatgccttctactgcctggagtactttccttcgcagatgctgcggactggcaacaactttgaaattacgtacagttttgagaaggtgcctttccactcgatgtacgcgcacagccagagcctggaccggctgatgaaccctctcatcgaccagtacctgtggggactgcaatcgaccaccaccggaaccaccctgaatgccgggactgccaccaccaactttaccaagctgcggcctaccaacttttccaactttaaaaagaactggctgcccgggccttcaatcaagcagcagggcttctcaaagactgccaatcaaaactacaagatccctgccaccgggtcagacagtctcatcaaatacgagacgcacagcactctggacggaagatggagtgcccggacccccggacctccaatggccacggctggacctgcggacagcaagttcagcaacagccagctcatctttgcggggcctaaacagaacggcaacacggccaccgtacccgggactctgatcttcacctctgaggaggagctggcagccaccaacgccaccgatacggacatgtggggcaacctacctggcggtgaccagagcaacagcaacctgccgaccgtggacagactgacagccttgggagccgtgcctggaatggtctggcaaaacagagacatttactaccagggtcccatttgggccaagattcctcataccgatggacactttcacccctcaccgctgattggtgggtttgggctgaaacacccgcctcctcaaatttttatcaagaacaccccggtacctgcgaatcctgcgacgaccttcagctctactccggtaaactccttcattactcagtacagcactggccaggtgtcggtgcagattgactgggagatccagaaggagcggtccaaacgctggaaccccgaggtccagtttacctccaactacggacagcaaaactctctgttgtgggctcccgatgcggctgggaaatacactgagcctagggctatcggtacccgctacctcacccaccacctgtaa

SEQ ID NO: 794 - DNA, 2175 bp, Artificial Sequence
  Description of Artificial Sequence: Synthetic polynucleotide
atgtcttttgttgatcaccctccagattggttggaagaagttggtgaaggtcttcgcgagtttttgggccttgaagcgggcccaccgaaaccaaaacccaatcagcagcatcaagatcaagcccgtggtcttgtgctgcctggttataactatctcggacccggaaacggtctcgatcgaggagagcctgtcaacagggcagacgaggtcgcgcgagagcacgacatctcgtacaacgagcagcttgaggcgggagacaacccctacctcaagtacaaccacgcggacgccgagtttcaggagaggctcgccgacgacacatccttcgggggaaacctcggaaaggcagtctttcaggccaagaaaagggttctcgaaccttttggcctggttgaagagggtgctaagacggcccctaccggaaagcggatagacgaccactttccaaaaagaaagaaggcccggaccgaagaggactccaagccttccacctcgtcagacgccgaagctggacccagcggatcccagcagctgcaaatcccagcccaaccagcctcaagtttgggagctgatacaatgtctgcgggaggtggcggcccattgggcgacaataaccaaggtgccgatggagtgggcaatgcctcgggagattggcattgcgattccacgtggatgggggacagagtcgtcaccaagtccacccgaacctgggtgctgcccagctacaacaaccaccagtaccgagagatcaaaagcggctccgtcgacggaagcaacgccaacgcctactttggatacagcaccccctgggggtactttgactttaaccgcttccacagccactggagcccccgagactggcaaagactcatcaacaactactggggcttcagaccccggtccctcagagtcaaaatcttcaacattcaagtcaaagaggtcacggtgcaggactccaccaccaccatcgccaacaacctcacctccaccgtccaagtgtttacggacgacgactaccagctgccctacgtcgtcggcaacgggaccgagggatgcctgccggccttccctccgcaggtctttacgctgccgcagtacggttacgcgacgctgaaccgcgacaacacagaaaatcccaccgagaggagcagcttcttctgcctagagtactttcccagcaagatgctgagaacgggcaacaactttgagtttacctacaactttgaggaggtgcccttccactccagcttcgctcccagtcagaacctcttcaagctggccaacccgctggtggaccagtacttgtaccgcttcgtgagcacaaataacactggcggagtccagttcaacaagaacctggccgggagatacgccaacacctacaaaaactggttcccggggcccatgggccgaacccagggctggaacctgggctccggggtcaaccgcgccagtgtcagcgccttcgccacgaccaataggatggagctcgagggcgcgagttaccaggtgcccccgcagccgaacggcatgaccaacaacctccagggcagcaacacctatgccctggagaacactatgatcttcaacagccagccggcgaacccgggcaccaccgccacgtacctcgagggcaacatgctcatcaccagcgagagcgagacgcagccggtgaaccgcgtggcgtacaacgtcggcgggcagatggccaccaacaaccagagctccaccactgcccccgcgaccggcacgtacaacctccaggaaatcgtgcccggcagcgtgtggatggagagggacgtgtacctccaaggacccatctgggccaagatcccagagacggaggcgcactttcacccctctccggccatgggcggattcggactcaaacacccaccgcccatgatgctcatcaagaacacgcctgtgcccggaaatatcaccagcttctcggacgtgcccgtcagcagcttcatcacccagtacagcaccgggcaggtcaccgtggagatggagtgggagctcaagaaggaaaactccaagaggtggaacccagagatccagtacacaaacaactacaacgacccccagtttgtggactttgccccggacagcaccggggaatacagaaccaccagacctatcggaacccgataccttacccgacccctttaa

SEQ ID NO: 795 - DNA, 2175 bp, Artificial Sequence
  Description of Artificial Sequence: Synthetic polynucleotide
atgtcttttgttgatcaccctccagattggttggaagaagttggtgaaggtcttcgcgagtttttgggccttgaagcgggcccaccgaaaccaaaacccaatcagcagcatcaagatcaagcccgtggtcttgtgctgcctggttataactatctcggacccggaaacggtctcgatcgaggagagcctgtcaacagggcagacgaggtcgcgcgagagcacgacatctcgtacaacgagcagcttgaggcgggagacaacccctacctcaagtacaaccacgcggacgccgagtttcaggagaagctcgccgacgacacatcctccgggggaaacctcggaaaggcagtctttcaggccaagaaaagggttctcgaaccttttggcctggttgaagagggtgctaagacggcccctaccggaaagcggatagacgaccactttccaaaaagaaagaaggcccggaccgaagaggactccaagccttccacctcgtcagacgccgaagctggacccagcggatcccagcagctgcaaatcccagcccaaccagcctcaagtttgggagctgatacaatgtctgcgggaggtggcggcccattgggcgacaataaccaaggtgccgatggagtgggcaatgcctcgggagattggcattgcgattccacgtggatgggggacagagtcgtcaccaagtccacccgaacctgggtgctgcccagctacaacaaccaccagtaccgagagatcaaaagcggctccgtcgacggaagcaacgccaacgcctactttggatacagcaccccctgggggtactttgactttaaccgcttccacagccactggagcccccgagactggcaaagactcatcaacaactactggggcttcagaccccggtccctcagagtcaaaatcttcaacattcaagtcaaagaggtcacggtgcaggactccaccaccaccatcgccaacaacctcacctccaccgtccaagtgtttacggacgacgactaccagctgccctacgtcgtcggcaacgggaccgagggatgcctgccggccttccctccgcaggtctttacgctgccgcagtacggttacgcgacgctgaaccgcgacaacacagaaaatcccaccgagaggagcagcttcttctgcctagagtactttcccagcaagatgctgagaacgggcaacaactttgagtttacctacaactttgaggaggtgcccttccactccagcttcgctcccagtcagaacctcttcaagctggccaacccgctagtggaccagtacttgtaccgcttcgtgagcacaaataacactggcggagtccagttcaacaagaacctggccgggagatacgccaacacctacaaaaactggttcccggggcccatgggccgaacccagggctggaacctgggctccggggtcaaccgcgccagtgtcagcgccttcgccacgaccaataggatggagctcgagggcgcgagttaccaggtgcccccgcagccgaacggcatgaccaacaacctccagggcagcaacacctatgccctggagaacactatgatcttcaacagccagccggcgaacccgggcaccaccgccacgtacctcgagggcaacatgctcatcaccagcgagagcgagacgcagccggtgaaccgcgtggcgtacaacgtcggcgggcagatggccaccaacaaccagagctccaccactgcccccgcgaccggcacgtacaacctccaggaaatcgtgcccggcagcgtgtggatggagagggacgtgtacctccaaggacccatctgggccaagatcccagagacgggggcgcactttcacccctctccggccatgggcggattcggactcaaacacccaccgcccatgatgctcatcaagaacacgcctgtgcccggaaatatcaccagcttctcggacgtgcccgtcagcagcttcatcacccagtacagcaccgggcaggtcaccgtggagatggagtgggagctcaagaaggaaaactccaagaggtggaacccagagatccagtacacaaacaactacaacgacccccagtttgtggactttgccccggacagcaccggggaatacagaaccaccagacctatcggaacccgataccttacccgacccctttaa

SEQ ID NO: 796 - DNA, 2175 bp, Artificial Sequence
  Description of Artificial Sequence: Synthetic polynucleotide
atgtcttttgttgatcaccctccagattggttggaagaagttggtgaaggtcttcgcgagtttttgggccttgaagcgggcccaccgaaaccaaaacccaatcagcagcatcaagatcaagcccgtggtcttgtgctgcctggttataactatctcggacccggaaacggtctcgatcgaggagagcctgtcaacagggcagacgaggtcgcgcgagagcacgacatctcgtacaacgagcagcttgaggcgggagacaacccctacctcaagtacaaccacgcggacgccgagtttcaggagaagctcgccgacgacacatccttcgggggaaacctcggaaaggcagtctttcaggccaagaaaagggttctcgaaccttttggcctggttgaagagggtgctaagacggcccctaccggaaagcggatagacgaccactttccaaaaagaaagaaggcccggaccgaagaggactccaagccttccacctcgtcagacgccgaagctggacccagcggatcccagcagctgcaaatcccagcccaaccagcctcaagtttgggagctgatacaatgtctgcgggaggtggcggcccattgggcgacaataaccaaggtgccgatggagtgggcaatgcctcgggagattggcattgcgattccacgtggatgggggacagagtcgtcaccaagtccacccgaacctgggtgctgcccagctacaacaaccaccagtaccgagagatcaaaagcggctccgtcgacggaagcaacgccaacgcctactttggatacagcaccccctgggggtactttgactttaaccgcttccacagccactggagcccccgagactggcaaagactcatcaacaactactggggcttcagaccccggtccctcagagtcaaaatcttcaacattcaagtcaaagaggtcacggtgcaggactccaccaccaccatcgccaacaacctcacctccaccgtccaagtgtttacggacgacgactaccagctgccctacgtcgtcggcaacgggaccgagggatgcctgccggccttccctccgcaggtctttacgctgccgcagtacggttacgcgacactgaaccgcgacaacacagaaaatcccaccgagaggagcagcttcttctgcctagagtactttcccagcaagatgctgagaacgggcaacaactttgagtttacctacaactttgaggaggtgcccttccactccagcttcgctcccagtcagaacctcttcaagctggccaacccgctggtggaccagtacttgtaccgcttcgtgagcacaaataacactggcggagtccagttcaacaagaacctggccgggagatacgccaacacctacaaaaactggttcccggggcccatgggccgaacccagggctggaacctgggctccggggtcaaccgcgccagtgtcagcgccttcgccacgaccaataggatggagctcgagggcgcgagttaccaggtgcccccgcagccgaacggcatgaccaacaacctccagggcagcaacacctatgccctggagaacactatgatcttcaacagccagccggcgaacccgggcaccaccgccacgtacctcgagggcaacatgctcatcaccagcgagagcgagacgcagccggtgaaccgcgtggcgtacaacgtcggcgggcagatggccaccaacaaccagagctccaccactgcccccgcgaccggcacgtacaacctccaggaaatcgtgcccggcagcgtgtggatggagagggacgtgtacctccaaggacccatctgggccaagatcccagagacgggggcgcactttcacccctctccggccatgggcggattcggactcaaacacccaccgcccatgatgctcatcaagagcacgcctgtgcccggaaatatcaccagcttctcggacgtgcccgtcagcagcttcatcacccagtacagcaccgggcaggtcaccgtggagatggagtgggagctcaagaaggaaaactccaagaggtggaacccagagatccagtacacaaacaactacaacgacccccagtttgtggactttgccccggacagcaccggggaatacagaaccaccagacctatcggaacccgataccttacccgacccctttaa

SEQ ID NO: 797 - DNA, 2175 bp, Artificial Sequence
  Description of Artificial Sequence: Synthetic polynucleotide
atgtcttttgttgatcaccctccagattggttggaagaagttggtgaaggtcttcgcgagtttttgggccctgaagcgggcccaccgaaaccaaaacccaatcagcagcatcaagatcaagcccgtggtcttgtgctgcctggttataactatctcggacccggaaacggtctcgatcgaggagagcctgtcaacagggcagacgaggtcgcgcgagagcacgacatctcgtacaacgagcagcttgaggcgggagacaacccctacctcaagtacaaccacgcggacgccgagtttcaggagaagctcgccgacgacacatccttcgggggaaacctcggaaaggcagtctttcaggccaagaaaagggttctcgaaccttttggcctggttgaagagggtgctaagacggcccctaccggaaagcggatagacgaccactttccaaaaagaaagaaggtccggaccgaagaggactccaagccttccacctcgtcagacgccgaagctggacccagcggatcccagcagctgcaaatcccagcccaaccagcctcaagtttgggagctgatacaatgtctgcgggaggtggcggcccattgggcgacaataaccaaggtgccgatggagtgggcaatgcctcgggagattggcattgcgattccacgtggatgggggacagagtcgtcaccaagtccacccgaacctgggtgccgcccagctacaacaaccaccagtaccgagagatcaaaagcggctccgtcgacggaagcaacgccaacgcctactttggatacagcaccccctgggggtactttgactttaaccgcttccacagccactggagcccccgagactggcaaagactcatcaacaactactggggcttcagaccccggtccctcagagtcaaaatcttcaacattcaagtcaaagaggtcacggtgcaggactccaccaccaccatcgccaacaacctcacctccaccgtccaagtgtttacggacgacgactaccagctgccctacgtcgtcggcaacgggaccgagggatgcctgccggccttccctccgcaggtctttacgctgccgcagtacggttacgcgacgctgaaccgcgacaacacagaaaatcccaccgagaggagcagcttcttctgcctagagtactttcccagcaagatgctgagaacgggcaacaactttgagtttacctacaactttgaggaggtgcccttccactccagcttcgctcccagtcagaacctcttcaagctggccaacccgctggtggaccagtacttgtaccgcttcgtgagcacaaataacactggcggagtccagttcaacaagaacctggccgggagatacgccaacacctacaaaaactggttcccggggcccatgggccgaacccagggctggaacctgggctccggggtcaaccgcgccagtgtcagcgccttcgccacgaccaataggatggagctcgagggcgcgagttaccaggtgcccccgcagccgaacggcatgaccaacaacctccagggcagcaacacctatgccctggagaacactatgatcttcaacagccagccggcgaacccgggcaccaccgccacgtacctcgagggcaacatgctcatcaccagcgagagcgagacgcagccggtgaaccgcgtggcgtgcaacgtcggcgggcagatggccaccaacaaccagagctccaccactgcccccgcgaccggcacgtacaacctccaggaaatcgtgcccggcagcgtgtggatggagagggacgtgtacctccaaggacccatctgggccaagatcccagagacgggggcgcactttcacccctctccggccatgggcggattcggactcaaacacccaccgcccatgatgctcatcaagaacacgcctgtgcccggaaatatcaccagcttctcggacgtgcccgtcagcagcttcatcacccagtacagcaccgggcaggtcaccgtggagatggagtgggagctcaagaaggaaaactccaagaggtggaacccagagatccagtacacaaacaactacaacgacccccagtttgtggactttgccccggacagcaccggggaatacagaaccaccagacctattggaacccgataccttacccgacccctttaa

SEQ ID NO: 798 - DNA, 2175 bp, Artificial Sequence
  Description of Artificial Sequence: Synthetic polynucleotide
atgtcttttgttgatcaccctccagattggttggaagaagttggtgaaggtcttcgcgagtttttgggccttgaagcgggcccaccgaaaccaaaacccaatcagcagcatcaagatcaagcccgtggtcttgtgctgcctggttataactatctcggacccggaaacggtctcgatcgaggagagcctgtcaacagggcagacgaggtcgcgcgagagcacgacatctcgtacaacgagcagcttgaggcgggagacaacccctacctcaagtacaaccacgcggacgccgagtttcaggagaagctcgccgacgacacatccttcgggggaaacctcggaaaggcagtctttcaggccaagaaaagggttctcgaaccttttggcctggttgaagagggtgctaagacggcccctaccggaaagcggatagacgaccactttccaaaaagaaagaaggcccggaccgaagaggactccaagccttccacctcgtcagacgccgaagctggacccagcggatcccagcagctgcaaatcccagcccaaccagcctcaagtttgggagctgatacaatgtctgcgggaggtggcggcccattgggcgacaataaccaaggtgccgatggagtgggcaatgcctcgggagattggcattgcgattccacgtggatgggggacagagtcgtcaccaagtccacccgaacctgggtgctgcccagctacaacaaccaccagtaccgagagatcaaaagcggctccgtcgacggaagcaacgccaacgcctactttggatacagcaccccctgggggtactttgactttaaccgcttccacagccactggagcccccgagactggcaaagactcatcaacaactactggggcttcagaccccggtccctcagagtcaaaatcttcaacattcaagtcaaagaggtcacggtgcaggactccaccaccaccatcgccaacaacctcacctccaccgtccaagtgtttacggacgacgactaccagctgccctacgtcgtcggcaacgggaccgagggatgcctgccggccttccctccgcaggtctttacgctgccgcagtacggttacgcgacgctgaaccgcgacaacaccgaaaatcccaccgagaggagcagcttcttctgcctagagtactttcccagcaagatgctgagaacgggcaacaactttgagtttacctacaactttgaggaggtgcccttccactccagcttcgctcccagtcagaacctcttcaagctggccaacccgctggtggaccagtacttgtaccgcttcgtgagcacaaataacactggcggagtccagttcaacaagaacctggccgggagatacgccaacacctacaaaaactggttcccggggcccatgggccgaacccagggctggaacctgggctccggggtcaaccgcgccagtgtcagcgccttcgccacgaccaataggatggagctcgagggcgcgagttaccaggtgcccccgcagccgaacggcatgaccaacaacctccagggcagcaacacctatgccctggagaacactatgatcttcaacagccagccggcgaacccgggcaccaccgccacgtacctcgagggcaacatgctcatcaccagcgagagcgagacgcagccggtgaaccgcgtggcgtacaacgtcggcgggcagatggccaccaacaaccagagctccaccactgcccccgcgaccggcgcgtacaacctccaggaaatcgtgcccggcagcgtgtggatggagagggacgtgtacctccaaggacccatctgggccaagatcccagagacgggggcgcactttcacccctctccggccatgggcggattcggactcaaacacccaccgcccatgatgctcatcaagaacacgcctgtgcccggaaatatcaccagcttctcggacgtgcccgtcagcagcttcatcacccagtacagcaccgggcaggtcaccgtggagatggagtgggagctcaagaaggaaaactccaagaggtggaacccagagatccagtacacaaacaactacaacgacccccagtttgtggactttgccccggacagcaccggggaatacagaaccaccagacctatcggaacccgataccttacccgacccctttaa

SEQ ID NO: 799 - DNA, 2175 bp, Artificial Sequence
  Description of Artificial Sequence: Synthetic polynucleotide
atgtcttttgttgatcaccctccagattggttggaagaagttggtgaaggtcttcgcgagtttttgggccttgaagcgggcccaccgaaaccaaaacccaatcagcagcatcaagatcaagcccgtggtcttgtgctgcctggttataactatctcggacccggaaacggtctcgatcgaggagagcctgtcaacagggcagacggggtcgcgcgagagcacgacatctcgtacaacgagcagcttgaggcgggagacaacccctacctcaagtacaaccacgcggacgccgagtttcaggagaagctcgccgacgacacatccttcgggggaaacctcggaaaggcagtctttcaggccaagaaaagggttctcgaaccttttggcctggttgaagagggtgctaagacggcccctaccggaaagcggatagacgaccactttccaaaaagaaagaaggcccggaccgaagaggactccaagccttccacctcgtcagacgccgaagctggacccagcggatcccagcagctgcaaatcccagcccaaccagcctcaagtttgggagctgatacaatgtctgcgggaggtggcggcccattgggcgacaataaccaaggtgccgatggagtgggcaatgcctcgggagattggcattgcgattccacgtggatgggggacagagtcgtcaccaagtccacccgaacctgggtgctgcccagctacaacaaccaccagtaccgagagatcaaaagcggctccgtcgacggaagcaacgccaacgcctactttggatacagcaccccctgggggtactttgactttaaccgcttccacagccactggagcccccgagactggcaaagactcatcaacaactactggggcttcagaccccggtccctcagagtcaaaatcttcaacattcaagtcaaagaggtcacggtgcaggactccaccaccaccatcgccaacaacctcacctccaccgtccaagcgtttacggacgacgactaccagctgccctacgtcgtcggcaacgggaccgagggatgcctgccggccttccctccgcaggtctttacgctgccgcagtacggttacgcgacgctgaaccgcgacaacacagaaaatcccaccgagaggagcagcttcttctgcctagagtactttcccagcaagatgctgagaacgggcaacaactttgagtttacctacaactttgaggaggtgcccttccactccagcttcgctcccagtcagaacctcttcaagctggccaacccgctggtggaccagtacttgtaccgcttcgtgagcacaaataacactggcggagtccagttcaacaagaacctggccgggagatacgccaacacctacaaaaactggttcccggggcccatgggccgaacccagggctggaacctgggctccggggtcaaccgcgccagtgtcagcgccttcgccacgaccaataggatggagctcgagggcgcgagttaccaggtgcccccgcagccgaacggcatgaccaacaacctccagggcagcaacacctatgccctggagaacactatgatcttcaacagccagccggcgaacccgggcaccaccgccacgtacctcgagggcaacatgctcatcaccagcgagagcgagacgcagccggtgaaccgcgtggcgtacaacgtcggcgggcagatggccaccaacaaccagagctccaccactgcccccgcgaccggcacgtacaacctccaggaaatcgtgcccggcagcgtgtggatggagagggacgtgtacctccaaggacccatctgggccaagatcccagagacgggggcgcactttcacccctctccggccatgggcggattcggactcaaacacccaccgcccatgatgctcatcaagaacacgcctgtgcccggaaatatcaccagcttctcggacgtgcccgtcagcagcttcatcacccagtacagcaccgggcaggtcaccgtggagatggagtgggagctcaagaaggaaaactccaagaggtggaacccagagatccagtacacaaacaactacaacgacccccagtttgtggactttgccccggacagcaccggggaatacagaaccaccagacctatcggaacccgataccttacccgacccctttaa

SEQ ID NO: 800 - DNA, 2175 bp, Artificial Sequence
  Description of Artificial Sequence: Synthetic polynucleotide
atgtcttttgttgatcaccctccagattggttggaagaagttggtgaaggtcttcgcgagtttttgggccttgaagcgggcccaccgaaaccaaaacccaatcagcagcatcaagatcaagcccgtggtcttgtgctgcctggttataactatctcggacccggaaacggtctcgatcgaggagagcctgtcaacagggcagacgaggtcgcgcgagagcacgacatctcgtacaacgagcagcttgaggcgggagacaacccctacctcaagtacaaccacgcggacgccgagtttcaggagaagctcgccgacgacacatccttcgggggaaacctcggaaaggcagtctttcaggccaagaaaagggttctcgaaccttttggcctggttgaagagggtgctaagacggcccctaccggaaagcggatagacgaccactttccaaaaagaaagaaggcccggaccgaagaggactccaagccttccacctcgtcagacgccgaagctggacccagcggatcccagcagctgcaaatcccagcccaaccagcctcaagtttgggagctgatacaatgtctgcgggaggtggcggcccattgggcgacaataaccaaggtgccgatggagtgggcaatgcctcgggagattggcattgcgattccacgtggatgggggacagagtcgtcaccaagtccacccgaacctgggtgctgcccagctacaacaaccaccagtaccgagagatcaaaagcggctccgtcgacggaagcaacgccaacgcctactttggatacagcaccccctgggggtactttgactttaaccgcttccacagccactggagcccccgagactggcaaagactcatcaacaactactggggcttcagaccccggtccctcagagtcaaaatcttcaacattcaagtcaaagaggtcacggtgcaggactccaccaccaccatcgccaacaacctcacctccaccgtccaagtgtttacggacgacgactaccagctgccctacgtcgtcggcaacgggaccgagggatgcctgccggccttccctccgcaggtctttacgctgccgcagtacggttacgcgacgctgaaccgcgacaacacagaaaatcccaccgagaggagcagcttcttctgcctagagtactttcccagcaagatgctgagaacgggcaacaactttgagtttacctacaactttgaggaggtgcccttccactccagcttcgctcccagtcagaacctcttcaagctggccaacccgctggtggaccagtacttgtaccgcttcgtgagcacaaataacactggcggagtccagttcaacaagaacctggccgggagatacgccaacacctacaaaaactggttcccggggcccatgggccgaacccagggctggaacctgggctccggggtcaaccgcgccagtgtcagcgccttcgccacgaccaataggatggagctcgagggcgcgagttactaggtgcccccgcagccgaacggcatgaccaacaacctccagggcagcaacacctatgccctggagaacactatgatcttcaacagccagccggcgaacccgggcaccaccgccacgtacctcgagggcaacatgctcatcaccagcgagagcgagacgcagccggtgaaccgcgtggcgtacaacgtcggcgggcagatggccaccaacaaccagagctccaccactgcccccgcgaccggcacgtacaacctccaggaaatcgtgcccggcagcgtgtggatggagggggacgtgtacctccaaggacccatctgggccaagatcccagagacgggggcgcactttcacccctctccggccatgggcggattcggactcaagcacccaccgcccatgatgctcatcaagaacacgcctgtgcccggaaatatcaccagcttctcggacgtgcccgtcagcagcttcatcacccagtacagcaccgggcaggtcaccgtggagatggagtgggagctcaagaaggaaaactccaagaggtggaacccagagatccagtacacaaacaactacaacgacccccagtttgtggactttgccccggacagcaccggggaatacagaaccaccagacctatcggaacccgataccttacccgacccctttaa

SEQ ID NO: 801 - DNA, 2175 bp, Artificial Sequence
  Description of Artificial Sequence: Synthetic polynucleotide
atgtcttttgttgatcaccctccagattggttggaagaagttggtgaaggtcttcgcgagtttttgggccttgaagcgggcccaccgaaaccaaaacccaatcagcagcatcaagatcaagcccgtggtcttgtgctgcctggttataactatctcggacccggaaacggtctcgatcgaggagagcctgtcaacagggcagacgaggtcgcgcgagagcacgacatctcgtacaacgagcagcttgaggcgggagacaacccctacctcaagtacaaccacgcggacgccgagtttcaggagaagctcgccgacgacacatccttcgggggaaacctcggaaaggcagtctttcaggccaagaaaagggttctcgaaccttttggcctggttgaagagggtgctaagacggcccctaccggaaagcggatagacgaccactttccaaaaagaaagaaggtccggaccgaagaggactccaagccttccacctcgtcagacgccgaagctggacccagcggatcccagcagctgcaaatcccagcccaaccagcctcaagtttgggagctgatacaatgtctgcgggaggtggcggcccattgggcgacaataaccaaggtgccgatggagtgggcaatgcctcgggagattggcattgcgattccacgtggatgggggacagagtcgtcaccaagtccacccgaacctgggtgctgcccagctacaacaaccaccagtaccgagagatcaaaagcggctccgtcgacggaagcaacgccaacgcctactttggatacagcaccccctgggggtactttgactttaaccgcttccacagccactggagcccccgagactggcaaagactcatcaacaactactggggcttcagaccccggtccctcagagtcaaaatcttcaacattcaagtcaaagaggtcacggtgcaggactccaccaccaccatcgccaacaacctcacctccaccgtccaagtgtttacggacgacgactaccagctgccctacgtcgtcggcaacgggaccgagggatgcctgccggccttccctccgcaggtctttacgctgccgcagtacggttacgcgacgctgaaccgcgacaacacagaaaatcccaccgagaggagcagcttcttctgcctagagtactttcccagcaagatgctgagaacgggcaacaactttgagtttacctacaactttgaggaggtgcccttccactccagcttcgctcccagtcagaacctcttcaagctggccaacccgctggtggaccagtacttgtaccgcttcgtgagcacaaataacactggcggagtccagttcaacaagaacctggccgggagatacgccaacacctacaaaaactggttcccggggcccatgggccgaacccagggctggaacctgggctccggggtcaaccgcgccagtgtcagcgccttcgccacgaccaataggatggagctcgagggcgcgagttaccaggtgcccccgcagccgaacggcatgaccaacaacctccagggcagcaacacctatgccctggagaacactatgatcttcaacagccagccggcgaacccgggcaccaccgccacgtacctcgagggcaacatgctcatcaccagcgagagcgagacgcagccggtgaaccgcgtggcgtacaacgtcggcgggcagatggccaccaacaaccagagctccaccactgcccccgcgaccggcacgtacaacctccaggaaatcgtgcccggcagcgtgtggatggagagggacgtgtacctccaaggacccatctgggccaagatcccagagacgggggcgcactttcacccctctccggccatgggcggattcggactcaaacacccaccgcccatgatgctcatcaagaacacgcctgtgcccggaaatatcaccagcttctcggacgtgcccgtcagcagcttcatcacccagtacagcaccgggcaggtcaccgtggagatggagtgggagctcaagaaggaaaactccgagaggtggaacccagagatccagtacacaaacaactacaacgacccccagtttgtggactttgccccggacagcaccggggaatacagaaccaccagacctattggaacccgataccttacccgacccctttaa

SEQ ID NO: 802 - DNA, 2175 bp, Artificial Sequence
  Description of Artificial Sequence: Synthetic polynucleotide
atgtcttttgttgatcaccctccagattggttggaagaagttggtgaaggtcttcgcgagtttttgggccttgaagcgggcccaccgaaaccaaaacccaatcagcagcatcaagatcaagcccgtggtcttgtgctgcctggttataactatctcggacccggaaacggtctcgatcgaggagagcctgtcaacagggcagacgaggtcgcgcgagagcacgacatctcgtacagcgagcagcttgaggcgggagacaacccctacctcaagtacaaccacgcggacgccgagtttcaggagaagctcgccgacgacacatccttcgggggaaacctcggaaaggcagtctttcaggccaagaaaagggttctcgaaccttttggcctggttgaagagggtgctaagacggcccctaccggaaagcggatagacgaccactttccaaaaagaaagaaggcccggaccgaagaggactccaagccttccacctcgtcagacgccgaagctggacccagcggatcccagcagctgcaaatcccagcccaaccagcctcaagtttgggagctgatacaatgtctgcgggaggtggcggcccattgggcgacaataaccaaggtgccgatggagtgggcaatgcctcgggagattggcattgcgattccacgtggatgggggacagagtcgtcaccaagtccacccgaacctgggtgctgcccagctacaacaaccaccagtaccgagagatcaaaagcggctccgtcgacggaagcaacgccaacgcctactttggatacagcaccccctgggggtactttgactttaaccgcttccacagccactggagcccccgagactggcaaagactcatcaacaactactggggcttcagaccccggtccctcagagtcaaaatcttcaacattcaagtcaaagaggtcacggtgcaggactccaccaccaccatcgccaacaacctcacctccaccgtccaagtgtttacggacgacgactaccagctgccctacgtcgtcggcaacgggaccgagggatgcctgccggccttccctccgcaggtctttacgctgccgcagtacggttacgcgacgctgaaccgcgacaacacagaaaatcccaccgagaggagcagcttcttctgcctagagtactttcccagcaagatgctgagaacgggcaacaactttgagtttacctacaactttgaggaggtgcccttccactccagcttcgctcccagtcagaacctcttcaagctggccaacccgctggtggaccagtacttgtaccgcttcgtgagcacaaataacactggcggagtccagttcaacaagaacctggccgggagatacgccaacacctacaaaaactggttcccggggcccatgggccgaacccagggctggaacctgggctccggggtcaaccgcgccagtgtcagcgccttcgccacgaccaataggatggagctcgagggcgcgagttaccaggtgcccccgcagccgaacggcatgaccaacaacctccagggcagcaacacctatgccctggagaacactatgatcttcaacagccagccggcgaacccgggcaccaccgccacgtacctcgagggcaacatgctcatcaccagcgagagcgagacgcagccggtgaaccgcgtggcgtacaacgtcggcgggcagatggccaccaacaaccagagctccaccactgcccccgcgaccggcacgtacaacctccaggaaatcgtgcccggcagcgtgtggatggagagggacgtgtacctccaaggacccatctgggccaagatcccagagacgggggcgcactttcacccctctccggccatgggcggattcggactcaaacacccaccgcccatgatgctcatcaagaacacgcctgtgcccggaaatatcaccagcttctcggacgtgcccgtcagcagcttcatcacccagtacagcaccgggcaggtcaccgtggagatggagtgggagctcaagaaggaaaactccaagaggtggaacccagagatccagtacacaaacaactacaacgacccccagtttgtggactttgccccggacagcaccggggaatacagaaccgccagacctatcggaacccgataccttacccgacccctttaa

SEQ ID NO: 803 - DNA, 2175 bp, Artificial Sequence
  Description of Artificial Sequence: Synthetic polynucleotide
atgtcttttgttgatcaccctccagattggttggaagaagttggtgaaggtcttcgcgagtttttgggccctgaagcgggcccaccgaaaccaaaacccaatcagcagcatcaagatcaagcccgtggtcttgtgctgcctggttataactatctcggacccggaaacggtctcgatcgaggagagcctgtcaacagggcagacgaggtcgcgcgagagcacgacatctcgtacaacgagcagcttgaggcgggagacaacccctacctcaagtacaaccacgcggacgccgagtttcaggagaagctcgccgacgacacatccttcgggggaaacctcggaaaggcagtctttcaggccaagaaaagggttctcgaaccttttggcctggttgaagagggtgctaagacggcccctaccggaaagcggatagacgaccactttccaaaaagaaagaaggcccggaccgaagaggactccaagccttccacctcgtcagacgccgaagctggacccagcggatcccagcagctgcaaatcccagcccaaccagcctcaagtttgggagctgatacaatgtctgcgggaggtggcggcccattgggcgacaataaccaaggtgccgatggagtgggcaatgcctcgggagattggcattgcgattccacgtggatgggggacagagtcgtcaccaagtccacccgaacctgggtgctgcccagctacaacaaccaccagtaccgagagatcaaaagcggctccgtcgacggaagcaacgccaacgcctactttggatacagcaccccctgggggtactttgactttaaccgcttccacagccactggagcccccgagactggcaaagactcatcaacaactactggggcttcagaccccggtccctcagagtcaaaatcttcaacattcaagtcaaagaggtcacggtgcaggactccaccaccaccatcgccaacaacctcacctccaccgtccaagtgtttacggacgacgactaccagctgccctacgtcgtcggcaacgggaccgagggatgcctgccggccttccctccgcaggtctttacgctgccgcagtacggttacgcgacgctgaaccgcgacaacacagaaaatcccaccgagaggagcagcttcttctgcctagagtactttcccagcaagatgctgagaacgggcaacaactttgagtttacctacaactttgaggaggtgcccttccactccagcttcgctcccagtcagaacctcttcaagctggccaacccgctggtggaccagtacttgtaccgcttcgtgagcacaaataacactggcggagtccagttcaacaagaacctggccgggagatacgccaacacctacaaaaactggttcccggggcccatgggccgaacccagggctggaacctgggctccggggtcaaccgcgccagtgtcagcgccttcgccacgaccaataggatggagctcgagggcgcgagttaccaggtgcccccgcagccgaacggcatgaccaacaacctccagggcagcaacacctatgccctggagaacactatgatcttcaacagccagccggcgaacccgggcaccaccgccacgtacctcgagggcaacatgctcatcaccagcgagagcgagacgcagccggtgaaccgcgtggcgtacaacgtcggcgggcagatgaccaccaacaaccagagctccaccactgcccccgcgaccggcacgtacaacctccaggaaatcgtgcccggcagcgtgtggatggagagggacgtgtacccccaaggacccatctgggccaagatcccagagacgggggcgcactttcacccctctccggccatgggcggattcggactcaaacacccaccgcccatgatgctcatcaagaacacgcctgtgcccggaaatatcaccagcttctcggacgtgcccgtcagcagcttcatcacccagtacagcaccgggcaggtcaccgtggagatggagtgggagctcaagaaggaaaactccaagaggtggaacccagagatccagtacacaaacaactacaacgacccccagtttgtggactttgccccggacagcaccggggaatacaggaccaccagacctatcggaacccgataccttacccgacccctttaa

SEQ ID NO: 804 - DNA, 2175 bp, Artificial Sequence
  Description of Artificial Sequence: Synthetic polynucleotide
atgtcttttgttgatcaccctccagattggttggaagaagttggtgaaggtcttcgcgagtttttgggccttgaagcgggcccaccgaaaccaaaacccaatcagcagcatcaagatcaagcccgtggtcttgtgctgcctggttataactatctcggacccggaaacggtctcgatcgaggagagcctgtcaacagggcagacgaggtcgcgcgagagcacgacatctcgtacaacgagcagcttgaggcgggagacaacccctacctcaagtacaaccacgcggacgccgagtttcaggagaagctcgccgacgacacatccttcgggggaaacctcggaaaggcagtctttcaggccaagaaaagggttctcgaaccttttggcctggttgaagagggtgctaagacggcccctaccggaaagcggatagacgaccactttccaaaaagaaagaaggcccggaccgaagaggactccaagccttccacctcgtcagacgccgaagctggacccagcggatcccagcagctgcaaatcccagcccaaccagcctcaagtttgggagctgatacaatgtctgcgggaggtggcggcccattgggcgacaataaccaaggtgccgatggagtgggcaatgcctcgggagattggcattgcgattccacgtggatgggggacagagtcgtcaccaagtccacccgaacctgggtgctgcccagctacaacaaccaccagtaccgagagatcaaaagcggctccgtcgacggaagcaacgccaacgcctactttggatacagcaccccctgggggtactttgactttaaccgcttccacagccactggagcccccgagactggcaaagactcatcaacaactactggggcttcagaccccggtccctcagagtcaaaatcttcaacattcaagtcaaagaggtcacggtgcaggactccaccaccaccatcgccaacaacctcacctccaccgtccaagtgtttacggacgacgactaccagctgccctacgtcgtcggcaacgggaccgagggatgcctgccggccttccctccgcaggtctttacgctgccgcagtacggttacgcgacgctgaaccgcgacaacacagaaaatcccaccgagaggagcagcttcctctgcctagagtactttcccagcaagatgctgagaacgggcaacaactttgagtttacctacaactttgaggaggtgcccttccactccagcttcgctcccagtcagaacctcttcaagctggccaacccgctggtggaccagtacttgtaccgcttcgtgagcacaaataacactggcggagtccagttcaacaagaacctggccgggagatacgccaacacctacaaaaactggttcccggggcccatgggccgaacccagggctggaacctgggctccggggtcaaccgcgccagtgtcagcgccttcgccacgaccaataggatggagctcgagggcgcgagttaccaggtgcccccgcagccgaacggcatgaccaacaacctccagggcagcaacacctatgccctggagaacactatgatcttcaacagccagccggcgaacccgggcaccaccgccacgtacctcgagggcaacatgctcatcaccagcgagagcgagacgcagccggtgaaccgcgtggcgtacaacgtcggcgggcagatggccaccaacaaccagagctccaccactgcccccgcgaccggcacgtacaacctccaggaaatcgtgcccggcagcgtgtggatgaagagggacgtgtacctccaaggacccatctgggccaagatcccagagacgggggcgcactttcacccctctccggccatgggcggattcggactcaaacacccaccgcccatgatgctcatcaagaacacgcctgtgcccggaaatatcaccagcttctcggacgtgcccgtcagcagcttcatcacccagtacagcaccgggcaggtcaccgtggagatggagtgggagctcaagaaggaaaactccaagaggtggaacccagagatccagtacacaaacaactacaacgacccccagtttgtggactttgccccggacagcaccggggaatacagaaccaccagacctatcggaacccgataccttacccgacccctttaa

SEQ ID NO: 805 - DNA, 2175 bp, Artificial Sequence
  Description of Artificial Sequence: Synthetic polynucleotide
atgtcttttgttgatcaccctccagattggttggaagaagttggtgaaggtcttcgcgagtttttgggccttgaggcgggcccaccgaaaccaaaacccaatcagcagcatcaagatcaagcccgtggtcttgtgctgcctggttataactatctcggacccggaaacggtctcgatcgaggagagcctgtcaacagggcagacgaggtcgcgcgagagcacgacatctcgtacaacgagcagcttgaggcgggagacaacccctacctcaagtacaaccacgcggacgccgagtttcaggagaagctcgccgacgacacatccttcgggggaaacctcggaaaggcagtctttcaggccaagaaaagggttctcgaaccttttggcctggttgaagagggtgctaagacggcccctaccggaaagcggatagacgaccactttccaaaaagaaagaaggcccggaccgaagaggactccaagccttccaccccgtcagacgccgaagctggacccagcggatcccagcagctgcaaatcccagcccaaccagcctcaagtttgggagctgatacaatgtctgcgggaggtggcggcccattgggcgacaataaccaaggtgccgatggagtgggcaatgcctcgggagattggcattgcgattccacgtggatgggggacagagtcgtcaccaagtccacccgaacctgggtgctgcccagctacaacaaccaccagtaccgagagatcaaaagcggctccgtcgacggaagcaacgccaacgcctactttggatacagcaccccctgggggtactttgactttaaccgcttccacagccactggagcccccgagactggcaaagactcatcaacaactactggggcttcagaccccggtccctcagagtcaaaatcttcaacattcaagtcaaagaggtcacggtgcaggactccaccaccaccatcgccaacaacctcacctccaccgtccaagtgtttacggacgacgactaccagctgccctacgtcgtcggcaacgggaccgagggatgcctgccggccttccctccgcaggtctttacgctgccgcagtacggttacgcgacgctgaaccgcgacaacacagaaaatcccaccgagaggagcagcttcttctgcctagagtactttcccagcaagatgctgagaacgggcaacaactttgagtttacctacaactttgaggaggtgcccttccactccagcttcgctcccagtcagaacctcttcaagctggccaacccgctggtggaccagtacttgtaccgcttcgtgagcacaaataacactggcggagtccagttcaacaagaacctggccgggagatacgccaacacctacaaaaactggttcccggggcccatgggccgaacccagggctggaacctgggctccggggtcaaccgcgccagtgtcagcgccttcgccacgaccaataggatggagctcgagggcgcgagttaccaggtgcccccgcagccgaacggcatgaccaacaacctccagggcagcaacacctatgccctggagaacactatgatcttcaacagccagccggcgaacccgggcaccaccgccacgtacctcgagggcaacatgctcatcaccagcgagagcgagacgcagccggtgaaccgcgtggcgtacaacgtcggcgggcagatggccaccaacaaccagagctccaccactgcccccgcgaccggcacgtacaacctccaggaaatcgtgcccggcagcgtgtggatggagagggacgtgtacctccaaggacccatctgggccaagatcccagagacgggggcgcactttcacccctctccggccatgggcggattcggactcaaacacccaccgcccatgatgctcatcaagaacacgcctgtgcccggaaatatcaccagcttctcggacgtgcccgtcagcagcttcatcacccagtacagcaccgggcaggtcaccgtggagatggagtgggagctcaagaaggaaaactccaagaggtggaacccagagatccagtacacaaacaactacaacgacccccagtttgtggactttgccccggacagcaccggggaatacagaaccaccagacctatcggaacccgataccttacccgacccctttaa

SEQ ID NO: 806 - DNA, 2175 bp, Artificial Sequence
  Description of Artificial Sequence: Synthetic polynucleotide
atgtcttttgttgatcaccctccagattggttggaagaagttggtgaaggtcttcgcgagtttttgggccttgaagcgggcccaccgaaaccaaaacccaatcagcagcatcaagatcaagcccgtggtcttgtgctgcctggttataactatctcggacccggaaacggtctcgatcgaggagagcctgtcaacagggcagacgaggtcgcgcgagagcacgacatctcgtacaacgagcagcttgaggcgggagacaacccctacctcaagtacaaccacgcggacgccgagtttcaggagaagctcgccgacgacacatccttcgggggaaacctcggaaaggcagtctttcaggccaagaaaagggttctcgaaccttttggcctggttgaagagggtgctaagacggcccctaccggaaagcggatagacgaccactttccaaaaagaaagaaggcccggaccgaagaggactccaagccttccacctcgtcagacgccgaagctggacccagcggatcccagcagctgcaaatcccagcccaaccagcctcaagtttgggagctgatacaatgtctgcgggaggtggcggcccattgggcgacaataaccaaggtgccgatggagtgggcaatgcctcgggagattggcattgcgattccacgtggatgggggacagagtcgtcaccaagtccacccgaacctgggtgctgcccagctacaacaaccaccagtaccgagagatcaaaagcggctccgtcgacggaagcaacgccaacgcctactttggatacagcaccccctgggggtactttgactttaaccgcttccacagccactggagcccccgagactggcaaagactcatcaacaactactggggcttcagaccccggtccctcagagtcaaaatcttcaacattcaagtcaaagaggtcacggtgcaggactccaccaccaccatcgccaacaacctcacctccaccgtccaagtgtttacggacgacgactaccagctgccctacgtcgtcggcaacgggaccgagggatgcctgccggccttccctccgcaggtctttacgctgccgcagtacggttacgcgacgctgaaccgcgacaacacagaaaatcccaccgagaggagcagcttcttctgcctagagtactttcccagcaagatgctgagaacgggcaacaactttgagtttacctacaactttgaggaggtgcccttccactccagcttcgctcccagtcagaacctcttcaagctggccaacccgctggtggaccagtacttgtaccgcttcgtgagcacaaataacactggcggagtccagttcaacaagaacctggccgggagatacgccaacacccacaaaaactggttcccggggcccatgggccgaacccagggctggaacctgggctccggggtcaaccgcgccagtgtcagcgccttcgccacgaccaataggatggagctcgagggcgcgagttaccaggtgcccccgcagtcgaacggcatgaccaacaacctccggggcagcaacacctatgccctggagaacactatgatcttcaacagccagccggcgaacccgggcaccaccgccacgtacctcgagggcaacatgctcatcaccagcgagagcgagacgcagccggtgaaccgcgtggcgtacaacgtcggcgggcagatggccaccaacaaccagagctccaccactgcccccgcgaccggcacgtacaacctccaggaaatcgtgcccggcagcgtgtggatggagagggacgtgtacctccaaggacccatctgggccaagatcccagagacgggggcgcactttcacccctctccggccatgggcggattcggactcaaacacccaccgcccatgatgctcatcaagaacacgcctgtgcccggaaatatcaccagcttctcggacgtgcccgtcagcagcttcatcacccagtacagcaccgggcaggtcaccgtggagatggagtgggagctcaagaaggaaaactccaagaggtggaacccagagatccagtacacaaacaactacaacgacccccagtttgtggactttgccccggacagcaccggggaatacagaaccaccagacctatcggaacccgataccttacccgacccctttaa

SEQ ID NO: 807 - DNA, 2175 bp, Artificial Sequence
  Description of Artificial Sequence: Synthetic polynucleotide
atgtcttttgttgatcaccctccagattggttggaagaagttggtgaaggtcttcgcgagtttttgggccttgaagcgggcccaccgaaaccaaaacccaatcagcagcatcaagatcaagcccgtggtcttgtgctgcctggttataactatctcggacccggaaacggtctcgatcgaggagagcctgtcaacagggcagacgaggtcgcgcgagagcacgacatctcgtacaacgagcagcttgaggcgggagacaacccctacctcaagtacaaccacgcggacgccgagtttcaggagaagctcgccgacgacacatccttcgggggaaacctcggaaaggcagtctttcaggccaagaaaagggttctcgaaccttttggcctggttgaagagggtgctaagacggcccctaccggaaagcggatagacgaccactttccaaaaagaaagaaggcccggaccgaagaggactccaagccttccacctcgtcagacgccgaagctggacccagcggatcccagcagctgcaaatcccagcccaaccagcctcaagtttgggagctgatacaatgtctgcgggaggtggcggcccattgggcgacaataaccaaggtgccgatggagtgggcaatgcctcgggagattggcattgcgattccacgtggatgggggacagagtcgtcaccaagtccacccgaacctgggtgctgcccagctacaacaaccaccagtaccgagagatcaaaagcggctccgtcgacggaagcaacgccaacgcctactttggatacagcaccccctgggggtactttgactttaaccgcttccacagccactggagcccccgagactggcaaagactcatcaacaactactggggcttcagaccccggtccctcagagtcaaaatcttcaacattcaagtcaaagaggtcacggtgcaggactccaccaccaccatcgccaacaacctcacctccaccgtccaagtgtttacggacgacgactaccagctgccctacgtcgtcggcaacgggaccgagggatgcctgccggccttccctccgcaggtctttacgctgccgcagtacggttacgcgacgctgaaccgcgacaacacagaaaatcccaccgagaggagcagcttcttctgcctagagtactttcccagcaagatgctgagaacgggcaacaactttgagtttacctacaactttgaggaggtgcccttccactccagcttcgctcccagtcagaacctcttcaagctggccaacccgctggtggaccagtacttgtaccgcttcgtgagcacaaataacactggcggagtccagttcaacaagaacctggccgggagatacgccaacacctacaaaaactggttcccggggcccatgggccgaacccagggctggaacctgggctccggggtcaaccgcgccagtgtcagcgccttcgccacgaccaataggatggagctcgagggcgcgagttaccaggtgcccccgcagccgaacggcatgaccaacaacctccagggcagcaacacctatgccctggagaacactatgatcttcaacagccagccggcgaacccgggcaccaccgccacgtacctcgagggcaacatgctcatcaccagcgagagcgagacgcagccggtgaaccgcgtggcgtacagcgtcggcgggcagatggccaccaacaaccagagctccaccactgcccccacgaccggcacgtacaacctccaggaaatcgtgcccggcagcgtgtggatggagagggacgtgtacctccaaggacccatctgggccaagatcccagagacgggggcgcactttcacccctctccggccatgggcggattcagactcaaacacccaccgcccatgatgctcatcaagaacacgcctgtgcccggaaatatcaccagcttctcggacgtgcccgtcagcagcttcatcacccagtacagcaccgggcaggtcaccgtggagatggagtgggagctcaagaaggaaaactccaagaggtggaacccagagatccagtacacaaacaactacaacgacccccagtttgtggactttgccccggacagcaccggggaatacagaaccaccagacctatcggaacccgataccttacccgacccctttaa

SEQ ID NO: 808 - DNA, 2175 bp, Artificial Sequence
  Description of Artificial Sequence: Synthetic polynucleotide
atgtcttttgttgatcaccctccagattggttggaagaagttggtgaaggtcttcgcgagtttttgggccttgaagcgggcccaccgaaaccaaaacccaatcagcagcatcaagatcaagcccgtggtcttgtgctgcctggttataactatctcggacccggaaacggtctcgatcgaggagagcctgtcaacagggcagacgaggtcgcgcgagagcacgacatctcgtacaacgagcagcttgaggcgggagacaacccctacctcaagtacaaccacgcggacgccgagtttcaggagaagctcgccgacgacacatccttcgggggaaacctcggaaaggcagtctttcaggccaagaaaagggttctcgaaccttttggcctggttgaagagggtgctaagacggcccctaccggaaagcggatagacgaccactttccaaaaagaaagaaggcccggaccgaagaggactccaagccttccacctcgtcagacgccgaagctggacccagcggatcccagcagctgcaaatcccagcccaaccagcctcaagtttgggagctgatacaatgtctgcgggaggtggcggcccattgggcgacaataaccaaggtgccgatggagtgggcaatgcctcgggagattggcattgcgattccacgtggatgggggacagagtcgtcaccaagtccacccgaacctgggtgctgcccagctacaacaaccaccagtaccgagagatcaaaagcggctccgtcgacggaagcaacgccaacgcctactttggatacagcaccccctgggggtactttgactttaaccgcttccacagccactggagcccccgagactggcaaagactcatcaacaactactggggcttcagaccccggtccctcagagtcaaaatcttcaacattcaagtcaaagaggtcacggtgcaggactccaccaccaccatcgccaacaacctcacctccaccgtccaagtgtttacggacgacgactaccagctgccctacgtcgtcggcaacgggaccgagggatgcctgccggccttccctccgcaggtctttacgctgccgcagtacggttacgcgacgctgaaccgcgacaacacagaaaatcccaccgagaggagcagcttcttctgcctagagtactttcccagcaagatgctgagaacgggcaacaactttgagtttacctacaactttgaggaggtgcccttccactccagcttcgctcccagtcagaacctcttcaagctggccaacccgctggtggaccagtacttgtaccgcttcgtgagcacaaataacactggcggagtccagttcaacaagaacctggccgggagatacgccaacacctacaaaaactggttcccggggcccatgggccgaacccagggctggaacctgggctccggggtcaaccgcgccagtgtcagcgccttcgccgcgaccaataggatggagctcgagggcgcgagttaccaggtgcccccgcagccgaacggcatgaccaacaacctccagggcagcaacacctatgccctggagaacactatgatcttcaacagccagccggcgaacccgggcaccaccgccacgtacctcgagggcaacatgctcatcaccagcgagagcgagacgcagccggtgaaccgcgtggcgtacaacgtcggcgggcagatggccaccaacaaccagagctccaccactgcccccgcgaccggcacgtacaacctccaggaaatcgtgcccggcggcgtgtggatggagagggacgtgtacctccaaggacccatctgggccaagatcccagagacgggggcgcactttcacccctctccggccatgggcggattcggactcaaacacccaccgcccatgatgctcatcaagaacacgcctgtgcccggaaataccaccagcttctcggacgtgcccgtcagcagcttcatcacccagtacagcaccgggcaggtcaccgtggagatggagtgggagctcaagaaggaaaactccaagaggtggaacccagagatccagtacacaaacaactacaacgacccccagtttgtggactttgccccggacagcaccggggaatacagaaccaccagacctatcggaacccgataccttacccgacccctttaa

SEQ ID NO: 809 - DNA, 2175 bp, Artificial Sequence
  Description of Artificial Sequence: Synthetic polynucleotide
atgtcttttgttgatcaccctccagattggttggaagaagttggtgaaggtcttcgcgagtttttgggccttgaagcgggcccaccgaaaccaaaacccaatcagcagcatcaagatcaagcccgtggtcttgtgctgcctggttataactatctcggacccggaaacggtctcgatcgaggagagcctgtcaacagggcagacgaggtcgcgcgagagcacgacatctcgtacaacgagcagcttgaggcgggagacaacccctacctcaagtacaaccacgcggacgccgagtttcaggagaagctcgccgacgacacatccttcgggggaaacctcggaaaggtagtctttcaggccaagaaaagggttctcgaaccttttggcctggttgaagagggtgctaagacggcccctaccggaaagcggatagacgaccactttccaaaaagaaagaaggcccggaccgaagaggactccaagccttccacctcgtcagacgccgaagctggacccagcggatcccagcagctgcaaatcccagcccaaccagcctcaagtttgggagctgatacaatgtctgcgggaggtggcggcccattgggcggcaataaccaaggtgccgatggagtgggcaatgcctcgggagattggcattgcgattccacgtggatgggggacagagtcgtcaccaagtccacccgaacctgggtgctgcccagctacaacaaccaccagtaccgagagatcaaaagcggctccgtcgacggaagcaacgccaacgcctactttggatacagcaccccctgggggtactttgactttaaccgcttccacagccactggggcccccgagactggcaaagactcatcaacaactactggggcttcagaccccggtccctcagagtcaaaatcttcaacattcaagtcaaagaggtcacggtgcaggactccaccaccaccatcgccaacaacctcacctccaccgtccaagtgtttacggacgacgactaccagctgccctacgtcgtcggcaacgggaccgagggatgcctgccggccttccctccgcaggtctttacgctgccgcagtacggttacgcgacgctgaaccgcgacaacacagaaaatcccaccgagaggagcagcttcttctgcctagagtactttcccagcaagatgctgagaacgggcaacaactttgagtttacctacaactttgaggaggtgcccttccactccagcttcgctcccagtcagaacctcttcaagctggccaacccgctggtggaccagtacttgtaccgcttcgtgagcacaaataacactggcggagtccagttcaacaagaacctggccgggagatacgccaacacctacaaaaactggttcccggggcccatgggccgaacccagggctggaacctgggctccggggtcaaccgcgccagtgtcagcgccctcgccacgaccaataggatggagctcgagggcgcgagttaccaggtgcccccgcagccgaacggcatgaccaacaacctccagggcagcaacacctatgccctggagaacactatgatcttcaacagccagccggcgaacccgggcaccaccgccacgtacctcgagggcaacatgctcatcaccagcgagagcgagacgcagccggtgaaccgcgtggcgtacaacgtcggcgggcagatggccaccaacaaccagagctccaccactgcccccgcgaccggcacgtacaacctccaggaaatcgtgcccggcagcgtgtggatggagagggacgtgtacctccaaggacccatctgggccaagatcccagagacgggggcgcactttcacccctctccggccatgggcggattcggactcaaacacccaccgcccatgatgctcatcaagaacacgcctgtgcccggaaatatcaccagcttctcggacgtgcccgtcagcagcttcatcacccagtacagcaccgggcaggtcaccgtggagatggagtgggagctcaagaaggaaaactccaagaggtggaacccagagatccagtacacaaacaactacaacgacccccagtttgtggactttgccccggacagcaccggggaatacagaaccaccagacctatcggaacccgataccttacccgacccctttaa

SEQ ID NO: 810 - DNA, 2175 bp, Artificial Sequence
  Description of Artificial Sequence: Synthetic polynucleotide
atgtcttttgttgatcaccctccagattggttggaagaagttggtgaaggtcttcgcgagtttttgggccttgaagcgggcccaccgaaaccaaaacccaatcagcagcatcaagatcaagcccgtggtcttgtgctgcctggttataactatctcggacccggaaacggtctcgatcgaggagagcctgtcaacagggcagacgaggtcgcgcgagagcacgacatctcgtacaacgagcagcttgaggcgggagacaacccctacctcaagtacaaccacgcggacgccgagtttcaggagaagctcgccgacgacacatccttcgggggaaacctcggaaaggcagtctttcaggccaagaaaagggttctcgaaccttttggcctggttgaagagggtgctaagacggcccctaccggaaagcggatagacgaccactttccaaaaagaaagaaggcccggaccgaagaggactccaagccttccacctcgtcagacgccgaagctggacccagcggatcccagcagctgcaaatcccagcccaaccagcctcaagtttgggagctgatacaatgtctgcgggaggtggcggcccattgggcgacaataaccaaggtgccgatggagtgggcaatgcctcgggagattggcattgcgattccacgtggatgggggacagagtcgtcaccaagtccacccgaacctgggtgctgcccagctacaacaaccaccagtaccgagagatcaaaagcggctccgtcgacggaagcaacgccaacgcctactttggatacagcaccccctgggggtactttgactttaaccgcttccacagccactggagcccccgagactggcaaagactcatcaacaactactggggcttcagaccccggtccctcagagtcaaaatcttcaacattcaagtcaaagaggtcacggtgcaggactccaccaccaccatcgccaacaacctcacctccaccgtccaagtgtttacggacgacgactaccagctgccctacgtcgtcggcaacgggaccgagggatgcctgccggccttccctccgcaggtctttacgctgccgcagtacggttacgcgacgctgaaccgcgacaacacagaaaatcccaccgagaggagcagcttcttctgcctagagtactttcccagcaagatgctgagaacgggcaacaactttgagtttacctacaactttgaggaggtgcccttccactccagcttcgctcccagtcagaacctcttcaagctggccaacccgctggtggaccagtacttgtaccgcttcgtgagcacaaataacactggcggagtccagttcaacaagaacctggccgggagatacgccaacacctacaaaaactggttcccggggcccatgggccgaacccagggctggaacctgggctccggggtcaaccgcgccagtgtcagcgccttcgccacgaccaataggatggagctcgagggcgcgagttaccaggtgcccccgcagccgaacggcatgaccaacaacctccagggcagcaacacctatgccctggagaacactatgatcttcaacagccagccggcgaacccgggcaccaccgccacgtacctcgagggcaacatgctcatcaccagcgagagcgagacgcagccggtgaaccgcgtggcgtacaacgtcggcgggcagatggccaccaacaaccagagctccaccactgcccccgcgaccggcacgtacaacctccaggaaatcgtgcccggcagcgtgtggatggagagggacgtgtacctccaaggacccatctgagccaagatcccagagacgggggcgcactttcacccctctccggccatgggcggattcggactcaaacacccaccgcccatgatgctcatcaagaacacgcctgtgcccggaaatatcaccagcttctcggacgtgcccgtcagcagcttcatcacccagtacagcaccgggcaggtcaccgtggagatggagtgggagctcaagaaggaaaactccaagaggtggaacccagagatccagtacacaaacaactacaacgacccccagtttgtggactttgccccggacagcaccggggaatgcagaaccaccagacctatcggaacccgataccttacccgacccctttaa

SEQ ID NO: 811 - DNA, 2175 bp, Artificial Sequence
  Description of Artificial Sequence: Synthetic polynucleotide
atgtcttttgttgatcaccctccagattggttggaagaagttggtgaaggtcttcgcgagtttttgggccttgaagcgggcccaccgaaaccaaaacccaatcagcagcatcaagatcaagcccgtggtcttgtgctgcctggttataactatctcggacccggaaacggtctcgatcgaggagagcctgtcaacagggcagacgaggtcgcgcgagagcacgacatctcgtacaacgagcagcttgaggcgggagacaacccctacctcaagtacaaccacgcggacgccgagtttcaggagaagctcgccgacgacacatccttcgggggaaacctcggaaaggcagtctttcaggccaagaaaagggttctcgaaccttttggcctggttgaagagggtgctaagacggcccctaccggaaagcggatagacgaccactttccaaaaagaaagaaggcccggaccgaagaggactccaagccttccacctcgtcagacgccgaagctggacccagcggatcccagcagctgcaaatcccagcccaaccagcctcaagtttgggagctgatacaatgtctgcgggaggtggcggcccattgggcgacaataaccaaggtgccgatggagtgggcaatgcctcgggagattggcattgcgattccacgtggatgggggacagagtcgtcaccaagtccacccgaacctgggtgctgcccagctacaacaaccaccagtaccgagagatcaaaagcggctccgtcgacggaagcaacgccaacgcctactttggatacagcaccccctgggggtactttgactttaaccgcttccacagccactggagcccccgagactggcaaagactcatcaacaactactggggcttcagaccccggtccctcagagtcaaaatcctcaacattcaagtcaaagaggtcacggtgcaggactccaccaccaccatcgccaacaacctcacctccaccgtccaagtgtttacggacgacgactaccagctgccctacgtcgtcggcaacgggaccgagggatgcctgccggccttccctccgcaggtctttacgctgccgcagtacggttacgcgacgctgaaccgcgacaacacagaaaatcccaccgagaggagcagcttcttctgcctagagtactttcccagcaagatgctgagaacgggcaacaactttgagtttacctacaactttgaggaggtgcccttccactccagcttcgctcccagtcagaacctcttcaagctggccaacccgctggtgggccagtacttgtaccgcttcgtgagcacaaataacactggcggagtccagttcaacgagaacctggccgggagatacgccaacacctacaaaaactggttcccggggcccatgggccgaacccagggctggaacctgggctccggggtcaaccgcgccagtgtcagcgccttcgccacgaccaataggatggagctcgagggcgcgagttaccaggtgcccccgcagccgaacggcatgaccaacaacctccagggcagcaacacctatgccctggagaacactatgatcttcaacagccagccggcgaacccgggcaccaccgccacgtacctcgagggcaacatgctcatcaccagcgagagcgagacgcagccggtgaaccgcgtggcgtacaacgtcggcgggcagatggccaccaacaaccagagctccaccactgcccccgcgaccggcacgtacaacctccaggaaatcgtgcccggcagcgtgtggatggagagggacgtgtacctccaaggacccatctgggccaagatcccagagacgggggcgcactttcacccctctccggccatgggcggattcggactcaaacacccaccgcccatgatgctcatcaagaacacgcctgtgcccggaaatatcaccagcttctcggacgtgcccgtcagcagcttcatcacccagtacagcaccgggcaggccaccgtggagatggagtgggagctcaagaaggaaaactccaagaggtggaacccagagatccagtacacaaacaactacaacgacccccagtttgtggactttgccccggacagcaccggggaatacagaaccaccagacctatcggaacccgataccttacccgacccctttaa

SEQ ID NO: 812 - DNA, 2175 bp, Artificial Sequence
  Description of Artificial Sequence: Synthetic polynucleotide
atgtcttttgttgatcaccctccagattggttggaagaagttggtgaaggtcttcgcgagtttttgggccttgaagcgggcccaccgaaaccaaaacccaatcagcagcatcaagatcaagcccgtggtcttgtgctgcctggttataactatctcggacccggaaacggcctcgatcgaggagagcctgtcaacagggcagacgaggtcgcgcgagagcacgacatctcgtacaacgagcagcttgaggcgggagacaacccctacctcaagtacaaccacgcggacgccgagtttcaggagaagctcgccgacgacacatccttcgggggaaacctcggaaaggcagtctttcaggccaagaaaagggttctcgaaccttttggcctggttgaagagggtgctaagacggcccctaccggaaagcggatagacgaccactttccaaaaagaaagaaggcccggaccgaagaggactccaagccttccacctcgtcagacgccgaagctggacccagcggatcccagcagctgcaaatcccagcccaaccagcctcaagtttgggagctgatacaatgtctgcgggaggtggcggcccattgggcgacaataaccaaggtgccgatggagtgggcaatgcctcgggagattggcattgcgattccacgtggatgggggacagagtcgtcaccaagtccacccgaacctgggtgctgcccagctacaacaaccaccagtaccgagagatcaaaagcggctccgtcgacggaagcaacgccaacgcctactttggatacagcaccccctgggggtactttgactttaaccgcttccacagccactggagcccccgagactggcaaagactcatcaacaactactggggcttcagaccccggtccctcagagtcaaaatcttcaacattcaagtcaaagaggtcacggtgcaggactccaccaccatcatcgccaacaacctcacctccaccgtccaagtgtttacggacgacgactaccagctgccctacgtcgtcggcaacgggaccgagggatgcctgccggccttccctccgcaggtctttacgctgccgcagtacggttacgcgacgctgaaccgcgacaacacagaaaatcccaccgagaggagcagcttcttctgcctagagtactttcccagcaagatgctgagaacgggcaacaactttgagtttacctacaactttgaggaggtgcccttccactccagcttcgcccccagtcagaacctcttcaagctggccaacccgctggtggaccagtacttgtaccgcttcgtgagcacaaataacactggcggagtccagttcaacaagaacctggccgggagatacgccaacacctacaaaaactggttcccggggcccatgggccgaacccagggctggaacctgggctccggggtcaaccgcgccagtgtcagcgccttcgccacgaccaataggatggagctcgagggcgcgagttaccaggtgcccccgcagccgaacggcatgaccaacaacctccagggcagcaacacctatgccctggagaacactatgatcttcaacagccagccggcgaacccgggcaccaccgccacgtacctcgagggcaacatgctcatcaccagcgagagcgagacgcagccggtgaaccgcgtggcgtacaacgtcggcgggcagatggccaccaacaaccagagctccaccactgcccccgcgaccggcacgtacaacctccaggaaatcgtgcccggcagcgtgtggatggagagggacgtgtacctccaaggacccatctgggccaagatcccagagacgggggcgcactttcacccctctccggccatgggcggattcggactcaaacacccaccgcccatgatgctcatcaagaacacgcctgtgcccggaaatatcaccagcttctcggacgtgcccgtcagcagcttcatcacccagtacagcaccgggcaggtcaccgtggagatggagtgggagctcaagaaggaaaactccaagaggtggaacccagagatccagtacacaaacaactacaacgacccccagtttgtggactttgccccggacagcaccggggaatacagaaccaccagacctatcggaacccgataccttacccgacccctttaa

SEQ ID NO: 813 - DNA, 2175 bp, Artificial Sequence
  Description of Artificial Sequence: Synthetic polynucleotide
atgtcttttgttgatcaccctccagattggttggaagaagttggtgaaggtcttcgcgagtttttgggccttgaagcgggcccaccgaaaccaaaacccaatcagcagcatcaagatcaagcccgtggtcttgtgctgcctggttataactatctcggacccggaaacggtctcgatcgaggagagcctgtcaacagggcagacgaggtcgcgcgagagcacgacatctcgtacaacgagcagcttgaggcgggagacaacccctacctcaagtacaaccacgcggacgccgagtttcaggagaagctcgccgacgacacatccttcgggggaaacctcggaaaggcagtctttcaggccaagaaaagggttctcgaaccttttggcctggttgaagagggtgctaagacggcccctaccggaaagcggatagacgaccactttccaaaaagaaagaaggcccggaccgaagaggactccaagccttccacctcgtcagacgccgaagctggacccagcggatcccagcagctgcaaatcccagcccaaccagcctcaagtttgggagctgatacaatgtctgcgggaggtggcggcccattgggcgacaataaccaaggtgccgatggagtgggcaatgcctcgggagattggcattgcgattccacgtggatgggggacagagtcgtcaccaagtccacccgaacctgggtgctgcccagctacaacaaccaccagtaccgagagatcaaaagcggctccgtcgacggaagcaacgccaacgcctactttggatacagcaccccctgggggtactttgactttaaccgcttccacagccactggagcccccgagactggcaaagactcatcaacaactactggggcttcagaccccggtccctcagagtcaaaatcttcaacattcaagtcaaagaggtcacggtgcaggactccaccaccaccatcgccaacaacctcacctccaccgtccaagtgtttacggacgacgactaccagctgccctacgtcgtcggcaacgggaccgagggatgcctgccggccttccctccgcaggtctttacgctgccgcagtacggttacgcgacgctgaaccgcgacaacacagaaaatcccaccgagaggagcagcttcttctgcctagagtactttcccagcaagatgctgagaacgggcaacaactttgagtttacctacaactttgaggaggtgcccttccactccagcttcgctcccagtcagaacctcttcaagctggccaacccgctggtggaccagtacttgtaccgcttcgtgagcacaaataacactggcggagtccagttcaacaagaacctggccgggagatacgccaacacctacaaaaactggttcccggggcccatgggccgaacccagggctggaacctgggctccggggtcaaccgcgccagtgtcagcgccttcgccacgaccaataggatggagctcgagggcgcgagttaccaggtgcccccgcagccgaacggcatgaccaacaacctccagggcagcaacacctatgccctggagaacactatgatcttcaacagccagccggcgaacccgggcaccaccgccacgtacctcgagggcaacatgctcatcaccagcgagagcgagacgcagccggtgaaccgcgtggcgtacaacgtcggcgggcagatggccaccaacaaccagagctccaccactgcccccgcgaccggcacgtacaacctccaggaaatcgtgcccggcagcgtgtggatggagagggacgtgtacctccaaggacccatctgggccaagatcccagagacgggggcgcactttcacccctctccggccatgggcggattcggactcaaacacccaccgcccatgatgctcatcaagaacacgcctgtgcccggaaatatcaccagcctctcggacgtgcccgtcagcagcttcatcacccagtacagcaccgggcaggtcaccgtggagatggagtgggagctcaagaaggaaaactccaagaggtggaacccagagatccagtacacaaacaactacaacgacccccagtttgtggactttgccccggacagcaccggggaatacagaaccaccagacctatcggaacccgataccttacccgacccctttaa

SEQ ID NO: 814 - DNA, 2175 bp, Artificial Sequence
  Description of Artificial Sequence: Synthetic polynucleotide
atgtcttttgttgatcaccctccagattggttggaagaagttggtgaaggtcttcgcgagtttttgggccttgaagcgggcccaccgaaaccaaaacccaatcagcagcatcaagatcaagcccgtggtcttgtgctgcctggttataactatctcggacccggaaacggtctcgatcgaggagagcctgccaacagggcagacgaggtcgcgcgagagcacgacatctcgtacaacgagcagcttgaggcgggagacaacccctacctcaagtacaaccacgcgggcgccgagtttcaggagaagctcgccgacgacacatccttcgggggaaacctcggaaaggcagtctttcaggccaagaaaagggttctcgaaccttttggcctggttgaagagggtgctaagacggcccctaccggaaagcggatagacgaccactttccaaaaagaaagaaggcccggaccgaagaggactccaagccttccacctcgtcagacgccgaagctggacccagcggatcccagcagctgcaaatcccagcccaaccagcctcaagtttgggagctgatacaatgtctgcgggaggtggcggcccattgggcgacaataaccaaggtgccgatggagtgggcaatgcctcgggagattggcattgcgattccacgtggatgggggacagagtcgtcaccaagtccacccgaacctgggtgctgcccggctacaacaaccaccagtaccgagagatcaaaagcggctccgtcgacggaagcaacgccaacgcctactttggatacagcaccccctgggggtactttgactttaaccgcttccacagccactggagcccccgagactggcaaagactcatcaacaactactggggcttcagaccccggtccctcagagtcaaaatcttcaacattcaagtcaaagaggtcacggtgcaggactccaccaccaccatcgccaacaacctcacctccaccgtccaagtgtttacggacgacgactaccagctgccctacgtcgtcggcaacgggaccgagggatgcctgccggccttccctccgcaggtctttacgctgccgcagtacggttacgcgacgctgaaccgcgacaacacagaaaatcccaccgagaggagcagcttcttctgcctagagtactttcccagcaagatgctgagaacgggcaacaactttgagtttacctacaactttgaggaggtgcccttccactccagcttcgctcccagtcagaacctcttcaagctggccaacccgctggtggaccagtacttgtaccgcttcgtgagcacaaataatactggcggagtccagttcaacaagaacctggccgggagatacgccaacacctacaaaaactggttcccggggcccatgggccgaacccagggctggaacctgggctccggggtcaaccgcgccagtgtcagcgccttcgccacgaccaataggatggagctcgagggcgcgagttaccaggtgcccccgcagccgaacggcatgaccaacaacctccagggcagcaacacctatgccctggagaacactatgatcttcaacagccagccggcgaacccgggcaccaccgccacgtacctcgagggcaacatgctcatcaccagcgagagcgagacgcagccggtgaaccgcgtggcgtacaacgtcggcgggcagatggccaccaacaaccagagctccaccactgcccccgcgaccggcacgtacaacctccaggaaatcgtgcccggcagcgtgtggatggagagggacgtgtacctccaaggacccatctgggccaagatcccagagacgggggcgcactttcacccctctccggccatgggcggattcggactcaaacacccaccgcccatgatgctcatcaagaacacgcctgtgcccggaaatatcaccagcttctcggacgtgcccgtcagcagcttcatcacccagtacagcaccgggcaggtcaccgtggagatggagtgggagctcaagaaggaaaactccaagaggtggaacccagagatccagtacacaaacaactacaacgacccccagtttgtggactttgccccggacagcaccggggaatacagaaccaccagacctatcggaacccgataccttacccgacccctttaa

SEQ ID NO: 815 - DNA, 2175 bp, Artificial Sequence
  Description of Artificial Sequence: Synthetic polynucleotide
atgtcttttgttgatcaccctccagattggttggaagaagttggtgaaggtcttcgcgagtttttgggccttgaagcgggcccaccgaaaccaaaacccaatcagcagcatcaagatcaagcccgtggtcttgtgctgcctggttataactatctcggacccggaaacggtctcgatcgaggagagcctgtcaacagggcagacgaggtcgcgcgagagcacgacatctcgtacaacgagcagcttgaggcgggagacaacccctacctcaagtacaaccacgcggacgccgagtttcaggagaagctcgccgacgacacatccttcgggggaaacctcggaaaggcagtctttcaggccaagaaaagggttctcgaaccttttggcctggttgaagagggtgctaagacggcccctaccggaaagcggatagacgaccactttccaaaaagaaagaaggcccggaccgaagaggactccaagcctcccacctcgtcagacgccgaagctggacccagcggatcccagcagctgcaaatcccagcccaaccagcctcaagtttgggagctgatacaatgtctgcgggaggtggcggcccattgggcgacaataaccaaggtgccgatggagtgggcaatgcctcgggagattggcattgcgattccacgtggatgggggacagagtcgtcaccaagtccacccgaacctgggtgctgcccagctacaacaaccaccagtaccgagagatcaaaagcggctccgtcgacggaagcaacgccaacgcctactttggatacagcaccccctgggggtactttgactttaaccgcttccacagccactggagcccccgagactggcaaagactcatcaacaactactggggcttcagaccccggtccctcagagtcaaaatcttcaacattcaagtcaaagaggtcacggtgcaggactccgccaccaccatcgccaacaacctcacctccaccgtccaagtgtttacggacgacgactaccagctgccctacgtcgtcggcaacgggaccgagggatgcctgccggccttccctccgcaggtctttacgctgccgcagtacggttacgcgacgctgaaccgcgacaacacagaaaatcccaccgagaggagcagcttcttctgcctagagtactttcccagcaagatgctgagaacgggcaacaactttgagtttacctacaactttgaggaggtgcccttccactccagcttcgctcccagtcagaacctcttcaagctggccaacccgctggtggaccagtacttgtaccgcttcgtgagcacaaataacactggcggagtccagttcaacaagaacctggccgggagatacgccaacacctacaaaaactggttcccggggcccatgggccgaacccagggctggaacctgggctccggggtcaaccgcgccagtgtcagcgccttcgccacgaccaataggatggagctcgagggcgcgagttaccaggtgcccccgcagccgaacggcatgaccaacaacctccagggcagcaacacctatgccctggagaacactatgatcttcaacagccagccggcgaacccgggcaccaccgccacgtacctcgagggcaacatgctcatcaccagcgagagcgagacgcagccggtgaaccgcgtggcgtacaacgtcggcgggcagatggccaccaacaaccagagctccaccactgcccccgcgaccggcacgtacaacctccaggaaatcgtgcccggcagcgtgtggatggagagggacgtgtacctccaaggacccatctgggccaagatcccagagacgggggcgcactttcacccctctccggccatgggcggattcggactcaaacacccaccgcccatgatgctcatcaagaacacgcctgtgcccggaaatatcaccagcttctcggacgtgcccgtcagcagcttcatcacccagtacagcaccgggcaggtcaccgtggagatggagtgggagctcaagaaggaaaactccaagaggtggaacccagagatccagtacacaaacaactacaacgacccccagtttgtggactttgccccggacagcaccggggaatacagaaccaccagacctatcggaacccgataccttacccgacccctttaa

SEQ ID NO: 816 - DNA, 2175 bp, Artificial Sequence
  Description of Artificial Sequence: Synthetic polynucleotide
atgtcttttgttgatcaccctccagattggttggaagaagttggtgaaggtcttcgcgagtttttgggccttgaagcgggcccaccgaaaccaaaacccaatcagcagcatcaagatcaagcccgtggtcttgtgctgcctggttataactatctcggacccggaaacggtctcgatcgaggagagcctgtcaacagggcagacgaggtcgcgcgagagcacgacatctcgtacaacgagcagcttgaggcgggagacaacccctacctcaagtacaaccacgcggacgccgagtttcaggagaagctcgccgacgacacatccttcgggggaaacctcggaaaggcagtctttcaggccaagaaaagggttctcgaaccttttggcctggttgaagagggtgctaagacggcccctaccggaaagcggatagacgaccactttccaaaaagaaagaaggcccggaccgaagaggactccaagccttccacctcgtcagacgccgaagctggacccagcggatcccagcagccgcaaatcccagcccaaccagcctcaagtttgggagctgatacaatgtctgcgggaggtggcggcccattgggcgacaataaccaaggtgccgatggagtgggcaatgcctcgggagattggcattgcgattccacgtggatgggggacagagtcgtcaccaagtccacccgaacctgggtgctgcccagctacaacaaccaccagtaccgagagatcaaaagcggctccgtcgacggaagcaacgccaacgcctactttggatacagcaccccctgggggtactttgactttaaccgcttccacagccactggagcccccgagactggcaaagactcatcaacaactactggggcttcagaccccggtccctcagagtcaaaatcttcaacattcaagtcaaagaggtcacggtgcaggactccaccaccaccatcgccaacaacctcacctccaccgtccaagtgtttacggacgacgactaccagctgccctacgtcgtcggcaacgggaccgagggatgcctgccggccttccctccgcaggtctttacgctgccgcagtacggttacgcgacgctgaaccgcgacaacacagaaaatcccaccgagaggagcagcttcttctgcctagagtactttcccagcaagatgctgagaacgggcaacaactttgagtttacctacaactttgaggaggtgcccttccactccagcttcgctcccagtcagaacctcttcaagctggccaacccgctggtggaccagtacttgtaccgcttcgtgagcacaaataacactggcggagtccagttcaacaagaacctggccgggagatacgccaacacctacaaaaactggttcccggggcccatgggccgaacccagggctggaacctgggctccggggtcaaccgcgccagtgtcagcgccttcgccacgaccaataggatggagctcgagggcgcgagttaccaggtgcccccgcagccgaacggcatgaccaacaacctccagggcagcaacacctatgccctggagaacactatgatcttcaacagccagccggcgaacccgggcaccaccgccacgtacctcgagggcaacatgctcatcaccagcgagagcgagacgcagccggtgaaccgcgtggcgtacaacgtcggcgggcagatggccaccaacaaccagagctccaccactgcccccgcgaccggcacgtacaacctccaggaaatcgtgcccggcagcgtgtggatggagagggacgtgtacctccaaggacccatctgggccaagatcccagagacgggggcgcactttcacccctctccggccatgggcggattcggactcaaacacccaccgcccatgatgctcatcaagaacacgcctgcgcccggaaatatcaccagcttctcggacgtgcccgtcagcagcttcatcacccagtacagcaccgggcaggtcaccgtggagatggagtgggagctcaagaaggaaaactccaagaggtggaacccagagatccagtacacaaacaactacaacgacccccagtttgtggactttgccccggacagcaccggggaatacagaaccaccagacctatcggaacccgataccttacccgacccctttaa

SEQ ID NO: 817 - DNA, 2175 bp, Artificial Sequence
  Description of Artificial Sequence: Synthetic polynucleotide
atgtcttttgttgatcaccctccagattggttggaagaagttggtgaaggtcttcgcgagtttttgggccttgaagcgggcccaccgaaaccaaaacccaatcagcagcatcaagatcaagcccgtggtcttgtgctgcctggttataactatctcggacccggaaacggtctcgatcgaggagagcctgtcaacagggcagacgaggtcgcgcgagagcacgacatctcgtacaacgagcagcttgaggcgggagacaacccctacctcaagtacaaccacgcggacgccgagtttcaggagaagctcgccgacgacacatccttcgggggaaacctcggaaaggcagtctttcaggccaagaaaagggttctcgaaccttttggcctggttgaagagggtgctaagacggcccctaccggaaagcggatagacgaccactttccaaaaagaaagaaggcccggaccgaagaggactccaagcctcccacctcgtcagacgccgaagctggacccagcggatcccagcagctgcaaatcccagcccaaccagcctcaagtttgggagctgatacaatgtctgcgggaggtggcggcccattgggcgacaataaccaaggtgccgatggagtgggcaatgcctcgggagattggcattgcgattccacgtggatgggggacagagtcgtcaccaagtccacccgaacctgggtgctgcccagctacaacaaccaccagtaccgagagatcaaaagcggctccgtcgacggaagcaacgccaacgcctactttggatacagcaccccctgggggtactttgactttaaccgcttccacagccactggagcccccgagactggcaaagactcatcaacaactactggggcttcagaccccggtccctcagagtcaaaatcttcaacattcaagtcaaagaggtcacggtgcaggactccaccaccaccatcgccaacaacctcacctccaccgtccaagtgtttacggacgacgactaccagctgccctacgtcgtcggcaacgggaccgagggatgcctgccggccttccctccgcaggtctttacgctgccgcagtacggttacgcgacgctgaaccgcgacaacacagaaaatcccaccgagaggagcagcttcttctgcctagagtactttcccagcaagatgctgagaacgggcaacaactttgagtttacctacaactttgaggaggtgcccttccactccagcttcgctcccagtcagaacctcttcaagctggccaacccgctggtggaccagtacttgtaccgcttcgtgagcacaaataacactggcggagtccagttcaacaagaacctggccgggagatacgccaacacctacaaaaactggttcccggggcccatgggccgaacccagggctggaacctgggctccggggtcaaccgcgccagtgtcagcgccttcgccacgaccaataggatggagctcgagggcgcgagttaccaggtgcccccgcagccgaacggcatgaccaacaacctccagggcagcaacacctatgccctggagaacactatgatcttcaacagccagccggcgaacccgggcaccaccgccacgtacctcgagggcaacatgctcatcaccagcgagagcgagacgcagccggtgaaccgcgtggcgtacaacgtcggcgggcagatggccaccaacaaccagagctccaccactgcccccgcgaccggcacgtacaacctccaggaaatcgtgcccggcagcgtgtggatggagagggacgtgtacctccaaggacccatctgggccaagatcccagagacgggggcgcactttcacccctctccggccatgggcggattcggactcaaacacccaccgcccatgatgctcatcaagaacacgcctgtgcccggaaatatcaccagcttctcggacgtgcccgtcagcagcttcatcacccagtacagcaccgggcaggtcaccgtggagatggagtgggagctcaagaaggaaaactccaagaggtggaacccagagatccagtacacaaacaactacaacgacccccagtttgtggactttgccccggacagcaccggggaatacagaaccaccagacctatcggaacccgataccttacccgacccctttaa

SEQ ID NO: 818 - DNA, 2175 bp, Artificial Sequence
  Description of Artificial Sequence: Synthetic polynucleotide
atgtcttttgttgatcaccctccagattggttggaagaagttggtgaaggtcttcgcgagtttttgggccttgaagcgggcccaccgaaaccaaaacccaatcagcagcatcaagatcaagcccgtggtcttgtgctgcctggttataactatctcggacccggaaacggtctcgatcgaggagagcctgtcaacagggcagacgaggtcgcgcgagagcacgacatctcgtacaacgagcagcttgaggcgggagacaacccctacctcaagtacaaccacgcggacgccgagtttcaggagaagctcgccgacgacacatccttcgggggaaacctcggaaaggcagtctttcaggccaagaaaagggttctcgaaccttttggcctggttgaagagggtgctaagacggcccctaccggaaagcggatagacgaccactttccaaaaagaaagaaggcccggaccgaagaggactccaagcctcccacctcgtcagacgccgaagctggacccagcggatcccagcagctgcaaatcccagcccaaccagcctcaagtttgggagctgatacaatgtctgcgggaggtggcggcccattgggcgacaataaccaaggtgccgatggagtgggcaatgcctcgggagattggcattgcgattccacgtggatgggggacagagtcgtcaccaagtccacccgaacctgggtgccgcccagctacaacaaccaccagtaccgagagatcaaaagcggctccgtcgacggaagcaacgccaacgcctactttggatacagcaccccctgggggtactttgactttaaccgcttccacagccactggagcccccgagactggcaaagactcatcaacaactactggggcttcagaccccggtccctcagagtcaaaatcttcaacattcaagtcaaagaggtcacggtgcaggactccaccaccaccatcgccaacaacctcacctccaccgtccaagtgtttacggacgacgactaccagctgccctacgtcgtcggcaacgggaccgagggatgcctgccggccttccctccgcaggtctttacgctgccgcagtacggttacgcgacgctgaaccgcgacaacacagaaaatcccaccgagaggagcagcttcttctgcctagagtactttcccagcaagatgctgagaacgggcaacaactttgagtttacctacaactttgaggaggtgcccttccactccagcttcgctcccagtcagaacctcttcaagctggccaacccgctggtggaccagtacttgtaccgcttcgtgagcacaaataacactggcggagtccagttcaacaagaacctggccgggagatacgccaacacctacaaaaactggttcccggggcccatgggccgaacccagggctggaacctgggctccggggtcaaccgcgccagtgtcagcgccttcgccacgaccaataggatggagctcgagggcgcgagttaccaggtgcccccgcagccgaacggcatgaccaacaacctccagggcagcaacacctatgccctggagaacactatgatcttcaacagccagccggcgaacccgggcaccaccgccacgtacctcgagggcaacatgctcatcaccagcgagagcgagacgcagccggtgaaccgcgtggcgtacaacgtcggcgggcagatggccaccaacaaccagagctccaccactgcccccgcgaccggcacgtacaacctccaggaaatcgtgcccggcagcgtgtggatggagagggacgtgtacctccaaggacccatctgggccaagatcccagagacgggggcgcactttcacccctctccggccatgggcggattcggactcaaacacccaccgcccatgatgctcatcaagaacacgcctgtgcccggaaatatcaccagcttctcggacgtgcccgtcagcagcttcatcacccagtacagcaccgggcaggtcgccgtggagatggagtgggagctcaagaaggaaaactccaagaggtggaacccagagatccagtacacaaacaactacaacgacccccagtttgtggactttgccccggacagcaccggggaatacagaaccaccagacctatcggaacccgataccttacccgacccctttaa

SEQ ID NO: 819 - DNA, 2175 bp, Artificial Sequence
  Description of Artificial Sequence: Synthetic polynucleotide
atgtcttttgttgatcaccctccagattggttggaagaagttggtgaaggtcttcgcgagtttttgggccttgaagcgggcccaccgaaaccaaaacccaatcagcagcatcaagatcaagcccgtggtcttgtgctgcctggttataactatctcggacccggaaacggtctcgatcgaggagagcctgtcaacagggcagacgaggtcgcgcgagagcacgacatctcgtacaacgagcagcttgaggcgggagacaacccctacctcaagtacaaccacgcggacgccgagtttcaggagaagctcgccgacgacacatccttcgggggaaacctcggaaaggcagtctttcaggccaagaaaagggttctcgaaccttttggcctggttgaagagggtgctaagacggcccctaccggaaagcggatagacgaccactttccaaaaagaaagaaggcccggaccgaagaggactccaagccttccacctcgtcagacgccgaagctggacccagcggatcccagcagctgcaaatcccagcccaaccagcctcaagtttgggagctgatacaatgtctgcgggaggtggcggcccattgggcgacaataaccaaggtgccgatggagtgggcaatgcctcgggagattggcattgcgattccacgtggatgggggacagagtcgtcaccaagtccacccgaacctgggtgctgcccagctacaacaaccaccagtaccgagagatcaaaagcggctccgtcgacggaagcaacgccaacgcctactttggatacagcaccccctgggggtactttgactttaaccgcttccacagccactggagcccccgagactggcaaagactcatcaacaactactggggcttcagaccccggtccctcagagtcaaaatcttcaacattcaagtcaaagaggtcacggtgcaggactccaccaccaccatcgccaacaacctcacctccaccgtccaagtgtttacggacgacgactaccagctgccctacgtcgtcggcaacgggaccgagggatgcctgccggccttccctccgcaggtctttacgctgccgcagtacggttacgcgacgctgaaccgcgacaacacagaaaatcccaccgagaggagcagcttcttctgcctagagtactttcccagcaagatgctgagaacgggcaacaactttgagtttacctacaactttgaggaggtgcccttccactccagcttcgctcccagtcagaacctcttcaagctggccaacccgctggtggaccagtacttgtaccgcttcgtgagcacaaataacactggcggagtccagttcaacaagaacctggccgggagatacgccaacacctacaaaaactggttcccggggcccatgggccgaacccagggctggaacctgggctccggggtcaaccgcgccagtgtcagcgccttcgccacgaccaataggatggagctcgagggcgcgagttaccaggtgcccccgcagccgaacggcatgaccaacaacctccagggcagcaacacctatgccctggagaacactatgatcttcaacagccagccggcgaacccgggcaccaccgccacgtacctcgagggcaacatgctcatcaccagcgagagcgagacgcagccggtgaaccgcgtggcgtacaacgtcggcgggcagatggccaccaacaaccagagctccaccactgcccccgcgaccggcacgtacaacctccaggaaatcgtgcccggcagcgtgtggatggagagggacgtgtacctccaaggacccatctgggccaagatcccagagacgggggcgcactttcacccctctccggccatgggcggattcggactcaaacacccaccgcccatgatgctcatcaagaacacgcctgcgcccggaaatatcaccagcttctcggacgtgcccgtcagcagcttcatcacccagtacagcaccgggcaggtcaccgtggagatggagtgggagctcaagaaggaaaactccaagaggtggaacccagagatccagtacacaaacaactacaacgacccccagtttgtggactttgccccggacagcaccggggaatacagaaccaccagacctatcggaacccgataccttacccgacccctttaa

SEQ ID NO: 820 - DNA, 2175 bp, Artificial Sequence
  Description of Artificial Sequence: Synthetic polynucleotide
atgtcttttgttgatcaccctccagattggttggaagaagttggtgaaggtcttcgcgagtttttgggccttgaagcgggcccaccgaaaccaaaacccaatcagcagcatcaagatcaagcccgtggtcttgtgctgcctggttataactatctcggacccggaaacggtctcgatcgaggagagcctgtcaacagggcagacgaggtcgcgcgagagcacgacatctcgtacaacgagcagcttgaggcgggagacaacccctacctcaagtacaaccacgcggacgccgagtttcaggagaagctcgccgacgacacatccttcgggggaaacctcggaaaggcagtctttcaggccaagaaaagggttctcgaaccttttggcctggctgaagagggtgctaagacggcccctaccggaaagcggatagacgaccactttccaaaaagaaagaaggcccggaccgaagaggactccaagccttccacctcgtcagacgccgaagctggacccagcggatcccagcagctgcaaatcccagcccaaccagcctcaagtttgggagctgatacaatgtctgcgggaggtggcggcccattgggcgacaataaccaaggtgccgatggagtgggcaatgcctcgggagattggcattgcgattccacgtggatgggggacagagtcgtcaccaagtccacccgaacctgggtgctgcccagctacaacaaccaccagtaccgagagatcaaaagcggctccgtcgacggaagcaacgccaacgcctactttggatacagcaccccctgggggtactttgactttaaccgcttccacagccactggagcccccgagactggcaaagactcatcaacaactactggggcttcagaccccggtccctcagagccaaaatcttcaacattcaagtcaaagaggtcacggtgcaggactccaccaccaccatcgccaacaacctcacctccaccgtccaagtgtttacggacgacgactaccagctgccctacgtcgtcggcaacgggaccgagggatgcctgccggccttccctccgcaggtctttacgctgccgcagtacggttacgcgacgctgaaccgcgacaacacagaaaatcccaccgagaggagcagcttcttctgcctagagtactttcccagcaagatgctgagaacgggcaacaaccttgagtttacctacaactttgaggaggtgcccttccactccagcttcgctcccagtcagaacctcttcaagctggccaacccgctggtggaccagtacttgtaccgcttcgtgagcacaaataacactggcggagtccagttcaacaagaacctggccgggagatacgccaacacctacaaaaactggttcccggggcccatgggccgaacccagggctggaacctgggctccggggtcaaccgcgccagtgtcagcgccttcgccacgaccaataggatggagctcgagggcgcgagttaccaggtgcccccgcagccgaacggcatgaccaacaacctccagggcagcaacacctatgccctggagaacactatgatcttcaacagccagccggcgaacccgggcaccaccgccacgtacctcgagggcaacatgctcatcaccagcgagagcgagacgcagccggtgaaccgcgtggtgcacaacgtcggcgggcagatggccaccaacaaccagagctccaccactgcccccgcgaccggcacgtacaacctccaggaaatcgtgcccggcagcgtgtggatggagagggacgtgtacctccaaggacccatctgggccaagatcccagagacgggggcgcactttcacccctctccggccatgggcggattcggactcaaacacccaccgcccatgatgctcatcaagaacacgcctgtgcccggaaatatcaccagcttctcggacgtgcccgtcagcagcttcatcacccagtacagcaccgggcaggtcaccgtggagatggagtgggagctcaagaaggaaaactccaagaggtggaacccggagatccagtacacaaacaactacaacgacccccagtttgtggactttgccccggacagcaccggggaatacagaaccaccagacctatcggaacccgataccttacccgacccctttaa

SEQ ID NO: 821 - DNA, 2175 bp, Artificial Sequence
  Description of Artificial Sequence: Synthetic polynucleotide
atgtcttttgttgatcaccctccagattggttggaagaagttggtgaaggtcttcgcgagtttttgggccttgaagcgggcccaccgaaaccaaaacccaatcagcagcatcaagatcaagcccgtggtcttgtgctgcctggttataactatctcggacccggaaacggtctcgatcgaggagagcctgtcaacagggcagacgaggtcgcgcgagagcacgacatctcgtacaacgagcagcttgaggcgggagacaacccctacctcaagtacaaccacgcggacgccgagtttcaggagaagctcgccgacgacacatccttcgggggaaacctcggaaaggcagtctttcaggccaagaaaagggttctcgaaccttttggcctggttgaagagggtgctaagacggcccctaccggaaagcggatagacgaccactttccaaaaagaaagaaggcccggaccgaagaggactccaagccttccacctcgtcagacgccgaagctggacccagcggatcccagcagctgcaaatcccagcccaaccagcctcaagtttgggagctgatacaatgtctgcgggaggtggcggcccattgggcgacaataaccaaggtgccgatggagtgggcaatgcctcgggagattggcattgcgattccacgtggatgggggacagagtcgtcaccaagtccacccgaacctgggtgctgcccagctacaacaaccaccagtaccgagagatcaaaagcggctccgtcgacggaggcaacgccaacgcctactttggatacagcaccccctgggggtactttgactttaaccgcttccacagccactggagcccccgggactggcaaagactcatcaacaactactggggcttcagaccccggtccctcagagtcaaaatcttcaacattcaagtcaaagaggtcacggtgcaggactccaccaccaccatcgccaacaacctcacctccaccgtccaagtgtttacggacgacgactaccagctgccctacgtcgtcggcaacgggaccgagggatgcctgccggccttccctccgcaggtctttacgctgccgcagtacggttacgcgacgctgaaccgcgacaacacagaaaatcccaccgagaggagcagcttcttctgcctagagtactttcccagcaagatgctgagaacgggcaacaactttgagtttacctacaactttgaggaggtgcccttccactccagcttcgctcccagtcagaacctcttcaagctggccaacccgctggtggaccagtacttgtaccgcttcgtgagcacaaataacactggcggagtccagttcaacaagaacctggccgggagatacgccaacacctacaaaaactggttcccggggcccatgggccgaacccagggctggaacctgggctccggggtcaaccgcgccagtgtcagcgccttcgccacgaccaataggatggagctcgagggcgcgagttaccaggtgcccccgcagccgaacggcatgaccaacaacctccagggcagcaacacctatgccctggagaacactatgatcttcaacagccagccggcgaacccgggcaccaccgccacgtacctcgagggcaacatgctcatcaccagcgagagcgagacgcagccggtgaaccgcgtggcgtacaacgtcggcgggcagatggccaccaacaaccagagctccaccactgcccccgcgaccggcacgtacaacctccaggaaatcgtgcccggcagcgtgtggatggagagggacgtgtacctccaaggacccatctgggccaagatcccagagacgggggcgcactttcacccctctccggccatgggcggattcggactcaaacacccaccgcccatgatgctcatcaagaacacgcctgcgcccggaaatatcaccagcttctcggacgtgcccgtcagcagcttcatcacccagtacagcaccgggcaggtcaccgtggagatggagtgggagctcaagaagggaaactccaagaggtggaacccagagatccagtacacaaacaactacaacgacccccagtttgtggactttgccccggacagcaccggggaatacagaaccaccagacctatcggaacccgataccttacccgacccctttaa

SEQ ID NO: 822 - DNA, 2175 bp, Artificial Sequence
  Description of Artificial Sequence: Synthetic polynucleotide
atgtcttttgttgatcaccctccagattggttggaagaagttggtgaaggtcttcgcgagtttttgggccttgaagcgggcccaccgaaaccaaaacccaatcagcagcatcaagatcaagcccgtggtcttgtgctgcctggttataactatctcggacccggaaacggtctcgatcgaggagagcctgtcaacagggcagacgaggtcgcgcgagagcacgacatctcgtacaacgagcagcttgaggcgggagacaacccctacctcaagtacaaccacgcggacgccgagtttcaggagaagctcgccgacgacacgtccttcgggggaaacctcggaaaggcagtctttcaggccaagaaaagggttctcgaaccttttggcctggttgaagagggtgctaagacggcccctaccggaaagcggatagacgaccactttccaaaaagaaagaaggcccggaccgaagaggactccaagccttccacctcgtcagacgccgaagctggacccagcggatcccagcagctgcaaatcccagcccaaccagcctcaagtttgggagctgatacaatgtctgcgggaggtggcggcccattgggcgacaataaccaaggtgccgatggagtgggcaatgcctcgggagattggcattgcgattccacgtggatgggggacagagtcgtcaccaagtccacccgaacctgggtgctgcccagctacaacaaccaccagtaccgagagatcaaaagcggctccgtcgacggaagcaacgccaacgcctactttggatacagcaccccctgggggtactttgactttaaccgcttccacagccactggagcccccgagactggcaaagactcatcaacaactactggggcttcagaccccggtccctcagagtcaaaatcttcaacattcaagtcaaagaggtcacggtgcaggactccaccaccaccatcgccaacaacctcacctccaccgtccaagtgtttacggacgacgactaccagctgccctacgtcgtcggcaacgggaccgagggatgcctgccggccttccctccgcaggtctttacgctgccgcagtacggttacgcgacgctgaaccgcgacaacacagaaaatcccaccgagaggagcagcttcttctgcctagagtactttcccagcaagatgctgagaacgggcaacaactttgagtttacctacaactttgaggaggtgcccttccactccagcttcgctcccagtcagaacctcttcaagctggccaacccgctggtggaccagtacttgtaccgcttcgtgagcacaaataacactggcggagtccagttcaacaagaacctggccgggagatacgccaacacctacaaaaactggttcccggggcccatgggccgaacccagggctggaacctgggctccggggtcaaccgcgccagtgtcagcgccttcgccacgaccaataggatggagctcgagggcgcgagttaccaggtgcccccgcagccgaacggcatgaccaacaacctccagggcagcaacacctatgccctggagaacactatgatcttcaacagccagccggcgaacccgggcaccaccgccacgtacctcgagggcaacatgctcatcaccagcgagagcgagacgcagccggtgaaccgcgtggcgtacaacgtcggcgggcagatggccaccaacaaccagagctccaccactgcccccgcgaccggcacgtacaacctccaggaaatcgtgcccggcagcgtgtggatggagagggacgtgtacctccaaggacccatctgggccaagatcccagagacgggggtgcactttcacccctctccggccatgggcggattcggactcaaacacccaccgcccatgatgctcatcaagaacacgcctgtgcccggaaatatcaccagcttctcggacgtgcccgtcagcagcttcatcacccagtacagcaccgggcaggtcaccgtggagatggagtgggagctcaagaaggaaaactccaagaggtggaacccagagatccagtacacaaacaactacaacgacccccagtttgtggactttgccccggacagcaccggggaatacagaaccaccagacctatcggaacccgataccttacccgacccctttaa

SEQ ID NO: 823 - DNA, 2175 bp, Artificial Sequence
  Description of Artificial Sequence: Synthetic polynucleotide
  modified_base (1652)..(1652): a, c, g, or t
atgtcttttgttgatcaccctccagattggttggaagaagttggtgaaggtcttcgcgagtttttgggccttgaagcgggcccaccgaaaccaaaacccaatcagcagcatcaagatcaagcccgtggtcttgtgctgcctggttataactatctcggacccggaaacggtctcgatcgaggagagcctgtcaacagggcagacgaggtcgcgcgagagcacgacatctcgtacaacgagcagcttgaggcgggagacaacccctacctcaagtacaaccacgcggacgccgagtttcaggagaagctcgccgacgacacatccttcgggggaaacctcggaaaggcagtctttcaggccaagaaaagggttctcgaaccttttggcctggttgaagagggtgctaagacggcccctaccggaaagcggatagacgaccactttccaaaaagaaagaaggcccggaccgaggaggactccaagccttccacctcgtcagacgccgaagctggacccagcggatcccagcagctgcaaatcccagcccaaccagcctcaagtttgggagctgatacaatgtctgcgggaggtggcggcccattgggcgacaataaccaaggtgccgatggagtgggcaatgcctcgggagattggcattgcgattccacgtggatgggggacagagtcgtcaccaagtccacccgaacctgggtgctgcccagctacaacaaccaccagtaccgagagatcaaaagcggctccgtcgacggaagcaacgccaacgcctactttggatacagcaccccctgggggtactttgactttaaccgcttccacagccactggagcccccgagactggcaaagactcatcaacaactactggggcttcagaccccggtccctcagagtcaaaatcttcaacattcaagtcaaagaggtcacggtgcaggactccaccaccaccatcgccaacaacctcacctccaccgtccaagtgtttacggacgacgactaccagctgccctacgtcgtcggcaacgggaccgagggatgcctgccggccttccctccgcaggtctttacgctgccgcagtacggttacgcgacgctgaaccgcgacaacacagaaaatcccaccgagaggagcagcttcttctgcctagagtactttcccagcaagatgctgagaacgggcaacaactttgagtttacctacaactttgaggaggtgcccttccactccagcttcgctcccagtcagaacctcttcaagctggccaacccgctggtggaccagtacttgtaccgcttcgtgagcacaaataacactggcggagtccagttcaacaagaacctggccgggagatacgccaacacctacaaaaactggttcccggggcccatgggccgaacccagggctggaacctgggctccggggtcaaccgcgccagtgtcagcgccttcgccacgaccaataggatggagctcgagggcgcgagttaccaggtgcccccgcagccgaacggcatgaccaacaacctccagggcagcaacacctatgccctggagaacactatgatcttcaacagccagccggcgaacccgggcaccaccgccacgtacctcgagggcagcatgctcatcaccancgagagcgagacgcagccggtgaaccgcgtggcgtacaacgtcggcgggcagatggccaccaacaaccagagctccaccactgcccccgcgaccggcacgtacaacctccaggaaatcgtgcccggcagcgtgtggatggagagggacgtgtacctccaaggacccatctgggccaagatcccagagacgggggcgcactttcacccctctccggccatgggcggattcggactcaaacacccaccgcccatgatgctcatcaagaacacgcctgtgcccggaaatatcaccagcttctcggacgtgcccgtcagcagcttcatcacccagtacagcaccgggcaggtcaccgtggagatggagtgggagctcaagaaggaaaactccaagaggtggaacccagagatccagtacacaaacaactacaacgacccccagtttgtggactttgccccggacagcaccggggaatacagaaccaccagacctatcggaacccgataccttacccgacccctttaa

SEQ ID NO: 824 - DNA, 2211 bp, Artificial Sequence
  Description of Artificial Sequence: Synthetic polynucleotide
atggctgctgacggttatcttccagattggctcgaggacaacctttctgaaggcattcgtgagtggtgggctctgaaacctggagtccctcaacccaaagcgaaccaacaacaccaggacaaccgtcggggtcttgtgcttccgggttacaaatacctcggacccggtaacggactcgacaaaggagagccggtcaacgaggcggacgcggcagccctcgaacacgacaaagcttacgaccagcagctcaaggccggtgacaacccgtacctcaagtacaaccacgccgacgccgagtttcaggagcgtcttcaagaagatacgtcttttgggggcaaccttggcagagcagtcttccaggccaaaaagaggatccttgagcctcttggtctggttgaggaagcagctaaaacggctcctggaaagaagaggcctgtagatcagtctcctcaggaaccggactcatcatctggtgttggcaaatcgggcaaacagcctgccagaaaaagactaaatttcggtcagactggcgactcagagtcagtcccagaccctcaacctctcggagaaccaccagcagcccccacaagtttgggatctaatacaatggcttcaggcggtggcgcaccaatggcagacaataacgagggtgccgatggagtgggtaattcctcaggaaattggcattgcgattcccaatggctgggcgacagagtcatcaccaccagcaccagaacctgggccctgcccacttacaacaaccatctctacaagcaaatctccagccaatcaggagcttcaaacgacaaccactactttggctacagcaccccttgggggtattttgactttaacagattccactgccacttctcaccacgtgactggcagcgactcattaacaacaactggggattccggcccaagaaactcagcttcaagctcttcaacatccaagttaaagaggtcacgcagaacgatggcacgacgactattgccaataaccttaccagcacggttcaagtgtttacggactcggagtatcagctcccgtacgtgctcgggtcggcgcaccaaggctgtctcccgccgtttccagcggacgtcttcatggtccctcagtatggatacctcaccctgaacaacggaagtcaagcggtgggacgctcatccttttactgcctggagtacttcccttcgcagatgctaaggactggaaataacttccaattcagctataccttcgaggatgtaccttttcacagcagctacgctcacagccagagtttggatcgcttgatgaatcctcttattgatcagtatctgtactacctgaacagaacgcaaggaacaacctctggaacaaccaaccaatcacggctgctttttagccaggctgggcctcagtctatgtctttgcaggccagaaattggctacctgggccctgctaccggcaacagagactttcaaagactgctaacgacaacaacaacagtaactttccttggacagcggccagcaaatatcatctcaatggccgcgactcgctggtgaatccaggaccagctatggccagtcacaaggacgatgaagaaaaatttttccctatgcacggcaatctaatatttggcaaagaagggacaacggcaagtaacgcagaattagataatgtaatgattacggatgaagaagagattcgtaccaccaatcctgtggcaacagagcagtatggaactgtggcaaataacttgcagagctcaaatacagctcccacgactagaactgtcaatgatcagggggccttacctggcatggtgtggcaagatcgtgacgtgtaccttcaaggacctatctgggcaaagattcctcacacggatggacactttcatccttctcctctgatgggaggctttggactgaaacatccgcctcctcaaatcatgatcaaaaatactccggtaccggcaaatcctccgacgactttcagcccggccaagtttgcttcatttatcactcagtactccactggacaggtcagcgtggaaattgagtgggagctacagaaagaaaacagcaaacgttggaatccagagattcagtacacttccaactacaacaagtctgttaatgtggactttactgtagacactaatggtgtttatagtgaacctcgccctattggaacccggtatctcacacgaaacttgtaa

SEQ ID NO: 825 - DNA, 2205 bp, Artificial Sequence; identical to SEQ ID NO: 93
  Description of Artificial Sequence: Synthetic polynucleotide

SEQ ID NO: 826 - DNA, 2234 bp, Artificial Sequence
  Description of Artificial Sequence: Synthetic polynucleotide
atgtcttttgttgatcaccctccagattggttggaagaagttggtgaaggtcttcgcgagtttttgggccttgaagcgggcccaccgaaaccaaaacccaatcagcagcatcaagatcaagcccgtggtcttgtgctgcctggttataactatctcggacccggaaacggtctcgatcgaggagagcctgtcaacagggcagacgaggtcgcgcgagagcacgacatctcgtacaacgagcagcttgaggcgggagacaacccctacctcaagtacaaccacgcggacgccgagtttcaggagaagctcgccgacgacacatccttcgggggaaacctcggaaaggcagtctttcaggccaagaaaagggttctcgaaccttttggcctggttgaagagggtgctaagacggcccctaccggaaagcggatagacgaccactttccaaaaagaaagaaggctcggaccgaagaggactccaagccttccacctcgtcagacgccgaagctggacccagcggatcccagcagctgcaaatcccagcccaaccagcctcaagtttgggagctgatacaatgtctgcgggaggtggcggcccattgggcgacaataaccaaggtgccgatggagtgggcaatgcctcgggagattggcattgcgattccacgtggatgggggacagagtcgtcaccaagtccacccgaacctgggtgctgcccagctacaacaaccaccagtaccgagagatcaaaagcggctccgtcgacggaagcaacgccaacgcctactttggatacagcaccccctgggggtactttgactttaaccgcttccacagccactggagcccccgagactggcaaagactcatcaacaactactggggcttcagaccccggtccctcagagtcaaaatcttcaacattcaagtcaaagaggtcacggtgcaggactccaccaccaccatcgccaacaacctcacctccaccgtccaagtgtttacggacgacgactaccagctgccctacgtcgtcggcaacgggaccgagggatgcctgccggccttccctccgcaggtctttacgctgccgcagtacggttacgcgacgctgaaccgcgacaacacagaaaatcccaccgagaggagcagcttcttctgcctagagtactttcccagcaagatgctgagaacgggcaacaactttgagtttacctacaactttgaggaggtgcccttccactccagcttcgctcccagtcagaacctgttcaagctggccaacccgctggtggaccagtacttgtaccgcttcgtgagcacaaataacactggcggagtccagttcaacaagaacctggccgggagatacgccaacacctacaaaaactggttcccggggcccatgggccgaacccagggctggaacctgggctccggggtcaaccgcgccagtgtcagcgccttcgccacgaccaataggatggagctcgagggcgcgagttaccaggtgcccccgcagccgaacggcatgaccaacaacctccagggcagcaacacctatgccctggagaacactatgatcttcaacagccagccggcgaacccgggcaccaccgccacgtacctcgagggcaacatgctcatcaccagcgagagcgagacgcagccggtgaaccgcgtggcgtacaacgtcggcgggcagatggccaccaacaaccagagctccaccactgcccccgcgaccggcacgtacaacctccaggaaatcgtgcccggcagcgtgtggatggagagggacgtgtacctccaaggacccatctgggccaagatcccagagacgggggcgcactttcacccctctccggccatgggcggattcggactcaaacacccaccgcccatgatgctcatcaagaacacgcctgtgcccggaaatatcaccagcttctcggacgtgcccgtcagcagcttcatcacccagtacagcaccgggcaggtcaccgtggagatggagtgggagctcaagaaggaaaactccaagaggtggaacccagagatccagtacacaaacaactacaacgacccccagtttgtggactttgccccggacagcaccggggaatacagaaccaccagacctatcggaacccgataccttacccgacccctttaacccattcatgtcgcataccctcaataaaccgtgtattcgtgtcagtaaaatactgcctc

SEQ ID NO: 827 - protein, 736 aa, Artificial Sequence
  Description of Artificial Sequence: Synthetic polypeptide
MAADGYLPDWLEDNLSEGIREWWALKPGVPQPKANQQHQDNRRGLVLPGYKYLGPGNGLDKGEPVNEADAAALEHDKAYDQQLKAGDNPYLKYNHADAEFQERLQEDTSFGGNLGRAVFQAKKRILEPLGLVEEAAKTAPGKKRPVDQSPQEPDSSSGVGKSGKQPARKRLNFGQTGDSESVPDPQPLGEPPAAPTSLGSNTMASGGGAPMADNNEGADGVGNSSGNWHCDSQWLGDRVITTSTRTWALPTYNNHLYKQISSQSGASNDNHYFGYSTPWGYFDFNRFHCHFSPRDWQRLINNNWGFRPKKLSFKLFNIQVKEVTQNDGTTTIANNLTSTVQVFTDSEYQLPYVLGSAHQGCLPPFPADVFMVPQYGYLTLNNGSQAVGRSSFYCPEYFPSQMLRTGNNFQFSYTFEDVPFHSSYAHSQSLDRLMNPLIDQYLYYLNRTQGTTSGTTNQSRLLFSQAGPQSMSLQARNWLPGPCYRQQRLSKTANDNNNSNFPWTAASKYHLNGRDSLVNPGPAMASHKDDEEKFFPMHGNLIFGKEGTTASNAELDNVMITDEEEIRTTNPVATEQYGTVANNLQSSNTAPTTRTVNDQGALPGMVWQDRDVYLQGPIWAKIPHTDGHFHPSPLMGGFGLKHPPPQIMIKNTPVPANPPTTFSPAKFASFITQYSTGQVSVEIEWELQKENSKRWNPEIQYTSNYNKSVNVDFTVDTNGVYSEPHPIGTRYLTRNL

SEQ ID NO: 828 - protein, 736 aa, Artificial Sequence
  Description of Artificial Sequence: Synthetic polypeptide
MAADGYLPDWLEDNLSEGIREWWALKPGVPQPKANQQHQDNRRGLVLPGYKYLGPGNGLDKGEPVNEADAAALEHDKAYDQQLKAGDNPYLKYNHADAEFQERLQEDTSFGGNLGRAVFQAKKRILEPLGLVEEAAKTAPGKKRPVDQSPQEPDSSSGVGKSGKQPARKRLNFGQTGDSESVPDPQPLGEPPAAPTSLGSNTMASGGGAPMADNNEGADGVGNSSGNWHCDSQWLGDRVITTSTRTWALPTYNNHLYKQISSQSGASNDNHYFGYSTPWGYFDFNRFHCHFSPRDWQRLINNNWGFRPKKLSFKLFNIQVKEVTQNDGTTTVANNLTSTVQVFTDSEYQLPYVLGSAHQGCLPPFPADVFMVPQYGYLTLNNGSQAVGRSSFYCLEYFPSQMLRTGNNFQFSYTFEDVPFHSSYAHSQSLDRLMNPLIDQYLYYLNRTQGTTSGTTNQSRLLFSQAGPQSMSLQARNWLPGPCYRQQRLSKTANDNNNSNFPWTAASKYHLNGRDSLVNPGPAMASHKDDEEKFFPMHGNLIFGKEGTTASNAELDNVMITDEEEIRTTNPVATEQYGTVANNLQSSNTAPTTRTVNDQGALPGMVWQDRDVYLQGPIWAKIPHTDGHFHPSPLMGGFGLKHPPPQIMIKNTPVPANPPTTFSPAKFASFITQYSTGQVSVEIEWELQKENSKRWNPEIQYTSNYNKSVNVDFTVDTNGVYSEPRPIGTRYLTRNL

SEQ ID NO: 829 - protein, 736 aa, Artificial Sequence
  Description of Artificial Sequence: Synthetic polypeptide
MAADGYLPDWLEDNLSEGIREWWALKPGVPQPKANQQHQDNRRGLVLPGYKYLGPGNGLDKGEPVNEADAAALEHDKAYDQQLKAGDNPYLKYNHADAEFQERLQEDTSFGGNLGRAVFQAKKRILEPLGLVEEAAKTAPGKKRPVDQSPQEPDSSSGVGKSGKQPARKRLNFGQTGDSESVPDPQPLGEPPAAPTSLGSNTMASGGGAPMADNNEGADGVGNSSGNWHCDSQWLGDRVITTSTRTWALPTYNNHLYKQISGQSGASNDNHYFGYSTPWGYFDFNRFHCHFSPRDWQRLINNNWGFRPKKLSFKLFNIQVKEVTQNDGTTTIANNLTSTVQVFTDSEYQLPYVLGSAHQGCLPPFPADVFMVPQYGYLTLNNGSQAVGRSSFYCLEYFPSQMLRTGNNFQFSYTFEDVPFHSSYAHSQSLDRLMNPLIDQYLYYLNRTQGTTSGTTNQSRLLFSQAGPQSMSLQARNWLPGPCYRQQRLSKTANGNNNSNFPWTAASKYHLNGRDSLVNPGPAMASHKDDEEKFFPMHGNLIFGKEGTTASNAELDNVMITDEEEIRTTNPVATEQCGTVANNLQSSNTAPTTRTVNDQGALPGMVWQDRDVYLQGPIWAKIPHTDGHFHPSPLMGGFGLKHPPPQIMIKNTPVPANPPTTFSPAKFASFITQYSTGQVSVEIEWELQKENSKRWNPEIQYTSNYNKSVNVDFTVDTNGVYSEPRPIGTRYLTRNL

SEQ ID NO: 830 - protein, 736 aa, Artificial Sequence
  Description of Artificial Sequence: Synthetic polypeptide
MAADGYLPDWLEDNLSEGIREWWALKPGVPQPKANQQHQDNRRGLVLPGYKYLGPGNGLDKGEPVNEADAAALEHDKAYDQQLKAGDNPYLKYNHADAEFQERLQEDTSFGGNLGRAVFQAKKRILEPLGLVEGAAKTAPGKKRPVDQSPQEPDSSSGVGKSGKQPARKRLNFGQTGDSESVPDPQPLGEPPAAPTSLGSNTMASGGGAPMADNNEGADGVGNSSGNWHCDSQWLGDRVITTSTRTWALPTYNSHLYKQISSQSGASNDNHYFGYSTPWGYFDFNRFHCHFSPRDWQRLINNNWGFRPKKLSFKLFNIQVKEVTQNDGTTTIANNLTSTVQVFTDSEYQLPYVLGSAHQGCLPPFPADAFMVPQYGYLTLNNGSQAVGRSSFYCLEYFPSQMLRTGNNFQFSYTFEDVPFHGSYAHSQSLDRLMNPLIDQYLYYLNRTQGTTSGTTNQSRLLFSQAGPQSMSLQARNWLPGPCYRQQRLSKTANDNNNSNFPWTAASKYHLNGRDSLVNPGPAMASHKDDEEKFFPMHGNLIFGKEGTTASNAELDNVMITDEEEIRTTNPVATEQYGTVANNLQSSNTAPTTRTVNDQGALPGMVWQDRDVYLQGPIWAKIPHTDGHFHPSPLMGGFGLKHPPPQIMIKNTPVPANPPTTFSPAKFASFITQYSTGQVSVEIEWELQKENSKRWNPEIQYTSNYNKSVNVDFTVDTNGVYSEPRPIGTRYLTRNS

SEQ ID NO: 831 - protein, 736 aa, Artificial Sequence
  Description of Artificial Sequence: Synthetic polypeptide
MAADGYLPDWLEDNLSEGIREWWALKPGVPQPKANQQHQDNRRGLVLPGYKYLGPGNGLDKGEPVNEADAAALEHDKAYDQQLKAGDNPYLKYNHADAEFQERLQEDTSFGGNLGRAVFQAKKRILEPLGLVEGAAKTAPGKKRPVDQSPQEPDSSSGVGKSGKQLARKRLNFGQTGDSESVPDPQPLGEPPAAPTSLGSNTMASGGGAPMADNNEGADGVGNSSGNWHCDSQWLGDRVITTSTRTWALPTYNSHLYKQISGQSGASNDNHYFGYSTPWGYFDFNRFHCHFSPRDWQRLINNNWGFRPKKLSFKLFNIQVKEVTQNDGTTTIANNLTSTVQVFTDSEYQLPYVLGSAHQGCLPPFPADVFMVPQYGYLTLNNGSQAVGRSSFYCLEYFPSQMLRTGNNFQFSYTFEDVPFHSSYAHSQSLDRLMNPLIDQYLYYLNRTQGTTSGTTNQSRLLFSQAGPQSMSLQARNWLPGPCYRQQRLSKTANDNNNSNFPWTAASKYHLNGRDSLVNPGPAMASHKDDEEKFFPMHGNLIFGKEGTTASNAELDNVMITDEEEIRTTNPVATEQYGTVANNLQSSNTAPTTRTVNDQGALPGMVWQDRDVYLQGPIWAKIPHTDGHFHPSPLMGGFGLKHPPPQIMIKNTPVPANPPTTFSPAKFASFITQYSTGQVSVEIEWELQKENSKRWNPEIQYTSNYNKSVNVDFTVDTNGVYSEPRPIGTRYLTRNL

SEQ ID NO: 832 - protein, 736 aa, Artificial Sequence
  Description of Artificial Sequence: Synthetic polypeptide
MAADGYLPDWLEDNLSEGIREWWALKPGVPQPKANQQHQDDRRGLVLPGYKYLGPGNGLDKGEPVNEADAAALEHDKAYDQQLKAGDNPCLKYNHADAEFQERLQEDTSFGGNLGRAVFQAKKRILEPLGLVEEAAKTAPGKKRPVDQSPQEPDSSSGVGKSGKQPARKRLNFGQTGDSESVPDPQPLGEPPAAPTSLGSNTMASGGSAPMADNNEGADGVGNSSGNWHCDSQWLGDRVITTSTRTWALPTYNNHLYKQISSQSGASNDNHYFGYSTPWGYFDFNRFHCHFSPRDWQRLINNNWGFRPKKLSFKLFNIQVKEVTQNDGTTTIANNLTSTVQVFTDSEYQLPYVLGSAHQGCLPPFPADVFMVPQYGYLTLNNGSQAVGRSSFYCLEYFPSQMLRTGNNFQFSYTFEDVPFHSSYAHSQSLDRLMDPLIDQYLYYLNRTQGTTSGTTNQSRLLFSQAGPQSMSLQARNWLPGPCYRQQRLSKTANDNNNSNFPWTAASKYHLNGRDSLVNPGPAMASHKDDEEKFFPMHGNLIFGKEGTTASNAELDNVMITDEEEIRTTNPVATEQYGTVANNLQSSNTAPTTRTVNDQGALPGMVWQDRDVYLQGPIWAKIPHTDGHFHPSPLMGGFGLKHPPPQIMIKNTPVPANPPTTFSPAKFASFITQYSTGQVSVEIEWELQKENSKRWNPEIQYTSNYNKSVNVDFTVDTNGVYSEPRPIGTRYLTRNL

SEQ ID NO: 833 - protein, 736 aa, Artificial Sequence
  Description of Artificial Sequence: Synthetic polypeptide
MAADGYLPDWLEDNLSEGIREWWALKPGVPQPKANQQHQDDRRGLVLPGYKYLGPGNGLDKGEPVNEADAAALEHDKAYDQQLKAGDNPYLKYNHADAEFQERLQEDTSFGGNLGRAVFQAKKRILEPLGLVEEAAKTAPGKKRPVDQSPQEPDSSSGVGKSGKQPARKRLNFGQTGDSESVPDPQPLGEPPAAPTSLGSNTMASGGGAPMADNNEGADGVGNSSGNWHCDSQWLGNRVITTSTRTWALPTYNNHLYKQISSQSGASNDNHYFGYSTPWGYFDFNRFHCHFSPRDWQRLINNNWGFRPKKLSFKLFNIQVKEVTQNDGTTTIANNLTSTVQVFTDSEYQLPYVLGSAHQGCLPPFPADVFMVPQYGYLTLNNGSQAVGRSSFYCLEYFPSQMLRTGNNFQFSYTFEDVPFHSSYAHSQSLDRLMNPLIDQYLYYLNRTQGTTSGTTNQSRLLFSQAGPQSMSLQARNWLPGPCYRQQRLSKTANDNNNSNFPWTAASKYHLNGRDSLVNPGPAMASHKDDEEKFFPMHGNLIFGKEGTTASNAELDNVMITDEEEIRTTNPVATEQYGTVANNLQSSNTAPTTRTVNDQGALPGMVWQDRDVYLQGPIWAKIPHTDGHFHPSPLMGGFGLKHPPPQIMIKNTPVPANPPTTFSPAKFASFITQYSTGQVSVEIEWELQKENSKRWNPEIQYTSNYNKSVNVDFTVDTNGVYSEPRPIGTRYLTRNL

SEQ ID NO: 834 - protein, 736 aa, Artificial Sequence
  Description of Artificial Sequence: Synthetic polypeptide
MAADGYLPDWLEDNLSEGIREWWALKPGVPQPKANQQHQDDRRGLVLPGYKYLGPGNGLDKGEPVNEADAAALEHDKAYDQQLKAGDNPYLKYNHADAEFQERLQEDTSFGGNLGRAVFQAKKRILEPLGLVEEAAKTAPGKKRPVDQSPQEPDSSSGVGKSGKQPARKRLNFGQTGDSESVPDPQPLGEPPAAPTSLGSNTMASGGGAPMADNNEGADGVGNSSGNWHCDSQWLGDRVITTSTRTWALPTYNNHLYKQISSQSGASNDNHYFGYSTPWGYFDFNRFHCHFSPRDWQRLINNNWGFRPKKLSFKLFNIQVKEVTQNDGTTTIANNLTSTVQVFTDSEYQLPYVLGSAHQGCLPPFPADVFMVPQYGYLTLNNGSQAVGRSSFYCLEYFPSQMLRTGNNFQFSYTFEDVPFHSSYAHSQSLDRLMNPLIDQYLYYLNRTQGTTSGTTNQSRLLFSQAGPQSMSLQARNWLPGPCYRQQRLSKTANDNNNSNFPWTAASKYHLNGRDSLVNPGPAMASHKDDEEKFFPMHGNLIFGKEGTTASNAELDNVMITDEEEIRTTNPVATVQYGTVANNLQSSNTAPTTRTVNDQGALPGMVWQDRDVYLQGPIWAKIPHTDGHFHPSPLMGGFGLKHPPPQIMIKNTPVPANPPTTFSPAKFASFITQYSTGQVSVEIEWELQKENSKRWNPEIQYTSNYNKSVNVDFTVDTNGVYSEPRPIGTRYLTRNL

SEQ ID NO: 835 - protein, 735 aa, Artificial Sequence
  Description of Artificial Sequence: Synthetic polypeptide
MAADGYLPDWLEDNLSEGIREWWALKPGVPQPKANQQHQDNRRGLVLPGYKYLGPGNGLDKGEPVNEADAAALEHDKAYDQQLKAGDNPYLKYNHADAEFQERLQEDTSFGGNLGRAVFQAKKGILEPLGLVEEAAKTAPGKKRPVDQSPQEPDSSSGVGKSGKQPARKRLNFGQTGDSESVPDPQPLGEPPAAPTSLGSNTMASGGGAPMADNNEGADGVGNSSGNWHCDSQWLGDRVITTSTRTWALPTYNNHLYKQISSQSGASNDNHYFGYSTPWGYFDFNRFHCHFSPRDWQRLINNNWGFRPKKLSFKLFNIQVKEVTQNDGTTTIANNLTSTVQVFTDSEYQLPYVFGSAHQGCLPPFPADVFMVPQYGYLTLNNGSQAVGRSSFYCLEYFPSQMLRTGNNFQFSYTFEDVPFHSSYAHSQSSDRLMNPLIDQYLYYLNRTQGTTSGTTNQSRLLFSQAGPQSMSLQARNWLPGPCYRQQRLSKTANDNNNSNFPTAASKYHLNGRDSLVNPGPAMASHKDDEEKFFPMHGNLIFGKEGTTASNAELDNVMITDEEEIRTTNPVATEQYGTVANNLQSSNTAPTTRTVNDQGALPGMVWQDRDVYLQGPIWAKIPHTDGHFHPSPLMGGFGLKHPPPQIMIKNTPVPANPPTTFSPAKFASFITQYSTGQVSVEIEWELQKENSKRWNPEIQYTSNYNKSVNVDFTVDTNGVYSEPRPIGTRYLTRNL

SEQ ID NO: 836 - protein, 736 aa, Artificial Sequence
  Description of Artificial Sequence: Synthetic polypeptide
MAADGYLPDWLEDNLSEGIREWWALKPGVPQPKANQQHQDNRRGLVLPGYKYLGPGNGLDEGEPVNEADAAALEHDKAYDQQLKAGDNPYLKYNHADAEFQERLQEDTSFGGNLGRAVFQAKKRILEPLGLVEGAAKTAPGKKRPVDQSPQEPDSSSGVGKSGKQPARKRLNFGQTGDSESVPDPQPLGEPPAAPTSLGSNTMASGGGAPMADNNEGADGVGNSSGNWHCDSQWLGDRVITTSTRTWALPTYNSHLYKQISSQSGASNDNHYFGYSTPWGYFDFNRFHCHFSPRDWQRLINNNWGFRPKKLSFKLFNIQVKEVTQNDGTTTIANNLTSTVQVFTDSEYQLPYVLGSAHQGCLPPFPADVFMVPQYGYLTLNNGSQAVGRSSFYCLEYFPSQMLRTGNNFQFSYTFEDVPFHSSYAHSQSLDRLMNPLIDQYLYYLNRTQGTTSGTTNQSRLLFSQAGPQSMSLQARNWLPGPCYRQQRLSKTANDNNNSNFPWTAASKYHLNGRDSLVNPGPAMASHKDDEEKFFPMHGNLIFGKEGTTASNAELDNVMITDEEEIRTTNPVATEQYGTVANNLQSSNTAPTTRTVNDQGALPGMVWQDRDVYLQGPIWAKIPHTDGHFHPSPLMGGFGLKHPPPQIMIKNTPVPANPPTTFSPAKFASFITQYSTGQVSVEIEWELQKENSKRWNPEIQYTSNYNKSVNVDFTVDTNGVYSEPRPIGTRYLTRNL

SEQ ID NO: 837 - protein, 668 aa, Artificial Sequence
  Description of Artificial Sequence: Synthetic polypeptide
MAADGYLPDWLEDNLSEGIREWWALKPGVPQPKANQQHQDNRRGLVLPGYKYLGPGNGLDKGEPVNEADAAALEHDKAYDQQLKAGDNPYLKYNHADAEFQERLQEDTSFGGNLGRAVFQAKKRILEPLGLVEGAAKTAPGKKRPVDQSPQEPDSSSGVGKSGKQPARKRLNFGQTGDSESVPDPQPLGEPPAAPTSLGSNTMASGGGAPMADNNEGADGVGNSSGNWHCDSQWLGDRVITTSTRTWALPTYNSHLYKQISSQSGASNDNHYFGYSTPWGILTLTDSTATSHHVTGSDSLTTTGDSGPRNSASSSSTSKLKRSRRTMARRLLPITLPARFKCLRTRSISSRTCSGRRTKAVSRRFQRTPSWSLSMDTSPTTEVKRWDAHPFTAWSTSLRRCGLEITSNSAIPSRMYLFTAATLTARVWIAILLLISICTTTERKEQPLEQPTNHGCFLARLGLSLCLCRPEIGYLGPATGNRDFQRLLTTTTTVTFLGQRPANIISMAATRWIQDQLWPVTRTMKKNFSLCTAIRGPYLAWCGKIVTCTFKDLSGQRFLTRMDTFILLLWEALDNIRLLKSSKILRYRQILRRLSARPSLLHLSLSTPLDRSAWKLSGSYRKKTANVGIQRFSTLPTTTSLLMWTLLTLMVFIVNLALLEPGISHETC

SEQ ID NO: 838 - protein, 734 aa, Artificial Sequence
  Description of Artificial Sequence: Synthetic polypeptide
MTDGYLPDWLEDNLSEGVREWWALQPGAPKPKANQQHQDNARGLVLPGYKYLGPGNGLDKGEPVNAADAAALEHDKAYDQQLKAGDNPYLKYNHADAEFQQRLQGDTSFGGNLGRAVFQAKKRVLEPLGLVEQAGETAPGKKRPLIESPQQPDSSTGIGKKGKQPAKKKLVFEDETGAGDGPPEGSTSGAMSDDSEMRAATGGAAVEGGQGADGVGNASGDWHCDSTWSEGHVTTTSTRTWVLPTYNNHLYKRLGESLQSNTYNGFSTPWGYFDFNRFHCHFSPRDWQRLINNNWGMRPKAMRVKIFNIQVKEVTTSNGETTVANNLTSTVQIFADSSYELPYVMDAGQEGSLPPFPNDVFMVPQYGYCGLVTGNTSQQQTDRNAFYCLEYFPSQMLRTGNNFEITYSFEKVPFHSMYAHSQSLDRLMNPLIDQYLWGLQSTTTGTTLNAGTATTNFTKLRPTNLSNFKKNWLPGPSIKQQGFSKTANQNYKIPATGSDSLIKYETHSTLDGRWSALTPGPPMATAGPADSKFSNSQLIFAGPKQNGNTATVPGTLIFTSEEELAATNATDTDMWGNLPGGDQSNSNLPTVDRLTALGAVPGMVWQNRDIYYQGPIWAKIPHTDGHFHPSPLIGGFGLKHPPPQIFIKNTPVPANPATTFSSTPVNSFITQYSTGQVSVQIDWEIQKERSKRWNPEVQFTSNYGQQNSLLWAPDAAGKYTEPRAIGTRYLTHHL

SEQ ID NO: 839 - protein, 734 aa, Artificial Sequence
  Description of Artificial Sequence: Synthetic polypeptide
MTDGYLPDWLEDNLSEGVREWWALQPGAPKPKANQQHQDNARGLVLPGYKYLGPGNGLDKGEPVNAADAAALEHDKAYDQQLKAGDNPYLKYNHADAEFQQRLQGDTSFGGNLGRAVFQAKKRVLEPLGLVEQAGETAPGKKRPLIESPQQPDSSTGIGKKGKQPAKKKLVFEDETGAGDGPPEGSTSGAMSDDSEMRAAAGGAAVEGGQGADGVGNASGDWHCDSTWSEGHVTTTSTRTWVLPTYNNHLYKRLGESLQSNTYNGFSTPWGYFDFNRFHCHFLPRDWQRLINNNWGVRPKAMRVKIFNIQVKEVTTSNGETTVANNLTSTVQIFADSSYELPYVMDAGQEGSLPPFPNDVFMVPQYGYCGLVTGDTSQQQTDRNAFYCLEYFPSQMLRTGNNFEITYSFEKVPFHSMYAHSQSLDRLMNPLIDQYLWGLQSTTTGTTLNAGTATTNFTKLRPTNFSNFKKNWLPGPSIKQQGFSKTANQNYKIPATGSDSLIKYETHSTLDGRWSALTPGPPMATAGPADSKFSNSQLIFAGPKQNGNTATVPGTLIFTSEEELAATNATDTDMWGNLPGGDQSNSNLPTVDRLTALGAVPGMVWQNRDIYYQGPIWAKIPHTDGHFHPSPLIGGFGLKHPPPQIFIKNTPVPANPATTFSSTPVNSFITQYSTGQVSVQIDWEIQKERSKRWNPEVQFTSNYGQQNSLLWAPDAAGKYTEPRAIGTRYLTHHL

SEQ ID NO: 840 - protein, 734 aa, Artificial Sequence
  Description of Artificial Sequence: Synthetic polypeptide
MTDGYLPDWLEDNLSEGVREWWALQPGAPKPKANQQHQDNARGLVLPGYKYLGPGNGLDEGEPVNAADAAALEHDKAYDQQLKAGDNPYLKYNHADAEFQQRLQGDTSFGGNLGRAVFQAKKRVLEPLGLVEQAGETAPGKKRPLIESPQQPDSSTGIGKKGKQPAKKKLVFEDETGAGDGPPEGSTSGAMSDDSEMRAAAGGAAVEGGQGADGVGNASGDWHCDSTWSEGHVTTTSTRTWVLPTYNNHLYKRLGESLQSNTYNGFSTPWGYFDFNRFHCHFSPRDWQRLINNNWGMRPKAMRVKIFNIQVKEVTTSNGETTVANNLTSTVQIFADSSYELPYVMDAGQEGSLPPFPNDVFMVPQYGYCGLVTGNTSQQQTDRNAFYCLEYFPSQMLRTGNNFEITYSFEKVPFHSMYAHSQSLDRLMNPLIDQYLWGLQSTTTGTTLNAGTATTNFTKLRPTNFSNFKKNWLPGPSIKQQGFSKTANQNYKIPATGSDSLIKYETHSTLDGRWSALTPGPPMATAGPADSKFSNSQLIFAGPKQNGNTATVPGTLIFTSEEELAATNATDTDMWGNLPGGDQSNSNLPTVDRLTALGAVPGMVWQNRDIYYQGPIWAKIPHTDGHFHPSPLIGGFGLKHPPPQIFIKNTPVPANPATTFSSTPVNSFITQYSTGQVSVQIDWEIQKERSKRWNPEVQFTSNYGQQNSLLWAPDAAGKYTEPRAIGTRYLTHHL

SEQ ID NO: 841 - protein, 734 aa, Artificial Sequence
  Description of Artificial Sequence: Synthetic polypeptide
MTDGYLPDWLEDNLSEGVREWWALQPGAPKPKANQQHQDNARGLVLPGYKYLGPGNGLDKGEPVNAADAAALEHDKAYDQQLKAGDNPYLKYNHADAEFQQRLQGDTSFGGNLGRAVFQAKKRVLEPLGLVEQAGETAPGKKRPLIESPQQPDSSTGIGKKGKQPAKKKLVFEDGTGAGDGPPEGSTSGAMSDDSEMRAAAGGAAVEGGQGADGVGNASGDWHCDSTWSEGHVTTTSTRTWVLPTYNNHLYKRLGESLQSNTYNGFPTPWGYFDFNRFHCHFSPRDWQRLINNNWGMRPKAMRVKIFNIQVKEVTTSNGETTAANNLTSTVQIFADSSYELPYVMDAGQEGSLPPFPNDVFMVPQYGYCGLVTGNTSQQQTDRNAFYCLEYFPSQMLRTGNNFEITYSFEKVPFHSMYAHSQSLDRLMNPLIDQYLWGLQSTTTGTTLNAGTATTNFTKLRPTNFSNFKKNWLPGPSIKQQGFSKTANQNYKIPATGSDSLIKYETHSTLDGRWSALTPGPPMATAGPADSKFSNSQLIFAGPKQNGNTATVPGTLIFTSEEELAATNATDTDMWGNLPGGDQSNSNLPTVDRLTALGAVPGMVWQNRDIYYQGPIWAKIPHTDGHFHPSPLIGGFGLKHPPPQIFIKNTPVPANPATTFSSTPVNSFITQYSTGQVSVQIDWEIQKERSKRWNPEVQFTSNYGQQNSLLWAPDAAGKYTEPRAIGTRYLTHHL

SEQ ID NO: 842 - protein, 734 aa, Artificial Sequence
  Description of Artificial Sequence: Synthetic polypeptide
MTDGYLPDWLEDNLSEGVREWWALQPGAPKPKANQQHQDNARGLVLPGYKYLGPGNGLDKGEPVNAADAAALEHDKAYDQQLKAGDNPYLKYNHADAEFQQRLQGDTSFGGNLGRAVFQAKKRVLEPLGLVEQAGETAPGKKRPLIESPQQPDSSTGIGKKGKQPAKKKLVFEDETGAGDGPPEGSTSGAMSDDSEMRAAAGGAAVEGGQGADGVGNASGDWHCDSTWSEGHVTTTSTRTWVLPTYNNHLYKRLGESLQSNTYNGFSTPWGYFDFNRFHCHFSPRDWQRLINNNWGMRPKAMRVKIFNIQVKEVTTSNGETTVANNLTSTVQIFADSSYELPYVMDAGQEGSLPPFPNDVFMVPQYGYRGLVTGNTSQQQTDRNAFYCLEYFPSQMLRTGNNFEITYSFEKVPFHSMYAHSQSLDRLMNPLIDQYLWGLQSTTTGTTLNAGTATTNFTKLRPTNFSNFKKNWLPGPSIKQQGFSKTANQNYKIPATGSDSLIKYETHSTLDGRWSALTPGPPMATAGPADSKFSNSQLIFAGPKQNGNTATVPGTLIFTSEEELAATNATDTDMWGNLPGGDQSNSNLPTVDRLTALGAVPGMVWQNRDIYYQGPIWAKIPHTDGHFHPSPLIGGFGLKHPPPQIFIKNTPVPANPATTFSSTPVNSFITQYSTGQVSVQIDWEIQKERSKRWNPEVQFTSNYGQQNSLLWAPDAAGKYTEPRAIGTRYLTHHL

SEQ ID NO: 843 - protein, 734 aa, Artificial Sequence
  Description of Artificial Sequence: Synthetic polypeptide
MTDGYLPDWLEDNLSEGVREWWALQPGAPKPKANQQHQDNARGLVLQGYKYLGPGNGLDKGEPVNAADAAALEHDKAYDQQLKAGDNPYLKYNHADAEFQQRLQGDTSFGGNLGRAVFQAKKRVLEPLGLVEQAGETAPGKKRPLIESPQQPDSSTGIGKKGKQPAKKKLVFEDETGAGDGPPEGSTSGAMSDDSEMRAAAGGAAVEGGQGADGVGNASGDWHCDSTRSEGHVTTTSTRTWVLPTYNNHLYKRLGESLQSNTYNGFSTPWGYFDFNRFHCHFSPRDWQRLINNNWGMRPKAMRVKIFNIQVKEVTTSNGETTVANNLTSTVQIFADSSYELPYVMDAGQEGSLPPFPNDVFMVPQYGYCGLVTGNTSQQQTDRNAFYCLEYFPSQMLRTGNNFEITYSFEKVPFHSMYAHSQSLDRLMNPLIDQYLWGLQSTTTGTTLNAGTATTNFTKLRPTNFSNFKKNWLPGPSIKQQGFSKTANQNYKIPATGSDSLIKYETHSTLDGRWSARTPGPPMATAGPADSKFSNSQLIFAGPKQNGNTATVPGTLIFTSEEELAATNATDTDMWGNLPGGDQSNSNLPTVDRLTALGAVPGMVWQNRDIYYQGPIWAKIPHTDGHFHPSPLIGGFGLKHPPPQIFIKNTPVPANPATTFSSTPVNSFITQYSTGQVSVQIDWEIQKERSKRWNPEVQFTSNYGQQNSLLWAPDAAGKYTEPRAIGTRYLTHHL

SEQ ID NO: 844 - protein, 724 aa, Artificial Sequence
  Description of Artificial Sequence: Synthetic polypeptide
MSFVDHPPDWLEEVGEGLREFLGLEAGPPKPKPNQQHQDQARGLVLPGYNYLGPGNGLDRGEPVNRADEVAREHDISYNEQLEAGDNPYLKYNHADAEFQERLADDTSFGGNLGKAVFQAKKRVLEPFGLVEEGAKTAPTGKRIDDHFPKRKKARTEEDSKPSTSSDAEAGPSGSQQLQIPAQPASSLGADTMSAGGGGPLGDNNQGADGVGNASGDWHCDSTWMGDRVVTKSTRTWVLPSYNNHQYREIKSGSVDGSNANAYFGYSTPWGYFDFNRFHSHWSPRDWQRLINNYWGFRPRSLRVKIFNIQVKEVTVQDSTTTIANNLTSTVQVFTDDDYQLPYVVGNGTEGCLPAFPPQVFTLPQYGYATLNRDNTENPTERSSFFCLEYFPSKMLRTGNNFEFTYNFEEVPFHSSFAPSQNLFKLANPLVDQYLYRFVSTNNTGGVQFNKNLAGRYANTYKNWFPGPMGRTQGWNLGSGVNRASVSAFATTNRMELEGASYQVPPQPNGMTNNLQGSNTYALENTMIFNSQPANPGTTATYLEGNMLITSESETQPVNRVAYNVGGQMATNNQSSTTAPATGTYNLQEIVPGSVWMERDVYLQGPIWAKIPETEAHFHPSPAMGGFGLKHPPPMMLIKNTPVPGNITSFSDVPVSSFITQYSTGQVTVEMEWELKKENSKRWNPEIQYTNNYNDPQFVDFAPDSTGEYRTTRPIGTRYLTRPL

SEQ ID NO: 845 - protein, 724 aa, Artificial Sequence
  Description of Artificial Sequence: Synthetic polypeptide
MSFVDHPPDWLEEVGEGLREFLGLEAGPPKPKPNQQHQDQARGLVLPGYNYLGPGNGLDRGEPVNRADEVAREHDISYNEQLEAGDNPYLKYNHADAEFQEKLADDTSSGGNLGKAVFQAKKRVLEPFGLVEEGAKTAPTGKRIDDHFPKRKKARTEEDSKPSTSSDAEAGPSGSQQLQIPAQPASSLGADTMSAGGGGPLGDNNQGADGVGNASGDWHCDSTWMGDRVVTKSTRTWVLPSYNNHQYREIKSGSVDGSNANAYFGYSTPWGYFDFNRFHSHWSPRDWQRLINNYWGFRPRSLRVKIFNIQVKEVTVQDSTTTIANNLTSTVQVFTDDDYQLPYVVGNGTEGCLPAFPPQVFTLPQYGYATLNRDNTENPTERSSFFCLEYFPSKMLRTGNNFEFTYNFEEVPFHSSFAPSQNLFKLANPLVDQYLYRFVSTNNTGGVQFNKNLAGRYANTYKNWFPGPMGRTQGWNLGSGVNRASVSAFATTNRMELEGASYQVPPQPNGMTNNLQGSNTYALENTMIFNSQPANPGTTATYLEGNMLITSESETQPVNRVAYNVGGQMATNNQSSTTAPATGTYNLQEIVPGSVWMERDVYLQGPIWAKIPETGAHFHPSPAMGGFGLKHPPPMMLIKNTPVPGNITSFSDVPVSSFITQYSTGQVTVEMEWELKKENSKRWNPEIQYTNNYNDPQFVDFAPDSTGEYRTTRPIGTRYLTRPL

SEQ ID NO: 846 - protein, 724 aa, Artificial Sequence
  Description of Artificial Sequence: Synthetic polypeptide
MSFVDHPPDWLEEVGEGLREFLGLEAGPPKPKPNQQHQDQARGLVLPGYNYLGPGNGLDRGEPVNRADEVAREHDISYNEQLEAGDNPYLKYNHADAEFQEKLADDTSFGGNLGKAVFQAKKRVLEPFGLVEEGAKTAPTGKRIDDHFPKRKKARTEEDSKPSTSSDAEAGPSGSQQLQIPAQPASSLGADTMSAGGGGPLGDNNQGADGVGNASGDWHCDSTWMGDRVVTKSTRTWVLPSYNNHQYREIKSGSVDGSNANAYFGYSTPWGYFDFNRFHSHWSPRDWQRLINNYWGFRPRSLRVKIFNIQVKEVTVQDSTTTIANNLTSTVQVFTDDDYQLPYVVGNGTEGCLPAFPPQVFTLPQYGYATLNRDNTENPTERSSFFCLEYFPSKMLRTGNNFEFTYNFEEVPFHSSFAPSQNLFKLANPLVDQYLYRFVSTNNTGGVQFNKNLAGRYANTYKNWFPGPMGRTQGWNLGSGVNRASVSAFATTNRMELEGASYQVPPQPNGMTNNLQGSNTYALENTMIFNSQPANPGTTATYLEGNMLITSESETQPVNRVAYNVGGQMATNNQSSTTAPATGTYNLQEIVPGSVWMERDVYLQGPIWAKIPETGAHFHPSPAMGGFGLKHPPPMMLIKSTPVPGNITSFSDVPVSSFITQYSTGQVTVEMEWELKKENSKRWNPEIQYTNNYNDPQFVDFAPDSTGEYRTTRPIGTRYLTRPL

SEQ ID NO: 847 - protein, 724 aa, Artificial Sequence
  Description of Artificial Sequence: Synthetic polypeptide
MSFVDHPPDWLEEVGEGLREFLGPEAGPPKPKPNQQHQDQARGLVLPGYNYLGPGNGLDRGEPVNRADEVAREHDISYNEQLEAGDNPYLKYNHADAEFQEKLADDTSFGGNLGKAVFQAKKRVLEPFGLVEEGAKTAPTGKRIDDHFPKRKKVRTEEDSKPSTSSDAEAGPSGSQQLQIPAQPASSLGADTMSAGGGGPLGDNNQGADGVGNASGDWHCDSTWMGDRVVTKSTRTWVPPSYNNHQYREIKSGSVDGSNANAYFGYSTPWGYFDFNRFHSHWSPRDWQRLINNYWGFRPRSLRVKIFNIQVKEVTVQDSTTTIANNLTSTVQVFTDDDYQLPYVVGNGTEGCLPAFPPQVFTLPQYGYATLNRDNTENPTERSSFFCLEYFPSKMLRTGNNFEFTYNFEEVPFHSSFAPSQNLFKLANPLVDQYLYRFVSTNNTGGVQFNKNLAGRYANTYKNWFPGPMGRTQGWNLGSGVNRASVSAFATTNRMELEGASYQVPPQPNGMTNNLQGSNTYALENTMIFNSQPANPGTTATYLEGNMLITSESETQPVNRVACNVGGQMATNNQSSTTAPATGTYNLQEIVPGSVWMERDVYLQGPIWAKIPETGAHFHPSPAMGGFGLKHPPPMMLIKNTPVPGNITSFSDVPVSSFITQYSTGQVTVEMEWELKKENSKRWNPEIQYTNNYNDPQFVDFAPDSTGEYRTTRPIGTRYLTRPL

SEQ ID NO: 848 - protein, 724 aa, Artificial Sequence
  Description of Artificial Sequence: Synthetic polypeptide
MSFVDHPPDWLEEVGEGLREFLGLEAGPPKPKPNQQHQDQARGLVLPGYNYLGPGNGLDRGEPVNRADEVAREHDISYNEQLEAGDNPYLKYNHADAEFQEKLADDTSFGGNLGKAVFQAKKRVLEPFGLVEEGAKTAPTGKRIDDHFPKRKKARTEEDSKPSTSSDAEAGPSGSQQLQIPAQPASSLGADTMSAGGGGPLGDNNQGADGVGNASGDWHCDSTWMGDRVVTKSTRTWVLPSYNNHQYREIKSGSVDGSNANAYFGYSTPWGYFDFNRFHSHWSPRDWQRLINNYWGFRPRSLRVKIFNIQVKEVTVQDSTTTIANNLTSTVQVFTDDDYQLPYVVGNGTEGCLPAFPPQVFTLPQYGYATLNRDNTENPTERSSFFCLEYFPSKMLRTGNNFEFTYNFEEVPFHSSFAPSQNLFKLANPLVDQYLYRFVSTNNTGGVQFNKNLAGRYANTYKNWFPGPMGRTQGWNLGSGVNRASVSAFATTNRMELEGASYQVPPQPNGMTNNLQGSNTYALENTMIFNSQPANPGTTATYLEGNMLITSESETQPVNRVAYNVGGQMATNNQSSTTAPATGAYNLQEIVPGSVWMERDVYLQGPIWAKIPETGAHFHPSPAMGGFGLKHPPPMMLIKNTPVPGNITSFSDVPVSSFITQYSTGQVTVEMEWELKKENSKRWNPEIQYTNNYNDPQFVDFAPDSTGEYRTTRPIGTRYLTRPL

SEQ ID NO: 849 - protein, 724 aa, Artificial Sequence
  Description of Artificial Sequence: Synthetic polypeptide
MSFVDHPPDWLEEVGEGLREFLGLEAGPPKPKPNQQHQDQARGLVLPGYNYLGPGNGLDRGEPVNRADGVAREHDISYNEQLEAGDNPYLKYNHADAEFQEKLADDTSFGGNLGKAVFQAKKRVLEPFGLVEEGAKTAPTGKRIDDHFPKRKKARTEEDSKPSTSSDAEAGPSGSQQLQIPAQPASSLGADTMSAGGGGPLGDNNQGADGVGNASGDWHCDSTWMGDRVVTKSTRTWVLPSYNNHQYREIKSGSVDGSNANAYFGYSTPWGYFDFNRFHSHWSPRDWQRLINNYWGFRPRSLRVKIFNIQVKEVTVQDSTTTIANNLTSTVQAFTDDDYQLPYVVGNGTEGCLPAFPPQVFTLPQYGYATLNRDNTENPTERSSFFCLEYFPSKMLRTGNNFEFTYNFEEVPFHSSFAPSQNLFKLANPLVDQYLYRFVSTNNTGGVQFNKNLAGRYANTYKNWFPGPMGRTQGWNLGSGVNRASVSAFATTNRMELEGASYQVPPQPNGMTNNLQGSNTYALENTMIFNSQPANPGTTATYLEGNMLITSESETQPVNRVAYNVGGQMATNNQSSTTAPATGTYNLQEIVPGSVWMERDVYLQGPIWAKIPETGAHFHPSPAMGGFGLKHPPPMMLIKNTPVPGNITSFSDVPVSSFITQYSTGQVTVEMEWELKKENSKRWNPEIQYTNNYNDPQFVDFAPDSTGEYRTTRPIGTRYLTRPL

SEQ ID NO: 850 - protein, 723 aa, Artificial Sequence
  Description of Artificial Sequence: Synthetic polypeptide
MSFVDHPPDWLEEVGEGLREFLGLEAGPPKPKPNQQHQDQARGLVLPGYNYLGPGNGLDRGEPVNRADEVAREHDISYNEQLEAGDNPYLKYNHADAEFQEKLADDTSFGGNLGKAVFQAKKRVLEPFGLVEEGAKTAPTGKRIDDHFPKRKKARTEEDSKPSTSSDAEAGPSGSQQLQIPAQPASSLGADTMSAGGGGPLGDNNQGADGVGNASGDWHCDSTWMGDRVVTKSTRTWVLPSYNNHQYREIKSGSVDGSNANAYFGYSTPWGYFDFNRFHSHWSPRDWQRLINNYWGFRPRSLRVKIFNIQVKEVTVQDSTTTIANNLTSTVQVFTDDDYQLPYVVGNGTEGCLPAFPPQVFTLPQYGYATLNRDNTENPTERSSFFCLEYFPSKMLRTGNNFEFTYNFEEVPFHSSFAPSQNLFKLANPLVDQYLYRFVSTNNTGGVQFNKNLAGRYANTYKNWFPGPMGRTQGWNLGSGVNRASVSAFATTNRMELEGASYVPPQPNGMTNNLQGSNTYALENTMIFNSQPANPGTTATYLEGNMLITSESETQPVNRVAYNVGGQMATNNQSSTTAPATGTYNLQEIVPGSVWMEGDVYLQGPIWAKIPETGAHFHPSPAMGGFGLKHPPPMMLIKNTPVPGNITSFSDVPVSSFITQYSTGQVTVEMEWELKKENSKRWNPEIQYTNNYNDPQFVDFAPDSTGEYRTTRPIGTRYLTRPL

SEQ ID NO: 851 - protein, 724 aa, Artificial Sequence
  Description of Artificial Sequence: Synthetic polypeptide
MSFVDHPPDWLEEVGEGLREFLGLEAGPPKPKPNQQHQDQARGLVLPGYNYLGPGNGLDRGEPVNRADEVAREHDISYNEQLEAGDNPYLKYNHADAEFQEKLADDTSFGGNLGKAVFQAKKRVLEPFGLVEEGAKTAPTGKRIDDHFPKRKKVRTEEDSKPSTSSDAEAGPSGSQQLQIPAQPASSLGADTMSAGGGGPLGDNNQGADGVGNASGDWHCDSTWMGDRVVTKSTRTWVLPSYNNHQYREIKSGSVDGSNANAYFGYSTPWGYFDFNRFHSHWSPRDWQRLINNYWGFRPRSLRVKIFNIQVKEVTVQDSTTTIANNLTSTVQVFTDDDYQLPYVVGNGTEGCLPAFPPQVFTLPQYGYATLNRDNTENPTERSSFFCLEYFPSKMLRTGNNFEFTYNFEEVPFHSSFAPSQNLFKLANPLVDQYLYRFVSTNNTGGVQFNKNLAGRYANTYKNWFPGPMGRTQGWNLGSGVNRASVSAFATTNRMELEGASYQVPPQPNGMTNNLQGSNTYALENTMIFNSQPANPGTTATYLEGNMLITSESETQPVNRVAYNVGGQMATNNQSSTTAPATGTYNLQEIVPGSVWMERDVYLQGPIWAKIPETGAHFHPSPAMGGFGLKHPPPMMLIKNTPVPGNITSFSDVPVSSFITQYSTGQVTVEMEWELKKENSERWNPEIQYTNNYNDPQFVDFAPDSTGEYRTTRPIGTRYLTRPL

SEQ ID NO: 852 - protein, 724 aa, Artificial Sequence
  Description of Artificial Sequence: Synthetic polypeptide
MSFVDHPPDWLEEVGEGLREFLGLEAGPPKPKPNQQHQDQARGLVLPGYNYLGPGNGLDRGEPVNRADEVAREHDISYSEQLEAGDNPYLKYNHADAEFQEKLADDTSFGGNLGKAVFQAKKRVLEPFGLVEEGAKTAPTGKRIDDHFPKRKKARTEEDSKPSTSSDAEAGPSGSQQLQIPAQPASSLGADTMSAGGGGPLGDNNQGADGVGNASGDWHCDSTWMGDRVVTKSTRTWVLPSYNNHQYREIKSGSVDGSNANAYFGYSTPWGYFDFNRFHSHWSPRDWQRLINNYWGFRPRSLRVKIFNIQVKEVTVQDSTTTIANNLTSTVQVFTDDDYQLPYVVGNGTEGCLPAFPPQVFTLPQYGYATLNRDNTENPTERSSFFCLEYFPSKMLRTGNNFEFTYNFEEVPFHSSFAPSQNLFKLANPLVDQYLYRFVSTNNTGGVQFNKNLAGRYANTYKNWFPGPMGRTQGWNLGSGVNRASVSAFATTNRMELEGASYQVPPQPNGMTNNLQGSNTYALENTMIFNSQPANPGTTATYLEGNMLITSESETQPVNRVAYNVGGQMATNNQSSTTAPATGTYNLQEIVPGSVWMERDVYLQGPIWAKIPETGAHFHPSPAMGGFGLKHPPPMMLIKNTPVPGNITSFSDVPVSSFITQYSTGQVTVEMEWELKKENSKRWNPEIQYTNNYNDPQFVDFAPDSTGEYRTARPIGTRYLTRPL

SEQ ID NO: 853 - protein, 724 aa, Artificial Sequence
  Description of Artificial Sequence: Synthetic polypeptide
MSFVDHPPDWLEEVGEGLREFLGPEAGPPKPKPNQQHQDQARGLVLPGYNYLGPGNGLDRGEPVNRADEVAREHDISYNEQLEAGDNPYLKYNHADAEFQEKLADDTSFGGNLGKAVFQAKKRVLEPFGLVEEGAKTAPTGKRIDDHFPKRKKARTEEDSKPSTSSDAEAGPSGSQQLQIPAQPASSLGADTMSAGGGGPLGDNNQGADGVGNASGDWHCDSTWMGDRVVTKSTRTWVLPSYNNHQYREIKSGSVDGSNANAYFGYSTPWGYFDFNRFHSHWSPRDWQRLINNYWGFRPRSLRVKIFNIQVKEVTVQDSTTTIANNLTSTVQVFTDDDYQLPYVVGNGTEGCLPAFPPQVFTLPQYGYATLNRDNTENPTERSSFFCLEYFPSKMLRTGNNFEFTYNFEEVPFHSSFAPSQNLFKLANPLVDQYLYRFVSTNNTGGVQFNKNLAGRYANTYKNWFPGPMGRTQGWNLGSGVNRASVSAFATTNRMELEGASYQVPPQPNGMTNNLQGSNTYALENTMIFNSQPANPGTTATYLEGNMLITSESETQPVNRVAYNVGGQMTTNNQSSTTAPATGTYNLQEIVPGSVWMERDVYPQGPIWAKIPETGAHFHPSPAMGGFGLKHPPPMMLIKNTPVPGNITSFSDVPVSSFITQYSTGQVTVEMEWELKKENSKRWNPEIQYTNNYNDPQFVDFAPDSTGEYRTTRPIGTRYLTRPL

SEQ ID NO: 854 - protein, 724 aa, Artificial Sequence
  Description of Artificial Sequence: Synthetic polypeptide
MSFVDHPPDWLEEVGEGLREFLGLEAGPPKPKPNQQHQDQARGLVLPGYNYLGPGNGLDRGEPVNRADEVAREHDISYNEQLEAGDNPYLKYNHADAEFQEKLADDTSFGGNLGKAVFQAKKRVLEPFGLVEEGAKTAPTGKRIDDHFPKRKKARTEEDSKPSTSSDAEAGPSGSQQLQIPAQPASSLGADTMSAGGGGPLGDNNQGADGVGNASGDWHCDSTWMGDRVVTKSTRTWVLPSYNNHQYREIKSGSVDGSNANAYFGYSTPWGYFDFNRFHSHWSPRDWQRLINNYWGFRPRSLRVKIFNIQVKEVTVQDSTTTIANNLTSTVQVFTDDDYQLPYVVGNGTEGCLPAFPPQVFTLPQYGYATLNRDNTENPTERSSFLCLEYFPSKMLRTGNNFEFTYNFEEVPFHSSFAPSQNLFKLANPLVDQYLYRFVSTNNTGGVQFNKNLAGRYANTYKNWFPGPMGRTQGWNLGSGVNRASVSAFATTNRMELEGASYQVPPQPNGMTNNLQGSNTYALENTMIFNSQPANPGTTATYLEGNMLITSESETQPVNRVAYNVGGQMATNNQSSTTAPATGTYNLQEIVPGSVWMKRDVYLQGPIWAKIPETGAHFHPSPAMGGFGLKHPPPMMLIKNTPVPGNITSFSDVPVSSFITQYSTGQVTVEMEWELKKENSKRWNPEIQYTNNYNDPQFVDFAPDSTGEYRTTRPIGTRYLTRPL

SEQ ID NO: 855 - protein, 724 aa, Artificial Sequence
  Description of Artificial Sequence: Synthetic polypeptide
MSFVDHPPDWLEEVGEGLREFLGLEAGPPKPKPNQQHQDQARGLVLPGYNYLGPGNGLDRGEPVNRADEVAREHDISYNEQLEAGDNPYLKYNHADAEFQEKLADDTSFGGNLGKAVFQAKKRVLEPFGLVEEGAKTAPTGKRIDDHFPKRKKARTEEDSKPSTPSDAEAGPSGSQQLQIPAQPASSLGADTMSAGGGGPLGDNNQGADGVGNASGDWHCDSTWMGDRVVTKSTRTWVLPSYNNHQYREIKSGSVDGSNANAYFGYSTPWGYFDFNRFHSHWSPRDWQRLINNYWGFRPRSLRVKIFNIQVKEVTVQDSTTTIANNLTSTVQVFTDDDYQLPYVVGNGTEGCLPAFPPQVFTLPQYGYATLNRDNTENPTERSSFFCLEYFPSKMLRTGNNFEFTYNFEEVPFHSSFAPSQNLFKLANPLVDQYLYRFVSTNNTGGVQFNKNLAGRYANTYKNWFPGPMGRTQGWNLGSGVNRASVSAFATTNRMELEGASYQVPPQPNGMTNNLQGSNTYALENTMIFNSQPANPGTTATYLEGNMLITSESETQPVNRVAYNVGGQMATNNQSSTTAPATGTYNLQEIVPGSVWMERDVYLQGPIWAKIPETGAHFHPSPAMGGFGLKHPPPMMLIKNTPVPGNITSFSDVPVSSFITQYSTGQVTVEMEWELKKENSKRWNPEIQYTNNYNDPQFVDFAPDSTGEYRTTRPIGTRYLTRPL

SEQ ID NO: 856 - protein, 724 aa, Artificial Sequence
  Description of Artificial Sequence: Synthetic polypeptide
MSFVDHPPDWLEEVGEGLREFLGLEAGPPKPKPNQQHQDQARGLVLPGYNYLGPGNGLDRGEPVNRADEVAREHDISYNEQLEAGDNPYLKYNHADAEFQEKLADDTSFGGNLGKAVFQAKKRVLEPFGLVEEGAKTAPTGKRIDDHFPKRKKARTEEDSKPSTSSDAEAGPSGSQQLQIPAQPASSLGADTMSAGGGGPLGDNNQGADGVGNASGDWHCDSTWMGDRVVTKSTRTWVLPSYNNHQYREIKSGSVDGSNANAYFGYSTPWGYFDFNRFHSHWSPRDWQRLINNYWGFRPRSLRVKIFNIQVKEVTVQDSTTTIANNLTSTVQVFTDDDYQLPYVVGNGTEGCLPAFPPQVFTLPQYGYATLNRDNTENPTERSSFFCLEYFPSKMLRTGNNFEFTYNFEEVPFHSSFAPSQNLFKLANPLVDQYLYRFVSTNNTGGVQFNKNLAGRYANTHKNWFPGPMGRTQGWNLGSGVNRASVSAFATTNRMELEGASYQVPPQSNGMTNNLRGSNTYALENTMIFNSQPANPGTTATYLEGNMLITSESETQPVNRVAYNVGGQMATNNQSSTTAPATGTYNLQEIVPGSVWMERDVYLQGPIWAKIPETGAHFHPSPAMGGFGLKHPPPMMLIKNTPVPGNITSFSDVPVSSFITQYSTGQVTVEMEWELKKENSKRWNPEIQYTNNYNDPQFVDFAPDSTGEYRTTRPIGTRYLTRPL

SEQ ID NO: 857 - protein, 724 aa, Artificial Sequence
  Description of Artificial Sequence: Synthetic polypeptide
MSFVDHPPDWLEEVGEGLREFLGLEAGPPKPKPNQQHQDQARGLVLPGYNYLGPGNGLDRGEPVNRADEVAREHDISYNEQLEAGDNPYLKYNHADAEFQEKLADDTSFGGNLGKAVFQAKKRVLEPFGLVEEGAKTAPTGKRIDDHFPKRKKARTEEDSKPSTSSDAEAGPSGSQQLQIPAQPASSLGADTMSAGGGGPLGDNNQGADGVGNASGDWHCDSTWMGDRVVTKSTRTWVLPSYNNHQYREIKSGSVDGSNANAYFGYSTPWGYFDFNRFHSHWSPRDWQRLINNYWGFRPRSLRVKIFNIQVKEVTVQDSTTTIANNLTSTVQVFTDDDYQLPYVVGNGTEGCLPAFPPQVFTLPQYGYATLNRDNTENPTERSSFFCLEYFPSKMLRTGNNFEFTYNFEEVPFHSSFAPSQNLFKLANPLVDQYLYRFVSTNNTGGVQFNKNLAGRYANTYKNWFPGPMGRTQGWNLGSGVNRASVSAFATTNRMELEGASYQVPPQPNGMTNNLQGSNTYALENTMIFNSQPANPGTTATYLEGNMLITSESETQPVNRVAYSVGGQMATNNQSSTTAPTTGTYNLQEIVPGSVWMERDVYLQGPIWAKIPETGAHFHPSPAMGGFRLKHPPPMMLIKNTPVPGNITSFSDVPVSSFITQYSTGQVTVEMEWELKKENSKRWNPEIQYTNNYNDPQFVDFAPDSTGEYRTTRPIGTRYLTRPL

SEQ ID NO: 858 - protein, 724 aa, Artificial Sequence
  Description of Artificial Sequence: Synthetic polypeptide
MSFVDHPPDWLEEVGEGLREFLGLEAGPPKPKPNQQHQDQARGLVLPGYNYLGPGNGLDRGEPVNRADEVAREHDISYNEQLEAGDNPYLKYNHADAEFQEKLADDTSFGGNLGKAVFQAKKRVLEPFGLVEEGAKTAPTGKRIDDHFPKRKKARTEEDSKPSTSSDAEAGPSGSQQLQIPAQPASSLGADTMSAGGGGPLGDNNQGADGVGNASGDWHCDSTWMGDRVVTKSTRTWVLPSYNNHQYREIKSGSVDGSNANAYFGYSTPWGYFDFNRFHSHWSPRDWQRLINNYWGFRPRSLRVKIFNIQVKEVTVQDSTTTIANNLTSTVQVFTDDDYQLPYVVGNGTEGCLPAFPPQVFTLPQYGYATLNRDNTENPTERSSFFCLEYFPSKMLRTGNNFEFTYNFEEVPFHSSFAPSQNLFKLANPLVDQYLYRFVSTNNTGGVQFNKNLAGRYANTYKNWFPGPMGRTQGWNLGSGVNRASVSAFAATNRMELEGASYQVPPQPNGMTNNLQGSNTYALENTMIFNSQPANPGTTATYLEGNMLITSESETQPVNRVAYNVGGQMATNNQSSTTAPATGTYNLQEIVPGGVWMERDVYLQGPIWAKIPETGAHFHPSPAMGGFGLKHPPPMMLIKNTPVPGNTTSFSDVPVSSFITQYSTGQVTVEMEWELKKENSKRWNPEIQYTNNYNDPQFVDFAPDSTGEYRTTRPIGTRYLTRPL

SEQ ID NO: 859 - protein, 724 aa, Artificial Sequence
  Description of Artificial Sequence: Synthetic polypeptide
MSFVDHPPDWLEEVGEGLREFLGLEAGPPKPKPNQQHQDQARGLVLPGYNYLGPGNGLDRGEPVNRADEVAREHDISYNEQLEAGDNPYLKYNHADAEFQEKLADDTSFGGNLGKVVFQAKKRVLEPFGLVEEGAKTAPTGKRIDDHFPKRKKARTEEDSKPSTSSDAEAGPSGSQQLQIPAQPASSLGADTMSAGGGGPLGGNNQGADGVGNASGDWHCDSTWMGDRVVTKSTRTWVLPSYNNHQYREIKSGSVDGSNANAYFGYSTPWGYFDFNRFHSHWGPRDWQRLINNYWGFRPRSLRVKIFNIQVKEVTVQDSTTTIANNLTSTVQVFTDDDYQLPYVVGNGTEGCLPAFPPQVFTLPQYGYATLNRDNTENPTERSSFFCLEYFPSKMLRTGNNFEFTYNFEEVPFHSSFAPSQNLFKLANPLVDQYLYRFVSTNNTGGVQFNKNLAGRYANTYKNWFPGPMGRTQGWNLGSGVNRASVSALATTNRMELEGASYQVPPQPNGMTNNLQGSNTYALENTMIFNSQPANPGTTATYLEGNMLITSESETQPVNRVAYNVGGQMATNNQSSTTAPATGTYNLQEIVPGSVWMERDVYLQGPIWAKIPETGAHFHPSPAMGGFGLKHPPPMMLIKNTPVPGNITSFSDVPVSSFITQYSTGQVTVEMEWELKKENSKRWNPEIQYTNNYNDPQFVDFAPDSTGEYRTTRPIGTRYLTRPL

SEQ ID NO: 860 - protein, 723 aa, Artificial Sequence
  Description of Artificial Sequence: Synthetic polypeptide
MSFVDHPPDWLEEVGEGLREFLGLEAGPPKPKPNQQHQDQARGLVLPGYNYLGPGNGLDRGEPVNRADEVAREHDISYNEQLEAGDNPYLKYNHADAEFQEKLADDTSFGGNLGKAVFQAKKRVLEPFGLVEEGAKTAPTGKRIDDHFPKRKKARTEEDSKPSTSSDAEAGPSGSQQLQIPAQPASSLGADTMSAGGGGPLGDNNQGADGVGNASGDWHCDSTWMGDRVVTKSTRTWVLPSYNNHQYREIKSGSVDGSNANAYFGYSTPWGYFDFNRFHSHWSPRDWQRLINNYWGFRPRSLRVKIFNIQVKEVTVQDSTTTIANNLTSTVQVFTDDDYQLPYVVGNGTEGCLPAFPPQVFTLPQYGYATLNRDNTENPTERSSFFCLEYFPSKMLRTGNNFEFTYNFEEVPFHSSFAPSQNLFKLANPLVDQYLYRFVSTNNTGGVQFNKNLAGRYANTYKNWFPGPMGRTQGWNLGSGVNRASVSAFATTNRMELEGASYQVPPQPNGMTNNLQGSNTYALENTMIFNSQPANPGTTATYLEGNMLITSESETQPVNRVAYNVGGQMATNNQSSTTAPATGTYNLQEIVPGSVWMERDVYLQGPIAKIPETGAHFHPSPAMGGFGLKHPPPMMLIKNTPVPGNITSFSDVPVSSFITQYSTGQVTVEMEWELKKENSKRWNPEIQYTNNYNDPQFVDFAPDSTGECRTTRPIGTRYLTRPL

SEQ ID NO: 861 - protein, 724 aa, Artificial Sequence
  Description of Artificial Sequence: Synthetic polypeptide
MSFVDHPPDWLEEVGEGLREFLGLEAGPPKPKPNQQHQDQARGLVLPGYNYLGPGNGLDRGEPVNRADEVAREHDISYNEQLEAGDNPYLKYNHADAEFQEKLADDTSFGGNLGKAVFQAKKRVLEPFGLVEEGAKTAPTGKRIDDHFPKRKKARTEEDSKPSTSSDAEAGPSGSQQLQIPAQPASSLGADTMSAGGGGPLGDNNQGADGVGNASGDWHCDSTWMGDRVVTKSTRTWVLPSYNNHQYREIKSGSVDGSNANAYFGYSTPWGYFDFNRFHSHWSPRDWQRLINNYWGFRPRSLRVKILNIQVKEVTVQDSTTTIANNLTSTVQVFTDDDYQLPYVVGNGTEGCLPAFPPQVFTLPQYGYATLNRDNTENPTERSSFFCLEYFPSKMLRTGNNFEFTYNFEEVPFHSSFAPSQNLFKLANPLVGQYLYRFVSTNNTGGVQFNENLAGRYANTYKNWFPGPMGRTQGWNLGSGVNRASVSAFATTNRMELEGASYQVPPQPNGMTNNLQGSNTYALENTMIFNSQPANPGTTATYLEGNMLITSESETQPVNRVAYNVGGQMATNNQSSTTAPATGTYNLQEIVPGSVWMERDVYLQGPIWAKIPETGAHFHPSPAMGGFGLKHPPPMMLIKNTPVPGNITSFSDVPVSSFITQYSTGQATVEMEWELKKENSKRWNPEIQYTNNYNDPQFVDFAPDSTGEYRTTRPIGTRYLTRPL

SEQ ID NO: 862 - protein, 724 aa, Artificial Sequence
  Description of Artificial Sequence: Synthetic polypeptide
MSFVDHPPDWLEEVGEGLREFLGLEAGPPKPKPNQQHQDQARGLVLPGYNYLGPGNGLDRGEPVNRADEVAREHDISYNEQLEAGDNPYLKYNHADAEFQEKLADDTSFGGNLGKAVFQAKKRVLEPFGLVEEGAKTAPTGKRIDDHFPKRKKARTEEDSKPSTSSDAEAGPSGSQQLQIPAQPASSLGADTMSAGGGGPLGDNNQGADGVGNASGDWHCDSTWMGDRVVTKSTRTWVLPSYNNHQYREIKSGSVDGSNANAYFGYSTPWGYFDFNRFHSHWSPRDWQRLINNYWGFRPRSLRVKIFNIQVKEVTVQDSTTIIANNLTSTVQVFTDDDYQLPYVVGNGTEGCLPAFPPQVFTLPQYGYATLNRDNTENPTERSSFFCLEYFPSKMLRTGNNFEFTYNFEEVPFHSSFAPSQNLFKLANPLVDQYLYRFVSTNNTGGVQFNKNLAGRYANTYKNWFPGPMGRTQGWNLGSGVNRASVSAFATTNRMELEGASYQVPPQPNGMTNNLQGSNTYALENTMIFNSQPANPGTTATYLEGNMLITSESETQPVNRVAYNVGGQMATNNQSSTTAPATGTYNLQEIVPGSVWMERDVYLQGPIWAKIPETGAHFHPSPAMGGFGLKHPPPMMLIKNTPVPGNITSFSDVPVSSFITQYSTGQVTVEMEWELKKENSKRWNPEIQYTNNYNDPQFVDFAPDSTGEYRTTRPIGTRYLTRPL

SEQ ID NO: 863 - protein, 724 aa, Artificial Sequence
  Description of Artificial Sequence: Synthetic polypeptide
MSFVDHPPDWLEEVGEGLREFLGLEAGPPKPKPNQQHQDQARGLVLPGYNYLGPGNGLDRGEPVNRADEVAREHDISYNEQLEAGDNPYLKYNHADAEFQEKLADDTSFGGNLGKAVFQAKKRVLEPFGLVEEGAKTAPTGKRIDDHFPKRKKARTEEDSKPSTSSDAEAGPSGSQQLQIPAQPASSLGADTMSAGGGGPLGDNNQGADGVGNASGDWHCDSTWMGDRVVTKSTRTWVLPSYNNHQYREIKSGSVDGSNANAYFGYSTPWGYFDFNRFHSHWSPRDWQRLINNYWGFRPRSLRVKIFNIQVKEVTVQDSTTTIANNLTSTVQVFTDDDYQLPYVVGNGTEGCLPAFPPQVFTLPQYGYATLNRDNTENPTERSSFFCLEYFPSKMLRTGNNFEFTYNFEEVPFHSSFAPSQNLFKLANPLVDQYLYRFVSTNNTGGVQFNKNLAGRYANTYKNWFPGPMGRTQGWNLGSGVNRASVSAFATTNRMELEGASYQVPPQPNGMTNNLQGSNTYALENTMIFNSQPANPGTTATYLEGNMLITSESETQPVNRVAYNVGGQMATNNQSSTTAPATGTYNLQEIVPGSVWMERDVYLQGPIWAKIPETGAHFHPSPAMGGFGLKHPPPMMLIKNTPVPGNITSLSDVPVSSFITQYSTGQVTVEMEWELKKENSKRWNPEIQYTNNYNDPQFVDFAPDSTGEYRTTRPIGTRYLTRPL

SEQ ID NO: 864 - protein, 724 aa, Artificial Sequence
  Description of Artificial Sequence: Synthetic polypeptide
MSFVDHPPDWLEEVGEGLREFLGLEAGPPKPKPNQQHQDQARGLVLPGYNYLGPGNGLDRGEPANRADEVAREHDISYNEQLEAGDNPYLKYNHAGAEFQEKLADDTSFGGNLGKAVFQAKKRVLEPFGLVEEGAKTAPTGKRIDDHFPKRKKARTEEDSKPSTSSDAEAGPSGSQQLQIPAQPASSLGADTMSAGGGGPLGDNNQGADGVGNASGDWHCDSTWMGDRVVTKSTRTWVLPGYNNHQYREIKSGSVDGSNANAYFGYSTPWGYFDFNRFHSHWSPRDWQRLINNYWGFRPRSLRVKIFNIQVKEVTVQDSTTTIANNLTSTVQVFTDDDYQLPYVVGNGTEGCLPAFPPQVFTLPQYGYATLNRDNTENPTERSSFFCLEYFPSKMLRTGNNFEFTYNFEEVPFHSSFAPSQNLFKLANPLVDQYLYRFVSTNNTGGVQFNKNLAGRYANTYKNWFPGPMGRTQGWNLGSGVNRASVSAFATTNRMELEGASYQVPPQPNGMTNNLQGSNTYALENTMIFNSQPANPGTTATYLEGNMLITSESETQPVNRVAYNVGGQMATNNQSSTTAPATGTYNLQEIVPGSVWMERDVYLQGPIWAKIPETGAHFHPSPAMGGFGLKHPPPMMLIKNTPVPGNITSFSDVPVSSFITQYSTGQVTVEMEWELKKENSKRWNPEIQYTNNYNDPQFVDFAPDSTGEYRTTRPIGTRYLTRPL

SEQ ID NO: 865 - protein, 724 aa, Artificial Sequence
  Description of Artificial Sequence: Synthetic polypeptide
MSFVDHPPDWLEEVGEGLREFLGLEAGPPKPKPNQQHQDQARGLVLPGYNYLGPGNGLDRGEPVNRADEVAREHDISYNEQLEAGDNPYLKYNHADAEFQEKLADDTSFGGNLGKAVFQAKKRVLEPFGLVEEGAKTAPTGKRIDDHFPKRKKARTEEDSKPPTSSDAEAGPSGSQQLQIPAQPASSLGADTMSAGGGGPLGDNNQGADGVGNASGDWHCDSTWMGDRVVTKSTRTWVLPSYNNHQYREIKSGSVDGSNANAYFGYSTPWGYFDFNRFHSHWSPRDWQRLINNYWGFRPRSLRVKIFNIQVKEVTVQDSATTIANNLTSTVQVFTDDDYQLPYVVGNGTEGCLPAFPPQVFTLPQYGYATLNRDNTENPTERSSFFCLEYFPSKMLRTGNNFEFTYNFEEVPFHSSFAPSQNLFKLANPLVDQYLYRFVSTNNTGGVQFNKNLAGRYANTYKNWFPGPMGRTQGWNLGSGVNRASVSAFATTNRMELEGASYQVPPQPNGMTNNLQGSNTYALENTMIFNSQPANPGTTATYLEGNMLITSESETQPVNRVAYNVGGQMATNNQSSTTAPATGTYNLQEIVPGSVWMERDVYLQGPIWAKIPETGAHFHPSPAMGGFGLKHPPPMMLIKNTPVPGNITSFSDVPVSSFITQYSTGQVTVEMEWELKKENSKRWNPEIQYTNNYNDPQFVDFAPDSTGEYRTTRPIGTRYLTRPL

SEQ ID NO: 866 - protein, 724 aa, Artificial Sequence
  Description of Artificial Sequence: Synthetic polypeptide
MSFVDHPPDWLEEVGEGLREFLGLEAGPPKPKPNQQHQDQARGLVLPGYNYLGPGNGLDRGEPVNRADEVAREHDISYNEQLEAGDNPYLKYNHADAEFQEKLADDTSFGGNLGKAVFQAKKRVLEPFGLVEEGAKTAPTGKRIDDHFPKRKKARTEEDSKPSTSSDAEAGPSGSQQPQIPAQPASSLGADTMSAGGGGPLGDNNQGADGVGNASGDWHCDSTWMGDRVVTKSTRTWVLPSYNNHQYREIKSGSVDGSNANAYFGYSTPWGYFDFNRFHSHWSPRDWQRLINNYWGFRPRSLRVKIFNIQVKEVTVQDSTTTIANNLTSTVQVFTDDDYQLPYVVGNGTEGCLPAFPPQVFTLPQYGYATLNRDNTENPTERSSFFCLEYFPSKMLRTGNNFEFTYNFEEVPFHSSFAPSQNLFKLANPLVDQYLYRFVSTNNTGGVQFNKNLAGRYANTYKNWFPGPMGRTQGWNLGSGVNRASVSAFATTNRMELEGASYQVPPQPNGMTNNLQGSNTYALENTMIFNSQPANPGTTATYLEGNMLITSESETQPVNRVAYNVGGQMATNNQSSTTAPATGTYNLQEIVPGSVWMERDVYLQGPIWAKIPETGAHFHPSPAMGGFGLKHPPPMMLIKNTPAPGNITSFSDVPVSSFITQYSTGQVTVEMEWELKKENSKRWNPEIQYTNNYNDPQFVDFAPDSTGEYRTTRPIGTRYLTRPL

SEQ ID NO: 867 - protein, 724 aa, Artificial Sequence
  Description of Artificial Sequence: Synthetic polypeptide
MSFVDHPPDWLEEVGEGLREFLGLEAGPPKPKPNQQHQDQARGLVLPGYNYLGPGNGLDRGEPVNRADEVAREHDISYNEQLEAGDNPYLKYNHADAEFQEKLADDTSFGGNLGKAVFQAKKRVLEPFGLVEEGAKTAPTGKRIDDHFPKRKKARTEEDSKPPTSSDAEAGPSGSQQLQIPAQPASSLGADTMSAGGGGPLGDNNQGADGVGNASGDWHCDSTWMGDRVVTKSTRTWVLPSYNNHQYREIKSGSVDGSNANAYFGYSTPWGYFDFNRFHSHWSPRDWQRLINNYWGFRPRSLRVKIFNIQVKEVTVQDSTTTIANNLTSTVQVFTDDDYQLPYVVGNGTEGCLPAFPPQVFTLPQYGYATLNRDNTENPTERSSFFCLEYFPSKMLRTGNNFEFTYNFEEVPFHSSFAPSQNLFKLANPLVDQYLYRFVSTNNTGGVQFNKNLAGRYANTYKNWFPGPMGRTQGWNLGSGVNRASVSAFATTNRMELEGASYQVPPQPNGMTNNLQGSNTYALENTMIFNSQPANPGTTATYLEGNMLITSESETQPVNRVAYNVGGQMATNNQSSTTAPATGTYNLQEIVPGSVWMERDVYLQGPIWAKIPETGAHFHPSPAMGGFGLKHPPPMMLIKNTPVPGNITSFSDVPVSSFITQYSTGQVTVEMEWELKKENSKRWNPEIQYTNNYNDPQFVDFAPDSTGEYRTTRPIGTRYLTRPL

SEQ ID NO: 868 - protein, 724 aa, Artificial Sequence
  Description of Artificial Sequence: Synthetic polypeptide
MSFVDHPPDWLEEVGEGLREFLGLEAGPPKPKPNQQHQDQARGLVLPGYNYLGPGNGLDRGEPVNRADEVAREHDISYNEQLEAGDNPYLKYNHADAEFQEKLADDTSFGGNLGKAVFQAKKRVLEPFGLVEEGAKTAPTGKRIDDHFPKRKKARTEEDSKPPTSSDAEAGPSGSQQLQIPAQPASSLGADTMSAGGGGPLGDNNQGADGVGNASGDWHCDSTWMGDRVVTKSTRTWVPPSYNNHQYREIKSGSVDGSNANAYFGYSTPWGYFDFNRFHSHWSPRDWQRLINNYWGFRPRSLRVKIFNIQVKEVTVQDSTTTIANNLTSTVQVFTDDDYQLPYVVGNGTEGCLPAFPPQVFTLPQYGYATLNRDNTENPTERSSFFCLEYFPSKMLRTGNNFEFTYNFEEVPFHSSFAPSQNLFKLANPLVDQYLYRFVSTNNTGGVQFNKNLAGRYANTYKNWFPGPMGRTQGWNLGSGVNRASVSAFATTNRMELEGASYQVPPQPNGMTNNLQGSNTYALENTMIFNSQPANPGTTATYLEGNMLITSESETQPVNRVAYNVGGQMATNNQSSTTAPATGTYNLQEIVPGSVWMERDVYLQGPIWAKIPETGAHFHPSPAMGGFGLKHPPPMMLIKNTPVPGNITSFSDVPVSSFITQYSTGQVAVEMEWELKKENSKRWNPEIQYTNNYNDPQFVDFAPDSTGEYRTTRPIGTRYLTRPL

SEQ ID NO: 869 - protein, 724 aa, Artificial Sequence
  Description of Artificial Sequence: Synthetic polypeptide
MSFVDHPPDWLEEVGEGLREFLGLEAGPPKPKPNQQHQDQARGLVLPGYNYLGPGNGLDRGEPVNRADEVAREHDISYNEQLEAGDNPYLKYNHADAEFQEKLADDTSFGGNLGKAVFQAKKRVLEPFGLVEEGAKTAPTGKRIDDHFPKRKKARTEEDSKPSTSSDAEAGPSGSQQLQIPAQPASSLGADTMSAGGGGPLGDNNQGADGVGNASGDWHCDSTWMGDRVVTKSTRTWVLPSYNNHQYREIKSGSVDGSNANAYFGYSTPWGYFDFNRFHSHWSPRDWQRLINNYWGFRPRSLRVKIFNIQVKEVTVQDSTTTIANNLTSTVQVFTDDDYQLPYVVGNGTEGCLPAFPPQVFTLPQYGYATLNRDNTENPTERSSFFCLEYFPSKMLRTGNNFEFTYNFEEVPFHSSFAPSQNLFKLANPLVDQYLYRFVSTNNTGGVQFNKNLAGRYANTYKNWFPGPMGRTQGWNLGSGVNRASVSAFATTNRMELEGASYQVPPQPNGMTNNLQGSNTYALENTMIFNSQPANPGTTATYLEGNMLITSESETQPVNRVAYNVGGQMATNNQSSTTAPATGTYNLQEIVPGSVWMERDVYLQGPIWAKIPETGAHFHPSPAMGGFGLKHPPPMMLIKNTPAPGNITSFSDVPVSSFITQYSTGQVTVEMEWELKKENSKRWNPEIQYTNNYNDPQFVDFAPDSTGEYRTTRPIGTRYLTRPL

SEQ ID NO: 870 - protein, 724 aa, Artificial Sequence
  Description of Artificial Sequence: Synthetic polypeptide
MSFVDHPPDWLEEVGEGLREFLGLEAGPPKPKPNQQHQDQARGLVLPGYNYLGPGNGLDRGEPVNRADEVAREHDISYNEQLEAGDNPYLKYNHADAEFQEKLADDTSFGGNLGKAVFQAKKRVLEPFGLAEEGAKTAPTGKRIDDHFPKRKKARTEEDSKPSTSSDAEAGPSGSQQLQIPAQPASSLGADTMSAGGGGPLGDNNQGADGVGNASGDWHCDSTWMGDRVVTKSTRTWVLPSYNNHQYREIKSGSVDGSNANAYFGYSTPWGYFDFNRFHSHWSPRDWQRLINNYWGFRPRSLRAKIFNIQVKEVTVQDSTTTIANNLTSTVQVFTDDDYQLPYVVGNGTEGCLPAFPPQVFTLPQYGYATLNRDNTENPTERSSFFCLEYFPSKMLRTGNNLEFTYNFEEVPFHSSFAPSQNLFKLANPLVDQYLYRFVSTNNTGGVQFNKNLAGRYANTYKNWFPGPMGRTQGWNLGSGVNRASVSAFATTNRMELEGASYQVPPQPNGMTNNLQGSNTYALENTMIFNSQPANPGTTATYLEGNMLITSESETQPVNRVVHNVGGQMATNNQSSTTAPATGTYNLQEIVPGSVWMERDVYLQGPIWAKIPETGAHFHPSPAMGGFGLKHPPPMMLIKNTPVPGNITSFSDVPVSSFITQYSTGQVTVEMEWELKKENSKRWNPEIQYTNNYNDPQFVDFAPDSTGEYRTTRPIGTRYLTRPL

SEQ ID NO: 871 - protein, 724 aa, Artificial Sequence
  Description of Artificial Sequence: Synthetic polypeptide
MSFVDHPPDWLEEVGEGLREFLGLEAGPPKPKPNQQHQDQARGLVLPGYNYLGPGNGLDRGEPVNRADEVAREHDISYNEQLEAGDNPYLKYNHADAEFQEKLADDTSFGGNLGKAVFQAKKRVLEPFGLVEEGAKTAPTGKRIDDHFPKRKKARTEEDSKPSTSSDAEAGPSGSQQLQIPAQPASSLGADTMSAGGGGPLGDNNQGADGVGNASGDWHCDSTWMGDRVVTKSTRTWVLPSYNNHQYREIKSGSVDGGNANAYFGYSTPWGYFDFNRFHSHWSPRDWQRLINNYWGFRPRSLRVKIFNIQVKEVTVQDSTTTIANNLTSTVQVFTDDDYQLPYVVGNGTEGCLPAFPPQVFTLPQYGYATLNRDNTENPTERSSFFCLEYFPSKMLRTGNNFEFTYNFEEVPFHSSFAPSQNLFKLANPLVDQYLYRFVSTNNTGGVQFNKNLAGRYANTYKNWFPGPMGRTQGWNLGSGVNRASVSAFATTNRMELEGASYQVPPQPNGMTNNLQGSNTYALENTMIFNSQPANPGTTATYLEGNMLITSESETQPVNRVAYNVGGQMATNNQSSTTAPATGTYNLQEIVPGSVWMERDVYLQGPIWAKIPETGAHFHPSPAMGGFGLKHPPPMMLIKNTPAPGNITSFSDVPVSSFITQYSTGQVTVEMEWELKKGNSKRWNPEIQYTNNYNDPQFVDFAPDSTGEYRTTRPIGTRYLTRPL

SEQ ID NO: 872 - protein, 724 aa, Artificial Sequence
  Description of Artificial Sequence: Synthetic polypeptide
MSFVDHPPDWLEEVGEGLREFLGLEAGPPKPKPNQQHQDQARGLVLPGYNYLGPGNGLDRGEPVNRADEVAREHDISYNEQLEAGDNPYLKYNHADAEFQEKLADDTSFGGNLGKAVFQAKKRVLEPFGLVEEGAKTAPTGKRIDDHFPKRKKARTEEDSKPSTSSDAEAGPSGSQQLQIPAQPASSLGADTMSAGGGGPLGDNNQGADGVGNASGDWHCDSTWMGDRVVTKSTRTWVLPSYNNHQYREIKSGSVDGSNANAYFGYSTPWGYFDFNRFHSHWSPRDWQRLINNYWGFRPRSLRVKIFNIQVKEVTVQDSTTTIANNLTSTVQVFTDDDYQLPYVVGNGTEGCLPAFPPQVFTLPQYGYATLNRDNTENPTERSSFFCLEYFPSKMLRTGNNFEFTYNFEEVPFHSSFAPSQNLFKLANPLVDQYLYRFVSTNNTGGVQFNKNLAGRYANTYKNWFPGPMGRTQGWNLGSGVNRASVSAFATTNRMELEGASYQVPPQPNGMTNNLQGSNTYALENTMIFNSQPANPGTTATYLEGNMLITSESETQPVNRVAYNVGGQMATNNQSSTTAPATGTYNLQEIVPGSVWMERDVYLQGPIWAKIPETGVHFHPSPAMGGFGLKHPPPMMLIKNTPVPGNITSFSDVPVSSFITQYSTGQVTVEMEWELKKENSKRWNPEIQYTNNYNDPQFVDFAPDSTGEYRTTRPIGTRYLTRPL

SEQ ID NO: 873 - protein, 724 aa, Artificial Sequence
  Description of Artificial Sequence: Synthetic polypeptide
  MOD_RES (551)..(551): Any naturally occurring amino acid
MSFVDHPPDWLEEVGEGLREFLGLEAGPPKPKPNQQHQDQARGLVLPGYNYLGPGNGLDRGEPVNRADEVAREHDISYNEQLEAGDNPYLKYNHADAEFQEKLADDTSFGGNLGKAVFQAKKRVLEPFGLVEEGAKTAPTGKRIDDHFPKRKKARTEEDSKPSTSSDAEAGPSGSQQLQIPAQPASSLGADTMSAGGGGPLGDNNQGADGVGNASGDWHCDSTWMGDRVVTKSTRTWVLPSYNNHQYREIKSGSVDGSNANAYFGYSTPWGYFDFNRFHSHWSPRDWQRLINNYWGFRPRSLRVKIFNIQVKEVTVQDSTTTIANNLTSTVQVFTDDDYQLPYVVGNGTEGCLPAFPPQVFTLPQYGYATLNRDNTENPTERSSFFCLEYFPSKMLRTGNNFEFTYNFEEVPFHSSFAPSQNLFKLANPLVDQYLYRFVSTNNTGGVQFNKNLAGRYANTYKNWFPGPMGRTQGWNLGSGVNRASVSAFATTNRMELEGASYQVPPQPNGMTNNLQGSNTYALENTMIFNSQPANPGTTATYLEGSMLITXESETQPVNRVAYNVGGQMATNNQSSTTAPATGTYNLQEIVPGSVWMERDVYLQGPIWAKIPETGAHFHPSPAMGGFGLKHPPPMMLIKNTPVPGNITSFSDVPVSSFITQYSTGQVTVEMEWELKKENSKRWNPEIQYTNNYNDPQFVDFAPDSTGEYRTTRPIGTRYLTRPL

SEQ ID NO: 874 - protein, 736 aa, Artificial Sequence; identical to SEQ ID NO: 48
  Description of Artificial Sequence: Synthetic polypeptide

SEQ ID NO: 875 - protein, 734 aa, Artificial Sequence; identical to SEQ ID NO: 66
  Description of Artificial Sequence: Synthetic polypeptide

SEQ ID NO: 876 - protein, 723 aa, Artificial Sequence
  Description of Artificial Sequence: Synthetic polypeptide
MSFVDHPPDWLEEVGEGLREFLGLEAGPPKPKPNQQHQDQARGLVLPGYNYLGPGNGLDRGEPVNRADEVAREHDISYNEQLEAGDNPYLKYNHADAEFQEKLADDTSFGGNLGKAVFQAKKRVLEPFGLVEEGAKTAPTGKRIDDHFPKRKKARTEEDSKPSTSSDAEAGPSGSQQLQIPAQPASSLGADTMSAGGGPLGDNNQGADGVGNASGDWHCDSTWMGDRVVTKSTRTWVLPSYNNHQYREIKSGSVDGSNANAYFGYSTPWGYFDFNRFHSHWSPRDWQRLINNYWGFRPRSLRVKIFNIQVKEVTVQDSTTTIANNLTSTVQVFTDDDYQLPYVVGNGTEGCLPAFPPQVFTLPQYGYATLNRDNTENPTERSSFFCLEYFPSKMLRTGNNFEFTYNFEEVPFHSSFAPSQNLFKLANPLVDQYLYRFVSTNNTGGVQFNKNLAGRYANTYKNWFPGPMGRTQGWNLGSGVNRASVSAFATTNRMELEGASYQVPPQPNGMTNNLQGSNTYALENTMIFNSQPANPGTTATYLEGNMLITSESETQPVNRVAYNVGGQMATNNQSSTTAPATGTYNLQEIVPGSVWMERDVYLQGPIWAKIPETGAHFHPSPAMGGFGLKHPPPMMLIKNTPVPGNITSFSDVPVSSFITQYSTGQVTVEMEWELKKENSKRWNPEIQYTNNYNDPQFVDFAPDSTGEYRTTRPIGTRYLTRPL

SEQ ID NO: 877 - protein, 534 aa, Artificial Sequence
  Description of Artificial Sequence: Synthetic polypeptide
MAEGGGGAMGDSSGGADGVGNASGNWHCDSQWMGNTVITKTTRTWVLPSYNNHIYKAITSGTSQDANVQYAGYSTPWGYFDFNRFHCHFSPRDWQRLINNHWGIRPKSLKFKIFNVQVKEVTTQDQTKTIANNLTSTIQVFTDDEHQLPYVLGSATEGTMPPFPSDVYALPQYGYCTMHTNQNGARFNDRSAFYCLEYFPSQMLRTGNNFEFTFDFEEVPFHSMFAHSQDLDRLMNPLVDQYLWNFNEVDSSRNAQFKKAVKGAYGTMGRNWLPGPKFLDQRVRAYTGGTDNYANWNIWSNGNKVNLKDRQYLLQPGPVSATYTEGEASSLPAQNILGIAKDPYRSGSTTAGISDIMVTEEQEVAPTNGVGWKPYGRTVTNEQNTTTAPTSSDLDVLGALPGMVWQNRDIYLQGPIGAKIPKTDGKFHPSPNLGGFGLHNPPPQVFIKNTPVPADPPVEYVHQKWNSYITQYSTGQCTVEMVWELRKENSKRWNPEIQFTSNFSNRTSIMFAPNETGGYVEDRLIGTRYLTQNL

SEQ ID NO: 878 - protein, 554 aa, Artificial Sequence
  Description of Artificial Sequence: Synthetic polypeptide
MTSVNSAEASTGAGGGGSNPVKSMWSEGATFSANSVTCTFSRQFLIPYDPEHHYKVFSPAASSCHNASGKEAKVCTISPIMGYSTPWRYLDFNALNLFFSPLEFQHLIENYGSIAPDALTVTISEIAVKDVTDKTGGGVQVTDSTTGRLCMLVDHEYKYPYVLGQGQDTLAPELPIWVYFPPQYAYLTVGDVNTQGISGDSKKLASEESAFYVLEHSSFQLLGTGGTATMSYKFPPVPPENLEGCSQHFYEMYNPLYGSRLGVPDTLGGDPKFRSLTHEDHAIQPQNFMPGPLVNSVSTKEGDSFNTGAGKALTGLSTGTSQNTRISLRPGPVSQPYHHWDTDKYVTGINAISHGQTTYGNAEDKEYQQGVGRFPNEKEQLKQLQGLNMHTYFPNKGTQQYTDQIERPLMVGSVWNRRALHYESQLWSKIPNLDDSFKTQFAALGGWGLHQPPPQIFLKILPQSGPIGGIKSMGITTLVQYAVGIMTVTMTFKLGPRKATGRWNPQPGVYPPHAAGHLPYVLYDPTATDAKQHHRHGYEKPEELWTAKSRVHPL

SEQ ID NO: 879 - protein, 587 aa, Artificial Sequence
  Description of Artificial Sequence: Synthetic polypeptide
MSDGTSQPDGGNAVHSAARVERAADGPGGSGGGGSGGGGVGVSTGSYDNQTHYRFLGDGWVEITALATRLVHLNMPKSENYCRIRVHNTTDTSVKGNMAKDDAHEQIWTPWSLVDANAWGVWLQPSDWQYICNTMSQLNLVSLDQEIFNVVLKTVTEQDSGGQAIKIYNNDLTACMMVAVDSNNILPYTPAANSMETLGFYPWKPTIASPYRYYFCVDRDLSVTYENQEGTIEHNVMGTPKGMNSQFFTIENTQQITLLRTGDEFATGTYYFDTNPVKLTHTWQTNRQLGQPPLLSTFPEADTDAGTLTAQGSRHGATQMEVNWVSEAIRTRPAQVGFCQPHNDFEASRAGPFAAPKVPADVTQGMDREANGSVRYSYGKQHGENWAAHGPAPERYTWDETNFGSGRDTRDGFIQSAPLVVPPPLNGILTNANPIGTKNDIHFSNVFNSYGPLTTFSHPSPVYPQGQIWDKELDLEHKPRLHITAPFVCKNNAPGQMLVRLGPNLTDQYDPNGATLSRIVTYGTFFWKGKLTMRAKLRANTTWNPVYQVSVEDNGNSYMSVTKWLPTATGNMQSVPLITRPVARNTY

SEQ ID NO: 880 - protein, 584 aa, Artificial Sequence
  Description of Artificial Sequence: Synthetic polypeptide
MSDGAVQPDGGQPAVRNERATGSGNGSGGGGGGGSGGVGISTGTFNNQTEFKFLENGWVEITANSSRLVHLNMPESENYKRVVVNNMDKTAVKGNMALDDIHVEIVTPWSLVDANAWGVWFNPGDWQLIVNTMSELHLVSFEQEIFNVVLKTVSESATQPPTKVYNNDLTASLMVALDSNNTMPFTPAAMRSETLGFYPWKPTIPTPWRYYFQWDRTLIPSHTGTSGTPTNVYHGTDPDDVQFYTIENSVPVHLLRTGDEFATGTFFFDCKPCRLTHTWQTNRALGLPPFLNSLPQSEGATNFGDIGVQQDKRRGVTQMGNTDYITEATIMRPAEVGYSAPYYSFEASTQGPFKTPIAAGRGGAQTDENQAADGDPRYAFGRQHGQKTTTTGETPERFTYIAHQDTGRYPEGDWIQNINFNLPVTNDNVLLPTDPIGGKTGINYTNIFNTYGPLTALNNVPPVYPNGQIWDKEFDTDLKPRLHINAPFVCQNNCPGQLFVKVAPNLTNQYDPDASANMSRIVTYSDFWWKGKLVFKAKLRASHTWNPIQQMSINVDNQFNYVPNNIGAMKIVYEKSQLAPRKLY

SEQ ID NO: 881 - protein, 548 aa, Artificial Sequence
  Description of Artificial Sequence: Synthetic polypeptide
GVGISTGTFNNQTEFKFLENGWVEITANSSRLVHLNMPESENYRRVVVNNMDKTAVNGNMALDDIHAQIVTPWSLVDANAWGVWFNPGDWQLIVNTMSELHLVSFEQEIFNVVLKTVSESATQPPTKVYNNDLTASLMVALDSNNTMPFTPAAMRSETLGFYPWKPTIPTPWRYYFQWDRTLIPSHTGTSGTPTNIYHGTDPDDVQFYTIENSVPVHLLRTGDEFATGTFFFDCKPCRLTHTWQTNRALGLPPFLNSLPQSEGATNFGDIGVQQDKRRGVTQMGNTNYITEATIMRPAEVGYSAPYYSFEASTQGPFKTPIAAGRGGAQTDENQAADGNPRYAFGRQHGQKTTTTGETPERFTYIAHQDTGRYPEGDWIQNINFNLPVTNDNVLLPTDPIGGKTGINYTNIFNTYGPLTALNNVPPVYPNGQIWDKEFDTDLKPRLHVNAPFVCQNNCPGQLFVKVAPNLTNEYDPDASANMSRIVTYSDFWWKGKLVFKAKLRASHTWNPIQQMSINVDNQFNYVPSNIGGMKIVYEKSQLAPRKLY

SEQ ID NO: 882 - protein, 736 aa, Artificial Sequence; identical to SEQ ID NO: 110
  Description of Artificial Sequence: Synthetic polypeptide

SEQ ID NO: 883 - protein, 736 aa, Artificial Sequence; identical to SEQ ID NO: 105
  Description of Artificial Sequence: Synthetic polypeptide

SEQ ID NO: 884 - protein, 736 aa, Artificial Sequence
  Description of Artificial Sequence: Synthetic polypeptide
MAADGYLPDWLEDTLSEGIRQWWKLKPGPPPPKPAERHKDDSRGLVLPGYKYLGPFNGLDKGEPVNEADAAALEHDKAYDRQLDSGDNPYLKYNHADAEFQERLKEDTSFGGNLGRAVFQAKKRVLEPLGLVEEPVKTAPGKKRPVEHSPVEEPDSSSGTGKAGQQPARKRLNFGQTGDADSVPDPQPLGQPPAAPSGLGTNTMATGSGAPMADNNEGADGVGNSSGNWHCDSTWMGDRVITTSTRTWALPTYNNHLYKQISSQSGASNDNHYFGYSTPWGYFDFNRFHCHFSPRDWQRLINNNWGFRPKRLNFKLFNIQVKEVTQNDGTTTIANNLTSTVQVFTDSEYQLPYVLGSAHQGCLPPFPADVFMVPQYGYLTLNNGSQAVGRSSFYCLEYFPSQMLRTGNNFTFSYTFEDVPFHSSYAHSQSLDRLMNPLIDQYLYYLSRTNTPSGTTTQSRLQFSQAGASDIRDQSRNWLPGPCYRQQRVSKTSADNNNSEYSWTGATKYHLNGRDSLVNPGPAMASHKDDEEKFFPQSGVLIFGKQGSEKTNVDIEKVMITDEEEIRTTNPVATEQYGSVSTNLQRGNRQAATADVNTQGVLPGMVWQDRDVYLQGPIWAKIPHTDGHFHPSPLMGGFGLKHPPPQILIKNTPVPANPSTTFSAAKFASFITQYSTGQVSVEIEWELQKENSKRWNPEIQYTSNYNKSVNVDFTVDTNGVYSEPRPIGTRYLTRNL

SEQ ID NO: 885 - protein, 736 aa, Artificial Sequence
  Description of Artificial Sequence: Synthetic polypeptide
MAADGYLPDWLEDNLSEGIREWWDLKPGAPKPKANQQKQDDGRGLVLPGYKYLGPFNGLDKGEPVNAADAAALEHDKAYDQQLKAGDNPYLRYNHADAEFQERLQEDTSFGGNLGRAVFQAKKRVLEPFGLVEEGAKTAPGKKRPVEQSPQEPDSSSGIGKTGQQPAKKRLNFGQTGDSESVPDPQPLGEPPATPAAVGPTTMASGGGAPMADNNEGADGVGNASGNWHCDSTWLGDRVITTSTRTWALPTYNNHLYKQISSASTGASNDNHYFGYSTPWGYFDFNRFHCHFSPRDWQRLINNNWGFRPKRLNFKLFNVQVKEVTTNDGVTTIANNLTSTVQVFSDSEYQLPYVLGSAHQGCLPPFPADVFMIPQYGYLTLNNGSQAVGRSSFYCLEYFPSQMLRTGNNFTFSYTFEDVPFHSSYAHSQSLDRLMNPLIDQYLYYLNRTQDQSGSAQNKDLLFSRGSPAGMSVQPKNWLPGPCYRQQRVSKTKTDNNNSNFTWTGASKYNLNGRESIINPGTAMASHKDDKNKFFPMSGVMIFGKESAGASNTALDNVMITDEEEIKATNPVATERFGTVAVNLQSSSTDPATGDVHVMGALPGMVWQDRDVYLQGPIWAKIPHTDGHFHPSPLMGGFGLKNPPPQILIKNTPVPANPPAEFSATKFASFITQYSTGQVSVEIEWELQKENSKRWNPEVQYTSNYAKSANVDFTVDNNGLYTEPRPIGTRYLTRPL

SEQ ID NO: 886 - protein, 737 aa, Artificial Sequence
  Description of Artificial Sequence: Synthetic polypeptide
MAADGYLPDWLEDTLSEGIRQWWKLKPGPPPPKPAERHKDDSRGLVLPGYKYLGPGNGLDKGEPVNAADAAALEHDKAYDQQLKAGDNPYLKYNHADAEFQERLKEDTSFGGNLGRAVFQAKKRVLEPLGLVEEGAKTAPGKKRPVEPSPQRSPDSSTGIGKKGQQPARKRLNFGQTGDSESVPDPQPLGEPPATPAAVGPTTMASGGGAPMADNNEGADGVGNASGNWHCDSTWLGDRVITTSTRTWALPTYNNHLYKQISSASTGASNDNHYFGYSTPWGYFDFNRFHCHFSPRDWQRLINNNWGFRPKRLNFKLFNIQVKEVTTNDGVTTIANNLTSTVQVFSDSEYQLPYVLGSAHQGCLPPFPADVFMIPQYGYLTLNNGSQAVGRSSFYCLEYFPSQMLRTGNNFTFSYTFEDVPFHSSYAHSQSLDRLMNPLIDQYLYYLNRTQNQSGSAQNKDLLFSRGSPAGMSVQPKNWLPGPCYRQQRVSKTKTDNNNSNFTWTGASKYNLNGRESIINPGTAMASHKDDKDKFFPMSGVMIFGKESAGASNTALDNVMITDEEEIKATNPVATERFGTVAVNLQSSSTDPATEDVHVMGALPGMVWQDRDVYLQGPIWAKIPHTDGHFHPSPLMGGFGLKNPPPQILIKNTPVPANPPAEFSATKFASFITQYSTGQVSVEIEWELQKENSKRWNPEVQYTSNYAKSANVDFTVDNNGLYTEPRPIGTRYLTRNL

SEQ ID NO: 887 - protein, 736 aa, Artificial Sequence
  Description of Artificial Sequence: Synthetic polypeptide
MAADGYLPDWLEDNLSEGIREWWDLKPGAPKPKANQQKQDDGRGLVLPGYKYLGPFNGLDKGEPVNAADAAALEHDKAYDQQLKAGDNPYLRYNHADAEFQERLQEDTSFGGNLGRAVFQAKKRVLEPFGLVEEGAKTAPGKKRPVEQSPQEPDSSSGIGKTGQQPAKKRLNFGQTGDSESVPDPQPLGEPPATPAAVGPTTMASGGGAPMADNNEGADGVGNASGNWHCDSTWLGDRVITTSTRTWALPTYNNHLYKQISSASTGASNDNHYFGYSTPWGYFDFNRFHCHFSPRDWQRLINNNWGFRPKRLNFKLFNVQVKEVTTNDGVTTIANNLTSTVQVFSDSEYQLPYVLGSAHQGCLPPFPADVFMIPQYGYLTLNNGSQAVGRSSFYCLEYFPSQMLRTGNNFTFSYTFEDVPFHSSYAHSQSLDRLMNPLIDQYLYYLNRTQDQSGSAQNKDLLFSRGSPAGMSVQPKNWLPGPCYRQQRVSKTKTDNNNSNFTWTGASKYNLNGRESIINPGTAMASHKDDKNKFFPMSGVMIFGKESAGASNTALDNVMITDEEEIKATNPVATERFGTVAVNLQSSSTDPATGDVHVMGALPGMVWQDRDVYLQGPIWAKIPHTDGHFHPSPLMGGFGLKHPPPQILIKNTPVPANPPAEFSATKFASFITQYSTGQVSVEIEWELQKENSKRWNPEVQYTSNYAKSANVDFTVDNNGLYTEPRPIGTRYLTRPL

SEQ ID NO: 888 - protein, 736 aa, Artificial Sequence
  Description of Artificial Sequence: Synthetic polypeptide
MAADGYLPDWLEDNLSEGIREWWDLKPGAPKPKANQQKQDDGRGLVLPGYKYLGPFNGLDKGEPVNAADAAALEHDKAYDQQLKAGDNPYLRYNHADAEFQERLQEDTSFGGNLGRAVFQAKKRVLEPFGLVEEGAKTAPGKKRPVEQSPQEPDSSSGIGKTGQQPAKKRLNFGQTGDSESVPDPQPLGEPPATPAAVGPTTMASGGGAPMADNNEGADGVGNASGNWHCDSTWLGDRVITTSTRTWALPTYNNHLYKQISSASTGASNDNHYFGYSTPWGYFDFNRFHCHFSPRDWQRLINNNWGFRPKRLNFKLFNVQVKEVTTNDGVTTIANNLTSTVQVFSDSEYQLPYVLGSAHQGCLPPFPADVFMIPQYGYLTLNNGSQAVGRSSFYCLEYFPSQMLRTGNNFTFSYTFEDVPFHSSYAHSQSLDRLMNPLIDQYLYYLNRTQDQSGSAQNKDLLFSRGSPAGMSVQPKNWLPGPCYRQQRVSKTKTDNNNSNFTWTGASKYNLNGRESIINPGTAMASHKDDKDKFFPMSGVMIFGKESAGASNTALDNVMITDEEEIKATNPVATERFGTVAVNLQSSSTDPATGDVHVMGALPGMVWQDRDVYLQGPIWAKIPHTDGHFHPSPLMGGFGLKHPPPQILIKNTPVPANPPAEFSATKFASFITQYSTGQVSVEIEWELQKENSKRWNPEVQYTSNYAKSANVDFTVDNNGLYTEPRPIGTRYLTRPL

SEQ ID NO: 889 - protein, 736 aa, Artificial Sequence
  Description of Artificial Sequence: Synthetic polypeptide
MAADGYLPDWLEDNLSEGIREWWDLKPGAPKPKANQQKQDDGRGLVLPGYKYLGPFNGLDKGEPVNAADAAALEHDKAYDQQLKAGDNPYLRYNHADAEFQERLQEDTSFGGNLGRAVFQAKKRVLEPFGLVEEGAKTAPGKKRPVEQSPQEPDSSSGIGKTGQQPAKKRLNFGQTGDSESVPDPQPLGEPPATPAAVGPTTMASGGGAPMADNNEGADGVGNASGNWHCDSTWLGDRVITTSTRTWALPTYNNHLYKQISSASTGASNDNHYFGYSTPWGYFDFNRFHCHFSPRDWQRLINNNWGFRPKRLNFKLFNIQVKEVTTNDGVTTIANNLTSTVQVFSDSEYQLPYVLGSAHQGCLPPFPADVFMIPQYGYLTLNNGSQAVGRSSFYCLEYFPSQMLRTGNNFTFSYTFEDVPFHSSYAHSQSLDRLMNPLIDQYLYYLNRTQDQSGSAQNKDLLFSRGSPAGMSVQPKNWLPGPCYRQQRVSKTKTDNNNSNFTWTGASKYNLNGRESIINPGTAMASHKDDKNKFFPMSGVMIFGKESAGASNTALDNVMITDEEEIKATNPVATERFGTVAVNLQSSSTDPATGDVHVMGALPGMVWQDRDVYLQGPIWAKIPHTDGHFHPSPLMGGFGLKHPPPQILIKNTPVPANPPAEFSATKFASFITQYSTGQVSVEIEWELQKENSKRWNPEVQYTSNYAKSANVDFTVDNNGLYTEPRPIGTRYLTRPL

SEQ ID NO: 890 - protein, 736 aa, Artificial Sequence
  Description of Artificial Sequence: Synthetic polypeptide
MAADGYLPDWLEDNLSEGIREWWDLKPGAPKPKANQQKQDDGRGLVLPGYKYLGPFNGLDKGEPVNAADAAALEHDKAYDQQLKAGDNPYLRYNHADAEFQERLQEDTSFGGNLGRAVFQAKKRVLEPFGLVEEGAKTAPGKKRPVEQSPQEPDSSSGIGKTGQQPAKKRLNFGQTGDSESVPDPQPLGEPPATPAAVGPTTMASGGGAPMADNNEGADGVGNASGNWHCDSTWLGDRVITTSTRTWALPTYNNHLYKQISSASTGASNDNHYFGYSTPWGYFDFNRFHCHFSPRDWQRLINNNWGFRPKRLNFKLFNVQVKEVTTNDGVTTIANNLTSTVQVFSDSEYQLPYVLGSAHQGCLPPFPADVFMIPQYGYLTLNNGSQAVGRSSFYCLEYFPSQMLRTGNNFTFSYTFEDVPFHSSYAHSQSLDRLMNPLIDQYLYYLNRTQNQSGSAQNKDLLFSRGSPAGMSVQPKNWLPGPCYRQQRVSKTKTDNNNSNFTWTGASKYNLNGRESIINPGTAMASHKDDKDKFFPMSGVMIFGKESAGASNTALDNVMITDEEEIKATNPVATERFGTVAVNLQSSSTDPATGDVHVMGALPGMVWQDRDVYLQGPIWAKIPHTDGHFHPSPLMGGFGLKHPPPQILIKNTPVPANPPAEFSATKFASFITQYSTGQVSVEIEWELQKENSKRWNPEVQYTSNYAKSANVDFTVDNNGLYTEPRPIGTRYLTRPL

SEQ ID NO: 891 - protein, 736 aa, Artificial Sequence
  Description of Artificial Sequence: Synthetic polypeptide
MAADGYLPDWLEDNLSEGIREWWDLKPGAPKPKANQQKQDDGRGLVLPGYKYLGPFNGLDKGEPVNAADAAALEHDKAYDQQLKAGDNPYLRYNHADAEFQERLQEDTSFGGNLGRAVFQAKKRVLEPFGLVEEGAKTAPGKKRPVEQSPQEPDSSSGIGKTGQQPAKKRLNFGQTGDSESVPDPQPLGEPPATPAAVGPTTMASGGGAPMADNNEGADGVGNASGNWHCDSTWLGDRVITTSTRTWALPTYNNHLYKQISSASTGASNDNHYFGYSTPWGYFDFNRFHCHFSPRDWQRLINNNWGFRPKRLNFKLFNVQVKEVTTNDGVTTIANNLTSTVQVFSDSEYQLPYVLGSAHQGCLPPFPADVFMIPQYGYLTLNNGSQAVGRSSFYCLEYFPSQMLRTGNNFTFSYTFEDVPFHSSYAHSQSLDRLMNPLIDQYLYYLNRTQNQSGSAQNKDLLFSRGSPAGMSVQPKNWLPGPCYRQQRVSKTKTDNNNSNFTWTGASKYNLNGRESIINPGTAMASHKDDKNKFFPMSGVMIFGKESAGASNTALDNVMITDEEEIKATNPVATERFGTVAVNLQSSSTDPATGDVHVMGALPGMVWQDRDVYLQGPIWAKIPHTDGHFHPSPLMGGFGLKHPPPQILIKNTPVPANPPAEFSATKFASFITQYSTGQVSVEIEWELQKENSKRWNPEVQYTSNYAKSANVDFTVDNNGLYTEPRPIGTRYLTRPL

SEQ ID NO: 892 - DNA, 2217 bp, Artificial Sequence
  Description of Artificial Sequence: Synthetic polynucleotide
atggctgccgatggttatcttccagattggctcgaggacaacctctctgagggcattcgcgagtggtgggacctgaaacctggagccccgaaacccaaagccaaccagcaaaagcaggacaacggccggggtctggtgcttcctggctacaagtacctcggacccttcaacggactcgacaagggggagcccgtcaacgcggcggacgcagcggccctcgagcacgacaaggcctacgaccagcagctccaagcgggtgacaatccgtacctgcggtataatcacgccgacgccgagtttcaggagcgtctgcaagaagatacgtcttttgggggcaacctcgggcgcgcagtcttccaggccaaaaagcgggttctcgaacctctgggcctggttgaatcgccggttaagacggctcctggaaagaagagaccggtagagccatcaccccagcgctctccagactcctctacgggcatcggcaagaaaggccagcagcccgcaaaaaagagactcaattttgggcagactggcgactcagagtcagtccccgaccctcaaccaatcggagaaccaccagcaggcccctctggtctgggatctggtacaatggctgcaggcggtggcgctccaatggcagacaataacgaaggcgccgacggagtgggtagttcctcaggaaattggcattgcgattccacatggctgggcgacagagtcatcaccaccagcacccgcacctgggccctgcccacctacaacaaccacctctacaagcaaatctccaacgggacctcgggaggaagcaccaacgacaacacctacttcggctacagcaccccctgggggtattttgacttcaacagattccactgccacttttcaccacgtgactggcagcgactcatcaacaacaactggggattccggcccaagaggctcaacttcaagctcttcaacatccaagtcaaggaggtcacgcagaatgaaggcaccaagaccatcgccaataaccttaccagcacgattcaggtctttacggactcggaataccagctcccgtacgtgctcggctcggcgcaccagggctgcctgcctccgttcccggcggacgtcttcatgattcctcagtacgggtacctgactctgaacaatggcagtcaggctgtgggccggtcgtccttctactgcctggagtactttccttctcaaatgctgagaacgggcaacaactttgaattcagctacaacttcgaggacgtgcccttccacagcagctacgcgcacagccagagcctggaccggctgatgaaccctctcatcgaccagtacttgtactacctgtcccggactcaaagcacgggcggtactgcaggaactcagcagttgctattttctcaggccgggcctaacaacatgtcggctcaggccaagaactggctacccggtccctgctaccggcagcaacgcgtctccacgacactgtcgcagaacaacaacagcaactttgcctggacgggtgccaccaagtatcatctgaatggcagagactctctggtgaatcctggcgttgccatggctacccacaaggacgacgaagagcgattttttccatccagcggagtcttaatgtttgggaaacagggagctggaaaagacaacgtggactatagcagcgtgatgctaaccagcgaggaagaaataaagaccaccaacccagtggccacagaacagtacggcgtggtggccgataacctgcaacagcaaaacgccgctcctattgtaggggccgtcaatagtcaaggagccttacctggcatggtgtggcagaaccgggacgtgtacctgcagggtcccatctgggccaagattcctcatacggacggcaactttcatccctcgccgctgatgggaggctttggactgaagcatccgcctcctcagatcctgattaaaaacacacctgttcccgcggatcctccgaccaccttcaatcaggccaagctggcttctttcatcacgcagtacagtaccggccaggtcagcgtggagatcgagtgggagctgcagaaggagaacagcaaacgctggaacccagagattcagtacacttccaactactacaaatctacaaatgtggactttgctgtcaatactgagggtacttattccgagcctcgccccattggcacccgttacctcacccgtaatctgtaa

SEQ ID NO: 893 - protein, 738 aa, Artificial Sequence
  Description of Artificial Sequence: Synthetic polypeptide
MAADGYLPDWLEDNLSEGIREWWDLKPGAPKPKANQQKQDNGRGLVLPGYKYLGPFNGLDKGEPVNAADAAALEHDKAYDQQLQAGDNPYLRYNHADAEFQERLQEDTSFGGNLGRAVFQAKKRVLEPLGLVESPVKTAPGKKRPVEPSPQRSPDSSTGIGKKGQQPAKKRLNFGQTGDSESVPDPQPIGEPPAGPSGLGSGTMAAGGGAPMADNNEGADGVGSSSGNWHCDSTWLGDRVITTSTRTWALPTYNNHLYKQISNGTSGGSTNDNTYFGYSTPWGYFDFNRFHCHFSPRDWQRLINNNWGFRPKRLNFKLFNIQVKEVTQNEGTKTIANNLTSTIQVFTDSEYQLPYVLGSAHQGCLPPFPADVFMIPQYGYLTLNNGSQAVGRSSFYCLEYFPSQMLRTGNNFEFSYNFEDVPFHSSYAHSQSLDRLMNPLIDQYLYYLSRTQSTGGTAGTQQLLFSQAGPNNMSAQAKNWLPGPCYRQQRVSTTLSQNNNSNFAWTGATKYHLNGRDSLVNPGVAMATHKDDEERFFPSSGVLMFGKQGAGKDNVDYSSVMLTSEEEIKTTNPVATEQYGVVADNLQQQNAAPIVGAVNSQGALPGMVWQNRDVYLQGPIWAKIPHTDGNFHPSPLMGGFGLKHPPPQILIKNTPVPADPPTTFNQAKLASFITQYSTGQVSVEIEWELQKENSKRWNPEIQYTSNYYKSTNVDFAVNTEGTYSEPRPIGTRYLTRNL

SEQ ID NO: 894 - protein, 738 aa, Artificial Sequence; identical to SEQ ID NO: 893
  Description of Artificial Sequence: Synthetic polypeptide

SEQ ID NO: 895 - DNA, 4472 bp, Artificial Sequence
  Description of Artificial Sequence: Synthetic polynucleotide
ctccatcactaggggtaaccgcgaagcgcctcccacgctgccgcgtcagcgctgacgtaaattacgtcataggggagtggtcctgtattagctgtcacgtgagtgcttttgcgacattttgcgacaccacgtggccattcatggtatatatggccgagtgagcgagcaggatctccattttgaccgcgaaatttgaacgagcagcagccatgccgggcttctacgagatcgtgcttaaggtgccgagcgacctggacgagcacctgccgggcatttctgactcgtttgtgaactgggtggcagagaaggaatgggagctgcccccggattctgacatggatcggaatctgattgagcaggcacccctgaccgtggccgagaagctacagcgcgacttcctggtccaatggcgccgcgtgagtaaggccccggaggccctcttctttgttcagttcgagaagggcgagtcctacttccacctccatattctggtagagaccacgggggtcaaatccatggtgctgggccgcttcctgagtcagattcgggacaagctggtgcagaccatctaccgcgggatcgagccgaccctgcccaactggttcgcggtgacaaagacgcgtaatggcgccggaggggggaacaaggtggtggacgagtgctacatccccaactacctgctgcccaagactcagcccgagctgcagtgggcgtggactaacatggaggagtatataagcgcgtgcttgaacctggccgagcgcaaacggctcgtggcgcagcacctgacccacgtcagccagacccaggagcagaacaaggagaatctgaacccgaattctgacgcgcctgtcatccggtcaaaaacctccgcgcgctacatggagctggtcgggtggctggtggaccggggcatcacctccgagaagcagtggatccaggaggaccaggcctcgtacatctccttcaacgccgcctccaactcgcggtctcagatcaaggccgcgctggacaatgccggcaagatcatggcgctgaccaaatccgcgcccgactacctggtaggccccgctctgcccgcggacattaaatccaaccgcatctaccgcatcctggagctgaatggctacgaccctgcctacgccggttccgtctttctcggctgggcccagaaaaagtttggcaaaaggaacaccatctggctgtttgggccggccaccacgggcaagaccaacatcgcggaagccatcgcccacgccgtgcccttctacggctgcgtcaactggaccaatgagaactttcccttcaacgattgcgtcgacaagatggtgatctggtgggaggagggcaagatgacggccaaggtcgtggagtccgccaaggccattctcggcggcagcaaggtgcgcgtggaccaaaagtgcaagtcgtccgcccagatcgatcccacccccgtgatcgtcacctccaacaccaacatgtgcgccgtgattgacgggaacagcaccaccttcgagcaccagcagccgttgcaggaccggatgttcaaatttgaacttacccgccgtctggagcacgactttggcaaggtgacaaagcaggaagtcaaagagttcttccgctgggcgcaggatcacgtgaccgaggtggcgcatgagttctacgtcagaaagggtggagctaacaaaagacccgcccccgatgacgcggatataagcgagcccaagcgggcctgcccctcagtcgcggatccatcgacgtcagacgcggaaggagctccggtggactttgccgacaggtaccaaaacaaatgttctcgtcacgcgggcatgcttcagatgctgtttccctgcaaaacatgcgagagaatgaatcagaatttcaacatttgcttcacgcacgggaccagagactgttcagaatgtttccctggcgtgtcagaatctcaaccggtcgtcagaaaaaagacgtatcggaaactctgtgcgattcatcatctgctggggcgggcacccgagattgcttgctcggcctgcgacctggtcaacgtggacctggatgactgtgtttctgagcaataaatgacttaaaccaggtatggctgccgatggttatcttccagattggctcgaggacaacctctctgagggcattcgcgagtggtgggacctgaaacctggagccccgaaacccaaagccaaccagcaaaagcaggacaacggccggggtctggtgcttcctggctacaagtacctcggacccttcaacggactcgacaagggggagcccgtcaacgcggcggacgcagcggccctcgagcacgacaaggcctacgaccagcagctccaagcgggtgacaatccgtacctgcggtataatcacgccgacgccgagtttcaggagcgtctgcaagaagatacgtcttttgggggcaacctcgggcgcgcagtcttccaggccaaaaagcgggttctcgaacctctgggcctggttgaatcgccggttaagacggctcctggaaagaagagaccggtagagccatcaccccagcgctctccagactcctctacgggcatcggcaagaaaggccagcagcccgcaaaaaagagactcaattttgggcagactggcgactcagagtcagtccccgaccctcaaccaatcggagaaccaccagcaggcccctctggtctgggatctggtacaatggctgcaggcggtggcgctccaatggcagacaataacgaaggcgccgacggagtgggtagttcctcaggaaattggcattgcgattccacatggctgggcgacagagtcatcaccaccagcacccgcacctgggccctgcccacctacaacaaccacctctacaagcaaatctccaacgggacctcgggaggaagcaccaacgacaacacctacttcggctacagcaccccctgggggtattttgacttcaacagattccactgccacttttcaccacgtgactggcagcgactcatcaacaacaactggggattccggcccaagaggctcaacttcaagctcttcaacatccaagtcaaggaggtcacgcagaatgaaggcaccaagaccatcgccaataaccttaccagcacgattcaggtctttacggactcggaataccagctcccgtacgtgctcggctcggcgcaccagggctgcctgcctccgttcccggcggacgtcttcatgattcctcagtacgggtacctgactctgaacaatggcagtcaggctgtgggccggtcgtccttctactgcctggagtactttccttctcaaatgctgagaacgggcaacaactttgaattcagctacaacttcgaggacgtgcccttccacagcagctacgcgcacagccagagcctggaccggctgatgaaccctctcatcgaccagtacttgtactacctgtcccggactcaaagcacgggcggtactgcaggaactcagcagttgctattttctcaggccgggcctaacaacatgtcggctcaggccaagaactggctacccggtccctgctaccggcagcaacgcgtctccacgacactgtcgcagaacaacaacagcaactttgcctggacgggtgccaccaagtatcatctgaatggcagagactctctggtgaatcctggcgttgccatggctacccacaaggacgacgaagagcgattttttccatccagcggagtcttaatgtttgggaaacagggagctggaaaagacaacgtggactatagcagcgtgatgctaaccagcgaggaagaaataaagaccaccaacccagtggccacagaacagtacggcgtggtggccgataacctgcaacagcaaaacgccgctcctattgtaggggccgtcaatagtcaaggagccttacctggcatggtgtggcagaaccgggacgtgtacctgcagggtcccatctgggccaagattcctcatacggacggcaactttcatccctcgccgctgatgggaggctttggactgaagcatccgcctcctcagatcctgattaaaaacacacctgttcccgcggatcctccgaccaccttcaatcaggccaagctggcttctttcatcacgcagtacagtaccggccaggtcagcgtggagatcgagtgggagctgcagaaggagaacagcaaacgctggaacccagagattcagtacacttccaactactacaaatctacaaatgtggactttgctgtcaatactgagggtacttattccgagcctcgccccattggcacccgttacctcacccgtaatctgtaattacatgttaatcaataaaccggttaattcgtttcagttgaactttggtctcctgtccttcttatcttatcggttaccatagaaactggttacttattaactgcttggtgcgcttcgcgataaaagacttacgtcatcgggttacccctagtgatgga

SEQ ID NO: 896 - protein, 738 aa, Artificial Sequence
  Description of Artificial Sequence: Synthetic polypeptide
MAADGYLPDWLEDNLSEGIREWWDLKPGAPKPKANQQKQDNGRGLVLPGYKYLGPFNGLDKGEPVNAADAAALEHDKAYDQQLQAGDNPYLRYNHADAEFQERLQEDTSFGGNLGRAVFQAKKRVLEPLGLVESPVKTAPGKKRPVEPSPQRSPDSSTGIGKKGQQPAKKRLNFGQTGDSESVPDPQPIGEPPAAPSGVGPNTMAAGGGAPMADNNEGADGVGSSSGNWHCDSTWLGDRVITTSTRTWALPTYNNHLYKQISNGTSGGSTNDNTYFGYSTPWGYFDFNRFHCHFSPRDWQRLINNNWGFRPKRLNFKLFNIQVKEVTQNEGTKTIANNLTSTIQVFTDSEYQLPYVLGSAHQGCLPPFPADVFMIPQYGYLTLNNGSQAVGRSSFYCLEYFPSQMLRTGNNFEFSYNFEDVPFHSSYAHSQSLDRLMNPLIDQYLYYLSRTQSTGGTAGTQQLLFSQAGPNNMSAQAKNWLPGPCYRQQRVSTTLSQNNNSNFAWTGATKYHLNGRDSLVNPGVAMATHKDDEERFFPSSGVLMFGKQGAGKDNVDYSSVMLTSEEEIKTTNPVATEQYGVVADNLQQQNAAPIVGAVNSQGALPGMVWQNRDVYLQGPIWAKIPHTDGNFHPSPLMGGFGLKHPPPQILIKNTPVPADPPTTFNQAKLASFITQYSTGQVSVEIEWELQKENSKRWNPEIQYTSNYYKSTNVDFAVNTEGTYSEPRPIGTRYLTRNL

SEQ ID NO: 897 - protein, 738 aa, Artificial Sequence
  Description of Artificial Sequence: Synthetic polypeptide
MAADGYLPDWLEDNLSEGIREWWDLKPGAPKPKANQQRQDNGRGLVLPGYRYLGPFNGLDKGEPVNAADAAALEHDRAYDQQLQAGDNPYLRYNHADAEFQERLQEDTSFGGNLGRAVFQAKKRVLEPLGLVESPVRTAPGKKRPVEPSPQRSPDSSTGIGKKGQQPARKRLNFGQTGDSESVPDPQPIGEPPAAPSGVGPNTMAAGGGAPMADNNEGADGVGSSSGNWHCDSTWLGDRVITTSTRTWALPTYNNHLYRQISNGTSGGSTNDNTYFGYSTPWGYFDFNRFHCHFSPRDWQRLINNNWGFRPKRLNFKLFNIQVKEVTQNEGTRTIANNLTSTIQVFTDSEYQLPYVLGSAHQGCLPPFPADVFMIPQYGYLTLNNGSQAVGRSSFYCLEYFPSQMLRTGNNFEFSYNFEDVPFHSSYAHSQSLDRLMNPLIDQYLYYLSRTQSTGGTAGTQQLLFSQAGPNNMSAQAKNWLPGPCYRQQRVSTTLSQNNNSNFAWTGATKYHLNGRDSLVNPGVAMATHRDDEERFFPSSGVLMFGRQGAGRDNVDYSSVMLTSEEEIRTTNPVATEQYGVVADNLQQQNAAPIVGAVNSQGALPGMVWQNRDVYLQGPIWAKIPHTDGNFHPSPLMGGFGLKHPPPQILIKNTPVPADPPTTFNQAKLASFITQYSTGQVSVEIEWELQKENSKRWNPEIQYTSNYYKSTNVDFAVNTEGTYSEPRPIGTRYLTRNL

SEQ ID NO: 898 - protein, 738 aa, Artificial Sequence
  Description of Artificial Sequence: Synthetic polypeptide
MAADGYLPDWLEDNLSEGIREWWDLKPGAPKPKANQQRQDNGRGLVLPGYRYLGPFNGLDKGEPVNAADAAALEHDRAYDQQLQAGDNPYLRYNHADAEFQERLQEDTSFGGNLGRAVFQAKKRVLEPLGLVESPVRTAPGKKRPVEPSPQRSPDSSTGIGKRGQQPARKRLNFGQTGDSESVPDPQPIGEPPAAPSGVGPNTMAAGGGAPMADNNEGADGVGSSSGNWHCDSTWLGDRVITTSTRTWALPTYNNHLYRQISNGTSGGSTNDNTYFGYSTPWGYFDFNRFHCHFSPRDWQRLINNNWGFRPKRLNFKLFNIQVKEVTQNEGTRTIANNLTSTIQVFTDSEYQLPYVLGSAHQGCLPPFPADVFMIPQYGYLTLNNGSQAVGRSSFYCLEYFPSQMLRTGNNFEFSYNFEDVPFHSSYAHSQSLDRLMNPLIDQYLYYLSRTQSTGGTAGTQQLLFSQAGPNNMSAQAKNWLPGPCYRQQRVSTTLSQNNNSNFAWTGATKYHLNGRDSLVNPGVAMATHRDDEERFFPSSGVLMFGKQGAGRDNVDYSSVMLTSEEEIRTTNPVATEQYGVVADNLQQQNAAPIVGAVNSQGALPGMVWQNRDVYLQGPIWAKIPHTDGNFHPSPLMGGFGLKHPPPQILIKNTPVPADPPTTFNQAKLASFITQYSTGQVSVEIEWELQKENSKRWNPEIQYTSNYYKSTNVDFAVNTEGTYSEPRPIGTRYLTRNL

SEQ ID NO: 899 - protein, 738 aa, Artificial Sequence
  Description of Artificial Sequence: Synthetic polypeptide
MAADGYLPDWLEDNLSEGIREWWDLKPGAPKPKANQQRQDNGRGLVLPGYRYLGPFNGLDKGEPVNAADAAALEHDRAYDQQLQAGDNPYLRYNHADAEFQERLQEDTSFGGNLGRAVFQAKKRVLEPLGLVESPVRTAPGKKRPVEPSPQRSPDSSTGIGKRGQQPAKKRLNFGQTGDSESVPDPQPIGEPPAAPSGVGPNTMAAGGGAPMADNNEGADGVGSSSGNWHCDSTWLGDRVITTSTRTWALPTYNNHLYRQISNGTSGGSTNDNTYFGYSTPWGYFDFNRFHCHFSPRDWQRLINNNWGFRPKRLNFKLFNIQVKEVTQNEGTRTIANNLTSTIQVFTDSEYQLPYVLGSAHQGCLPPFPADVFMIPQYGYLTLNNGSQAVGRSSFYCLEYFPSQMLRTGNNFEFSYNFEDVPFHSSYAHSQSLDRLMNPLIDQYLYYLSRTQSTGGTAGTQQLLFSQAGPNNMSAQAKNWLPGPCYRQQRVSTTLSQNNNSNFAWTGATKYHLNGRDSLVNPGVAMATHRDDEERFFPSSGVLMFGRQGAGRDNVDYSSVMLTSEEEIRTTNPVATEQYGVVADNLQQQNAAPIVGAVNSQGALPGMVWQNRDVYLQGPIWAKIPHTDGNFHPSPLMGGFGLKHPPPQILIKNTPVPADPPTTFNQAKLASFITQYSTGQVSVEIEWELQKENSKRWNPEIQYTSNYYKSTNVDFAVNTEGTYSEPRPIGTRYLTRNL

SEQ ID NO: 900 - protein, 738 aa, Artificial Sequence
  Description of Artificial Sequence: Synthetic polypeptide
MAADGYLPDWLEDNLSEGIREWWDLKPGAPKPKANQQRQDNGRGLVLPGYRYLGPFNGLDKGEPVNAADAAALEHDRAYDQQLQAGDNPYLRYNHADAEFQERLQEDTSFGGNLGRAVFQAKKRVLEPLGLVESPVRTAPGKKRPVEPSPQRSPDSSTGIGKRGQQPAKKRLNFGQTGDSESVPDPQPIGEPPAAPSGVGPNTMAAGGGAPMADNNEGADGVGSSSGNWHCDSTWLGDRVITTSTRTWALPTYNNHLYRQISNGTSGGSTNDNTYFGYSTPWGYFDFNRFHCHFSPRDWQRLINNNWGFRPKRLNFKLFNIQVKEVTQNEGTRTIANNLTSTIQVFTDSEYQLPYVLGSAHQGCLPPFPADVFMIPQYGYLTLNNGSQAVGRSSFYCLEYFPSQMLRTGNNFEFSYNFEDVPFHSSYAHSQSLDRLMNPLIDQYLYYLSRTQSTGGTAGTQQLLFSQAGPNNMSAQAKNWLPGPCYRQQRVSTTLSQNNNSNFAWTGATKYHLNGRDSLVNPGVAMATHRDDEERFFPSSGVLMFGKQGAGRDNVDYSSVMLTSEEEIRTTNPVATEQYGVVADNLQQQNAAPIVGAVNSQGALPGMVWQNRDVYLQGPIWAKIPHTDGNFHPSPLMGGFGLKHPPPQILIKNTPVPADPPTTFNQARLASFITQYSTGQVSVEIEWELQKENSKRWNPEIQYTSNYYKSTNVDFAVNTEGTYSEPRPIGTRYLTRNL

SEQ ID NO: 901 - protein, 738 aa, Artificial Sequence
  Description of Artificial Sequence: Synthetic polypeptide
MAADGYLPDWLEDNLSEGIREWWDLKPGAPKPKANQQRQDNGRGLVLPGYRYLGPFNGLDKGEPVNAADAAALEHDRAYDQQLQAGDNPYLRYNHADAEFQERLQEDTSFGGNLGRAVFQAKKRVLEPLGLVESPVRTAPGKKRPVEPSPQRSPDSSTGIGKKGQQPAKKRLNFGQTGDSESVPDPQPIGEPPAAPSGVGPNTMAAGGGAPMADNNEGADGVGSSSGNWHCDSTWLGDRVITTSTRTWALPTYNNHLYRQISNGTSGGSTNDNTYFGYSTPWGYFDFNRFHCHFSPRDWQRLINNNWGFRPKRLNFKLFNIQVKEVTQNEGTRTIANNLTSTIQVFTDSEYQLPYVLGSAHQGCLPPFPADVFMIPQYGYLTLNNGSQAVGRSSFYCLEYFPSQMLRTGNNFEFSYNFEDVPFHSSYAHSQSLDRLMNPLIDQYLYYLSRTQSTGGTAGTQQLLFSQAGPNNMSAQAKNWLPGPCYRQQRVSTTLSQNNNSNFAWTGATKYHLNGRDSLVNPGVAMATHRDDEERFFPSSGVLMFGRQGAGRDNVDYSSVMLTSEEEIRTTNPVATEQYGVVADNLQQQNAAPIVGAVNSQGALPGMVWQNRDVYLQGPIWAKIPHTDGNFHPSPLMGGFGLKHPPPQILIKNTPVPADPPTTFNQARLASFITQYSTGQVSVEIEWELQKENSKRWNPEIQYTSNYYKSTNVDFAVNTEGTYSEPRPIGTRYLTRNL

SEQ ID NO: 902 - DNA, 2214 bp, Artificial Sequence
  Description of Artificial Sequence: Synthetic polynucleotide
atggctgccgatggttatcttccagattggctcgaggacaacctctctgagggcattcgcgagtggtgggacctgaaacctggagccccgaaacccaaagccaaccagcaaaagcaggacaacggccggggtctggtgcttcctggctacaagtacctcggacccttcaacggactcgacaagggggagcccgtcaacgcggcggacgcagcggccctcgagcacgacaaggcctacgaccagcagctccaagcgggtgacaatccgtacctgcggtataatcacgccgacgccgagtttcaggagcgtctgcaagaagatacgtcttttgggggcaacctcgggcgcgcagtcttccaggccaaaaagcgggttctcgaacctctgggcctggttgaatcgccggttaagacggctcctggaaagaagagaccggtagagccatcaccccagcgctctccagactcctctacgggcatcggcaagaaaggccagcagcccgcaaaaaagagactcaattttgggcagactggcgactcagagtcagtccccgaccctcaaccaatcggagaaccaccagcagccccctctggtgtgggacctaatacaatggctgcaggcggtggcgctccaatggcagacaataacgaaggcgccgacggagtgggtagttcctcaggaaattggcattgcgattccacatggctgggcgacagagtcatcaccaccagcacccgcacctgggccctgcccacctacaacaaccacctctacaagcaaatctccaacgggacctcgggaggaagcaccaacgacaacacctacttcggctacagcaccccctgggggtattttgacttcaacagattccactgccacttttcaccacgtgactggcagcgactcatcaacaacaactggggattccggcccaagaggctcaacttcaagctcttcaacatccaagtcaaggaggtcacgcagaatgaaggcaccaagaccatcgccaataaccttaccagcacgattcaggtctttacggactcggaataccagctcccgtacgtgctcggctcggcgcaccagggctgcctgcctccgttcccggcggacgtcttcatgattcctcagtacgggtacctgactctgaacaatggcagtcaggctgtgggccggtcgtccttctactgcctggagtactttccttctcaaatgctgagaacgggcaacaactttgaattcagctacaacttcgaggacgtgcccttccacagcagctacgcgcacagccagagcctggaccggctgatgaaccctctcatcgaccagtacttgtactacctgtcccggactcaaagcacgggcggtactgcaggaactcagcagttgctattttctcaggccgggcctaacaacatgtcggctcaggccaagaactggctacccggtccctgctaccggcagcaacgcgtctccacgacactgtcgcagaacaacaacagcaactttgcctggacgggtgccaccaagtatcatctgaatggcagagactctctggtgaatcctggcgttgccatggctacccacaaggacgacgaagagcgattttttccatccagcggagtcttaatgtttgggaaacagggagctggaaaagacaacgtggactatagcagcgtgatgctaaccagcgaggaagaaataaagaccaccaacccagtggccacagaacagtacggcgtggtggccgataacctgcaacagcaaaacgccgctcctattgtaggggccgtcaatagtcaaggagccttacctggcatggtgtggcagaaccgggacgtgtacctgcagggtcccatctgggccaagattcctcatacggacggcaactttcatccctcgccgctgatgggaggctttggactgaagcatccgcctcctcagatcctgattaaaaacacacctgttcccgcggatcctccgaccaccttcaatcaggccaagctggcttctttcatcacgcagtacagtaccggccaggtcagcgtggagatcgagtgggagctgcagaaggagaacagcaaacgctggaacccagagattcagtacacttccaactactacaaatctacaaatgtggactttgctgtcaatactgagggtacttattccgagcctcgccccattggcacccgttacctcacccgtaatctg

SEQ ID NO: 903 - DNA, 2217 bp, Artificial Sequence
  Description of Artificial Sequence: Synthetic polynucleotide
atggctgccgatggttatcttccagattggctcgaggacaacctctctgagggcattcgcgagtggtgggacctgaaacctggagccccgaaacccaaagccaaccagcaaaggcaggacaacggccggggtctggtgcttcctggctacaggtacctcggacccttcaacggactcgacaagggggagcccgtcaacgcggcggacgcagcggccctcgagcacgacagggcctacgaccagcagctccaagcgggtgacaatccgtacctgcggtataatcacgccgacgccgagtttcaggagcgtctgcaagaagatacgtcttttgggggcaacctcgggcgcgcagtcttccaggccaaaaagcgggttctcgaacctctgggcctggttgaatcgccggttaggacggctcctggaaagaagagaccggtagagccatcaccccagcgctctccagactcctctacgggcatcggcaagaaaggccagcagcccgcaagaaagagactcaattttgggcagactggcgactcagagtcagtccccgaccctcaaccaatcggagaaccaccagcagccccctctggtgtgggacctaatacaatggctgcaggcggtggcgctccaatggcagacaataacgaaggcgccgacggagtgggtagttcctcaggaaattggcattgcgattccacatggctgggcgacagagtcatcaccaccagcacccgcacctgggccctgcccacctacaacaaccacctctacaggcaaatctccaacgggacctcgggaggaagcaccaacgacaacacctacttcggctacagcaccccctgggggtattttgacttcaacagattccactgccacttttcaccacgtgactggcagcgactcatcaacaacaactggggattccggcccaagaggctcaacttcaagctcttcaacatccaagtcaaggaggtcacgcagaatgaaggcaccaggaccatcgccaataaccttaccagcacgattcaggtctttacggactcggaataccagctcccgtacgtgctcggctcggcgcaccagggctgcctgcctccgttcccggcggacgtcttcatgattcctcagtacgggtacctgactctgaacaatggcagtcaggctgtgggccggtcgtccttctactgcctggagtactttccttctcaaatgctgagaacgggcaacaactttgaattcagctacaacttcgaggacgtgcccttccacagcagctacgcgcacagccagagcctggaccggctgatgaaccctctcatcgaccagtacttgtactacctgtcccggactcaaagcacgggcggtactgcaggaactcagcagttgctattttctcaggccgggcctaacaacatgtcggctcaggccaagaactggctacccggtccctgctaccggcagcaacgcgtctccacgacactgtcgcagaacaacaacagcaactttgcctggacgggtgccaccaagtatcatctgaatggcagagactctctggtgaatcctggcgttgccatggctacccacagggacgacgaagagcgattttttccatccagcggagtcttaatgtttgggagacagggagctggaagagacaacgtggactatagcagcgtgatgctaaccagcgaggaagaaataaggaccaccaacccagtggccacagaacagtacggcgtggtggccgataacctgcaacagcaaaacgccgctcctattgtaggggccgtcaatagtcaaggagccttacctggcatggtgtggcagaaccgggacgtgtacctgcagggtcccatctgggccaagattcctcatacggacggcaactttcatccctcgccgctgatgggaggctttggactgaagcatccgcctcctcagatcctgattaaaaacacacctgttcccgcggatcctccgaccaccttcaatcaggccaagctggcttctttcatcacgcagtacagtaccggccaggtcagcgtggagatcgagtgggagctgcagaaggagaacagcaaacgctggaacccagagattcagtacacttccaactactacaaatctacaaatgtggactttgctgtcaatactgagggtacttattccgagcctcgccccattggcacccgttacctcacccgtaatctgtaa

SEQ ID NO: 904 - DNA, 2217 bp, Artificial Sequence
  Description of Artificial Sequence: Synthetic polynucleotide
atggctgccgatggttatcttccagattggctcgaggacaacctctctgagggcattcgcgagtggtgggacctgaaacctggagccccgaaacccaaagccaaccagcaaaggcaggacaacggccggggtctggtgcttcctggctacaggtacctcggacccttcaacggactcgacaagggggagcccgtcaacgcggcggacgcagcggccctcgagcacgacagggcctacgaccagcagctccaagcgggtgacaatccgtacctgcggtataatcacgccgacgccgagtttcaggagcgtctgcaagaagatacgtcttttgggggcaacctcgggcgcgcagtcttccaggccaaaaagcgggttctcgaacctctgggcctggttgaatcgccggttaggacggctcctggaaagaagagaccggtagagccatcaccccagcgctctccagactcctctacgggcatcggcaagagaggccagcagcccgcaagaaagagactcaattttgggcagactggcgactcagagtcagtccccgaccctcaaccaatcggagaaccaccagcagccccctctggtgtgggacctaatacaatggctgcaggcggtggcgctccaatggcagacaataacgaaggcgccgacggagtgggtagttcctcaggaaattggcattgcgattccacatggctgggcgacagagtcatcaccaccagcacccgcacctgggccctgcccacctacaacaaccacctctacaggcaaatctccaacgggacctcgggaggaagcaccaacgacaacacctacttcggctacagcaccccctgggggtattttgacttcaacagattccactgccacttttcaccacgtgactggcagcgactcatcaacaacaactggggattccggcccaagaggctcaacttcaagctcttcaacatccaagtcaaggaggtcacgcagaatgaaggcaccaggaccatcgccaataaccttaccagcacgattcaggtctttacggactcggaataccagctcccgtacgtgctcggctcggcgcaccagggctgcctgcctccgttcccggcggacgtcttcatgattcctcagtacgggtacctgactctgaacaatggcagtcaggctgtgggccggtcgtccttctactgcctggagtactttccttctcaaatgctgagaacgggcaacaactttgaattcagctacaacttcgaggacgtgcccttccacagcagctacgcgcacagccagagcctggaccggctgatgaaccctctcatcgaccagtacttgtactacctgtcccggactcaaagcacgggcggtactgcaggaactcagcagttgctattttctcaggccgggcctaacaacatgtcggctcaggccaagaactggctacccggtccctgctaccggcagcaacgcgtctccacgacactgtcgcagaacaacaacagcaactttgcctggacgggtgccaccaagtatcatctgaatggcagagactctctggtgaatcctggcgttgccatggctacccacagggacgacgaagagcgattttttccatccagcggagtcttaatgtttgggaaacagggagctggaagagacaacgtggactatagcagcgtgatgctaaccagcgaggaagaaataaggaccaccaacccagtggccacagaacagtacggcgtggtggccgataacctgcaacagcaaaacgccgctcctattgtaggggccgtcaatagtcaaggagccttacctggcatggtgtggcagaaccgggacgtgtacctgcagggtcccatctgggccaagattcctcatacggacggcaactttcatccctcgccgctgatgggaggctttggactgaagcatccgcctcctcagatcctgattaaaaacacacctgttcccgcggatcctccgaccaccttcaatcaggccaagctggcttctttcatcacgcagtacagtaccggccaggtcagcgtggagatcgagtgggagctgcagaaggagaacagcaaacgctggaacccagagattcagtacacttccaactactacaaatctacaaatgtggactttgctgtcaatactgagggtacttattccgagcctcgccccattggcacccgttacctcacccgtaatctgtaa

SEQ ID NO: 905 - DNA, 2217 bp, Artificial Sequence
  Description of Artificial Sequence: Synthetic polynucleotide
atggctgccgatggttatcttccagattggctcgaggacaacctctctgagggcattcgcgagtggtgggacctgaaacctggagccccgaaacccaaagccaaccagcaaaggcaggacaacggccggggtctggtgcttcctggctacaggtacctcggacccttcaacggactcgacaagggggagcccgtcaacgcggcggacgcagcggccctcgagcacgacagggcctacgaccagcagctccaagcgggtgacaatccgtacctgcggtataatcacgccgacgccgagtttcaggagcgtctgcaagaagatacgtcttttgggggcaacctcgggcgcgcagtcttccaggccaaaaagcgggttctcgaacctctgggcctggttgaatcgccggttaggacggctcctggaaagaagagaccggtagagccatcaccccagcgctctccagactcctctacgggcatcggcaagagaggccagcagcccgcaaaaaagagactcaattttgggcagactggcgactcagagtcagtccccgaccctcaaccaatcggagaaccaccagcagccccctctggtgtgggacctaatacaatggctgcaggcggtggcgctccaatggcagacaataacgaaggcgccgacggagtgggtagttcctcaggaaattggcattgcgattccacatggctgggcgacagagtcatcaccaccagcacccgcacctgggccctgcccacctacaacaaccacctctacaggcaaatctccaacgggacctcgggaggaagcaccaacgacaacacctacttcggctacagcaccccctgggggtattttgacttcaacagattccactgccacttttcaccacgtgactggcagcgactcatcaacaacaactggggattccggcccaagaggctcaacttcaagctcttcaacatccaagtcaaggaggtcacgcagaatgaaggcaccaggaccatcgccaataaccttaccagcacgattcaggtctttacggactcggaataccagctcccgtacgtgctcggctcggcgcaccagggctgcctgcctccgttcccggcggacgtcttcatgattcctcagtacgggtacctgactctgaacaatggcagtcaggctgtgggccggtcgtccttctactgcctggagtactttccttctcaaatgctgagaacgggcaacaactttgaattcagctacaacttcgaggacgtgcccttccacagcagctacgcgcacagccagagcctggaccggctgatgaaccctctcatcgaccagtacttgtactacctgtcccggactcaaagcacgggcggtactgcaggaactcagcagttgctattttctcaggccgggcctaacaacatgtcggctcaggccaagaactggctacccggtccctgctaccggcagcaacgcgtctccacgacactgtcgcagaacaacaacagcaactttgcctggacgggtgccaccaagtatcatctgaatggcagagactctctggtgaatcctggcgttgccatggctacccacagggacgacgaagagcgattttttccatccagcggagtcttaatgtttgggagacagggagctggaagagacaacgtggactatagcagcgtgatgctaaccagcgaggaagaaataaggaccaccaacccagtggccacagaacagtacggcgtggtggccgataacctgcaacagcaaaacgccgctcctattgtaggggccgtcaatagtcaaggagccttacctggcatggtgtggcagaaccgggacgtgtacctgcagggtcccatctgggccaagattcctcatacggacggcaactttcatccctcgccgctgatgggaggctttggactgaagcatccgcctcctcagatcctgattaaaaacacacctgttcccgcggatcctccgaccaccttcaatcaggccaagctggcttctttcatcacgcagtacagtaccggccaggtcagcgtggagatcgagtgggagctgcagaaggagaacagcaaacgctggaacccagagattcagtacacttccaactactacaaatctacaaatgtggactttgctgtcaatactgagggtacttattccgagcctcgccccattggcacccgttacctcacccgtaatctgtaa

SEQ ID NO: 906 - DNA, 2217 bp, Artificial Sequence
  Description of Artificial Sequence: Synthetic polynucleotide
atggctgccgatggttatcttccagattggctcgaggacaacctctctgagggcattcgcgagtggtgggacctgaaacctggagccccgaaacccaaagccaaccagcaaaggcaggacaacggccggggtctggtgcttcctggctacaggtacctcggacccttcaacggactcgacaagggggagcccgtcaacgcggcggacgcagcggccctcgagcacgacagggcctacgaccagcagctccaagcgggtgacaatccgtacctgcggtataatcacgccgacgccgagtttcaggagcgtctgcaagaagatacgtcttttgggggcaacctcgggcgcgcagtcttccaggccaaaaagcgggttctcgaacctctgggcctggttgaatcgccggttaggacggctcctggaaagaagagaccggtagagccatcaccccagcgctctccagactcctctacgggcatcggcaagagaggccagcagcccgcaaaaaagagactcaattttgggcagactggcgactcagagtcagtccccgaccctcaaccaatcggagaaccaccagcagccccctctggtgtgggacctaatacaatggctgcaggcggtggcgctccaatggcagacaataacgaaggcgccgacggagtgggtagttcctcaggaaattggcattgcgattccacatggctgggcgacagagtcatcaccaccagcacccgcacctgggccctgcccacctacaacaaccacctctacaggcaaatctccaacgggacctcgggaggaagcaccaacgacaacacctacttcggctacagcaccccctgggggtattttgacttcaacagattccactgccacttttcaccacgtgactggcagcgactcatcaacaacaactggggattccggcccaagaggctcaacttcaagctcttcaacatccaagtcaaggaggtcacgcagaatgaaggcaccaggaccatcgccaataaccttaccagcacgattcaggtctttacggactcggaataccagctcccgtacgtgctcggctcggcgcaccagggctgcctgcctccgttcccggcggacgtcttcatgattcctcagtacgggtacctgactctgaacaatggcagtcaggctgtgggccggtcgtccttctactgcctggagtactttccttctcaaatgctgagaacgggcaacaactttgaattcagctacaacttcgaggacgtgcccttccacagcagctacgcgcacagccagagcctggaccggctgatgaaccctctcatcgaccagtacttgtactacctgtcccggactcaaagcacgggcggtactgcaggaactcagcagttgctattttctcaggccgggcctaacaacatgtcggctcaggccaagaactggctacccggtccctgctaccggcagcaacgcgtctccacgacactgtcgcagaacaacaacagcaactttgcctggacgggtgccaccaagtatcatctgaatggcagagactctctggtgaatcctggcgttgccatggctacccacagggacgacgaagagcgattttttccatccagcggagtcttaatgtttgggaaacagggagctggaagagacaacgtggactatagcagcgtgatgctaaccagcgaggaagaaataaggaccaccaacccagtggccacagaacagtacggcgtggtggccgataacctgcaacagcaaaacgccgctcctattgtaggggccgtcaatagtcaaggagccttacctggcatggtgtggcagaaccgggacgtgtacctgcagggtcccatctgggccaagattcctcatacggacggcaactttcatccctcgccgctgatgggaggctttggactgaagcatccgcctcctcagatcctgattaaaaacacacctgttcccgcggatcctccgaccaccttcaatcaggccaggctggcttctttcatcacgcagtacagtaccggccaggtcagcgtggagatcgagtgggagctgcagaaggagaacagcaaacgctggaacccagagattcagtacacttccaactactacaaatctacaaatgtggactttgctgtcaatactgagggtacttattccgagcctcgccccattggcacccgttacctcacccgtaatctgtaa

SEQ ID NO: 907 - DNA, 2217 bp, Artificial Sequence
  Description of Artificial Sequence: Synthetic polynucleotide
atggctgccgatggttatcttccagattggctcgaggacaacctctctgagggcattcgcgagtggtgggacctgaaacctggagccccgaaacccaaagccaaccagcaaaggcaggacaacggccggggtctggtgcttcctggctacaggtacctcggacccttcaacggactcgacaagggggagcccgtcaacgcggcggacgcagcggccctcgagcacgacagggcctacgaccagcagctccaagcgggtgacaatccgtacctgcggtataatcacgccgacgccgagtttcaggagcgtctgcaagaagatacgtcttttgggggcaacctcgggcgcgcagtcttccaggccaaaaagcgggttctcgaacctctgggcctggttgaatcgccggttaggacggctcctggaaagaagagaccggtagagccatcaccccagcgctctccagactcctctacgggcatcggcaagaaaggccagcagcccgcaaaaaagagactcaattttgggcagactggcgactcagagtcagtccccgaccctcaaccaatcggagaaccaccagcagccccctctggtgtgggacctaatacaatggctgcaggcggtggcgctccaatggcagacaataacgaaggcgccgacggagtgggtagttcctcaggaaattggcattgcgattccacatggctgggcgacagagtcatcaccaccagcacccgcacctgggccctgcccacctacaacaaccacctctacaggcaaatctccaacgggacctcgggaggaagcaccaacgacaacacctacttcggctacagcaccccctgggggtattttgacttcaacagattccactgccacttttcaccacgtgactggcagcgactcatcaacaacaactggggattccggcccaagaggctcaacttcaagctcttcaacatccaagtcaaggaggtcacgcagaatgaaggcaccaggaccatcgccaataaccttaccagcacgattcaggtctttacggactcggaataccagctcccgtacgtgctcggctcggcgcaccagggctgcctgcctccgttcccggcggacgtcttcatgattcctcagtacgggtacctgactctgaacaatggcagtcaggctgtgggccggtcgtccttctactgcctggagtactttccttctcaaatgctgagaacgggcaacaactttgaattcagctacaacttcgaggacgtgcccttccacagcagctacgcgcacagccagagcctggaccggctgatgaaccctctcatcgaccagtacttgtactacctgtcccggactcaaagcacgggcggtactgcaggaactcagcagttgctattttctcaggccgggcctaacaacatgtcggctcaggccaagaactggctacccggtccctgctaccggcagcaacgcgtctccacgacactgtcgcagaacaacaacagcaactttgcctggacgggtgccaccaagtatcatctgaatggcagagactctctggtgaatcctggcgttgccatggctacccacagggacgacgaagagcgattttttccatccagcggagtcttaatgtttgggagacagggagctggaagagacaacgtggactatagcagcgtgatgctaaccagcgaggaagaaataaggaccaccaacccagtggccacagaacagtacggcgtggtggccgataacctgcaacagcaaaacgccgctcctattgtaggggccgtcaatagtcaaggagccttacctggcatggtgtggcagaaccgggacgtgtacctgcagggtcccatctgggccaagattcctcatacggacggcaactttcatccctcgccgctgatgggaggctttggactgaagcatccgcctcctcagatcctgattaaaaacacacctgttcccgcggatcctccgaccaccttcaatcaggccaggctggcttctttcatcacgcagtacagtaccggccaggtcagcgtggagatcgagtgggagctgcagaaggagaacagcaaacgctggaacccagagattcagtacacttccaactactacaaatctacaaatgtggactttgctgtcaatactgagggtacttattccgagcctcgccccattggcacccgttacctcacccgtaatctgtaa

SEQ ID NO: 908 - protein, 744 aa, Artificial Sequence
  Description of Artificial Sequence: Synthetic polypeptide
MAADGYLPDWLEDTLSEGIRQWWKLKPGPPPPKPAERHKDDSRGLVLPGYKYLGPFNGLDKGEPVNEADAAALEHDKAYDRQLDSGDNPYLKYNHADAEFQERLKEDTSFGGNLGRAVFQAKKRVLEPLGLVEEPVKTAPGKKRPVEHSPVEPDSSSGTGKAGQQPARKRLNFGQTGDADSVPDPQPLGQPPAAPSGLGTNTMATGSGAPMADNNEGADGVGNSSGNWHCDSTWMGDRVITTSTRTWALPTYNNHLYKQISSQSGASNDNHYFGYSTPWGYFDFNRFHCHFSPRDWQRLINNNWGFRPKRLNFKLFNIQVKEVTQNDGTTTIANNLTSTVQVFTDSEYQLPYVLGSAHQGCLPPFPADVFMVPQYGYLTLNNGSQAVGRSSFYCLEYFPSQMLRTGNNFTFSYTFEDVPFHSSYAHSQSLDRLMNPLIDQYLYYLSRTNTPSGTTTQSRLQFSQAGASDIRDQSRNWLPGPCYRQQRVSKTSADNNNSEYSWTGATKYHLNGRDSLVNPGPAMASHKDDEEKFFPQSGVLIFGKQGSEKTNVDIEKVMITDEEEIRTTNPVATEQYGSVSTNLQRGQRGESGHGYFAQAATADVNTQGVLPGMVWQDRDVYLQGPIWAKIPHTDGHFHPSPLMGGFGLKHPPPQILIKNTPVPANPSTTFSAAKFASFITQYSTGQVSVEIEWELQKENSKRWNPEIQYTSNYNKSVNVDFTVDTNGVYSEPRPIGTRYLTRNL

SEQ ID NO: 909 - DNA, 8359 bp, Artificial Sequence
  Description of Artificial Sequence: Synthetic polynucleotide
catcatcaataatataccttattttggattgaagccaatatgataatgagggggtggagtttgtgacgtggcgcggggcgtgggaacggggcgggtgacgtagtagctctagaggtcctgtattagaggtcacgtgagtgttttgcgacattttgcgacaccatgtggtcacgctgggtatttaagcccgagtgagcacgcagggtctccattttgaagcgggaggtttgaacgcgcagccgccatgccggggttttacgagattgtgattaaggtccccagcgaccttgacgagcatctgcccggcatttctgacagctttgtgaactgggtggccgagaaggaatgggagttgccgccagattctgacatggatctgaatctgattgagcaggcacccctgaccgtggccgagaagctgcagcgcgactttctgacggaatggcgccgtgtgagtaaggcaccggaggcccttttctttgtgcaatttgagaagggagagagctacttccacatgcacgtgctcgtggaaaccaccggggtgaaatccatggttttgggacgtttcctgagtcagattcgcgaaaaactgattcagagaatttaccgcgggatcgagccgactttgccaaactggttcgcggtcacaaagaccagaaatggcgccggaggcgggaacaaggtggtggatgagtgctacatccccaattacttgctccccaaaacccagcctgagctccagtgggcgtggactaatatggaacagtatttaagcgcctgtttgaatctcacggagcgtaaacggttggtggcgcagcatctgacgcacgtgtcgcagacgcaggagcagaacaaagagaatcagaatcccaattctgatgcgccggtgatcagatcaaaaacttcagccaggtacatggagctggtcgggtggctcgtggacaaggggattacctcggagaagcagtggatccaggaggaccaggcctcatacatctccttcaatgcggcctccaactcgcggtcccaaatcaaggctgccttggacaatgcgggaaagattatgagcctgactaaaaccgcccccgactacctggtgggccagcagcccgtggaggacatttccagcaatcggatttataaaattttggaactaaacgggtacgatccccaatatgcggcttccgtctttctgggatgggccacgaaaaagttcggcaagaggaacaccatctggctgtttgggcctgcaactaccgggaagaccaacatcgcggaggccatagcccacactgtgcccttctacgggtgcgtaaactggaccaatgagaactttcccttcaacgactgtgtcgacaagatggtgatctggtgggaggaggggaagatgaccgccaaggtcgtggagtcggccaaagccattctcggaggaagcaaggtgcgcgtggaccagaaatgcaagtcctcggcccagatagacccgactcccgtgatcgtcacctccaacaccaacatgtgcgccgtgattgacgggaactcaacgaccttcgaacaccagcagccgttgcaagaccggatgttcaaatttgaactcacccgccgtctggatcatgactttgggaaggtcaccaagcaggaagtcaaagactttttccggtgggcaaaggatcacgtggttgaggtggagcatgaattctacgtcaaaaagggtggagccaagaaaagacccgcccccagtgacgcagatataagtgagcccaaacgggtgcgcgagtcagttgcgcagccatcgacgtcagacgcggaagcttcgatcaactacgcagacaggtaccaaaacaaatgttctcgtcacgtgggcatgaatctgatgctgtttccctgcagacaatgcgagagaatgaatcagaattcaaatatctgcttcactcacggacagaaagactgtttagagtgctttcccgtgtcagaatctcaacccgtttctgtcgtcaaaaaggcgtatcagaaactgtgctacattcatcatatcatgggaaaggtgccagacgcttgcactgcctgcgatctggtcaatgtggatttggatgactgcatctttgaacaataaatgatttaaatcaggtatggctgccgatggttatcttccagattggctcgaggacactctctctgaaggaataagacagtggtggaagctcaaacctggcccaccaccaccaaagcccgcagagcggcataaggacgacagcaggggtcttgtgcttcctgggtacaagtacctcggacccttcaacggactcgacaagggagagccggtcaacgaggcagacgccgcggccctcgagcacgacaaagcctacgaccggcagctcgacagcggagacaacccgtacctcaagtacaaccacgccgacgcggagtttcaggagcgccttaaagaagatacgtcttttgggggcaacctcggacgagcagtcttccaggcgaaaaagagggttcttgaacctctgggcctggttgaggaacctgttaagacggctccgggaaaaaagaggccggtagagcactctcctgtggagccagactcctcctcgggaaccggaaaggcgggccagcagcctgcaagaaaaagattgaattttggtcagactggagacgcagactcagtacctgacccccagcctctcggacagccaccagcagccccctctggtctgggaactaatacgatggctacaggcagtggcgcaccaatggcagacaataacgagggcgccgacggagtgggtaattcctcgggaaattggcattgcgattccacatggatgggcgacagagtcatcaccaccagcacccgaacctgggccctgcccacctacaacaaccacctctacaaacaaatttccagccaatcaggagcctcgaacgacaatcactactttggctacagcaccccttgggggtattttgacttcaacagattccactgccacttttcaccacgtgactggcaaagactcatcaacaacaactggggattccgacccaagagactcaacttcaagctctttaacattcaagtcaaagaggtcacgcagaatgacggtacgacgacgattgccaataaccttaccagcacggttcaggtgtttactgactcggagtaccagctcccgtacgtcctcggctcggcgcatcaaggatgcctcccgccgttcccagcagacgtcttcatggtgccacagtatggatacctcaccctgaacaacgggagtcaggcagtaggacgctcttcattttactgcctggagtactttccttctcagatgctgcgtaccggaaacaactttaccttcagctacacttttgaggacgttcctttccacagcagctacgctcacagccagagtctggaccgtctcatgaatcctctcatcgaccagtacctgtattacttgagcagaacaaacactccaagtggaaccaccacgcagtcaaggcttcagttttctcaggccggagcgagtgacattcgggaccagtctaggaactggcttcctggaccctgttaccgccagcagcgagtatcaaagacatctgcggataacaacaacagtgaatactcgtggactggagctaccaagtaccacctcaatggcagagactctctggtgaatccgggcccggccatggcaagccacaaggacgatgaagaaaagttttttcctcagagcggggttctcatctttgggaagcaaggctcagagaaaacaaatgtggacattgaaaaggtcatgattacagacgaagaggaaatcaggacaaccaatcccgtggctacggagcagtatggttctgtatctaccaacctccagagaggccagagaggcgagtctggtcatggttattttgcccaggcggccaccgcagatgtcaacacacaaggcgttcttccaggcatggtctggcaggacagagatgtgtaccttcaggggcccatctgggcaaagattccacacacggacggacattttcacccctctcccctcatgggtggattcggacttaaacaccctcctccacagattctcatcaagaacaccccggtacctgcgaatccttcgaccaccttcagtgcggcaaagtttgcttccttcatcacacagtactccacgggacaggtcagcgtggagatcgagtgggagctgcagaaggaaaacagcaaacgctggaatcccgaaattcagtacacttccaactacaacaagtctgttaatgtggactttactgtggacactaatggcgtgtattcagagcctcgccccattggcaccagatacctgactcgtaatctgtaattgcttgttaatcaataaaccgtttaattcgtttcagttgaactttggtctctgcgtatttctttcttatctagtttccatgctctagaggtcctgtattagaggtcacgtgagtgttttgcgacattttgcgacaccatgtggtcacgctgggtatttaagcccgagtgagcacgcagggtctccattttgaagcgggaggtttgaacgcgcagccaccacggcggggttttacgagattgtgattaaggtccccagcgaccttgacgagcatctgcccggcatttctgacagctttgtgaactgggtggccgagaaggaatgggagttgccgccagattctgacatggatctgaatctgattgagcaggcacccctgaccgtggccgagaagctgcatcgctggcgtaatagcgaagaggcccgcaccgatcgcccttcccaacagttgcgcagcctgaatggcgaatggcgattccgttgcaatggctggcggtaatattgttctggatattaccagcaaggccgatagtttgagttcttctactcaggcaagtgatgttattactaatcaaagaagtattgcgacaacggttaatttgcgtgatggacagactcttttactcggtggcctcactgattataaaaacacttctcaggattctggcgtaccgttcctgtctaaaatccctttaatcggcctcctgtttagctcccgctctgattctaacgaggaaagcacgttatacgtgctcgtcaaagcaaccatagtacgcgccctgtagcggcgcattaagcgcggcgggtgtggtggttacgcgcagcgtgaccgctacacttgccagcgccctagcgcccgctcctttcgctttcttcccttcctttctcgccacgttcgccggctttccccgtcaagctctaaatcgggggctccctttagggttccgatttagtgctttacggcacctcgaccccaaaaaacttgattagggtgatggttcacgtagtgggccatcgccctgatagacggtttttcgccctttgacgttggagtccacgttctttaatagtggactcttgttccaaactggaacaacactcaaccctatctcggtctattcttttgatttataagggattttgccgatttcggcctattggttaaaaaatgagctgatttaacaaaaatttaacgcgaattttaacaaaatattaacgtttacaatttaaatatttgcttatacaatcttcctgtttttggggcttttctgattatcaaccggggtacatatgattgacatgctagttttacgattaccgttcatcgattctcttgtttgctccagactctcaggcaatgacctgatagcctttgtagagacctctcaaaaatagctaccctctccggcatgaatttatcagctagaacggttgaatatcatattgatggtgatttgactgtctccggcctttctcacccgtttgaatctttacctacacattactcaggcattgcatttaaaatatatgagggttctaaaaatttttatccttgcgttgaaataaaggcttctcccgcaaaagtattacagggtcataatgtttttggtacaaccgatttagctttatgctctgaggctttattgcttaattttgctaattctttgccttgcctgtatgatttattggatgttggaattcctgatgcggtattttctccttacgcatctgtgcggtatttcacaccgcatatggtgcactctcagtacaatctgctctgatgccgcatagttaagccagccccgacacccgccaacacccgctgacgcgccctgacgggcttgtctgctcccggcatccgcttacagacaagctgtgaccgtctccgggagctgcatgtgtcagaggttttcaccgtcatcaccgaaacgcgcgagacgaaagggcctcgtgatacgcctatttttataggttaatgtcatgataataatggtttcttagacgtcaggtggcacttttcggggaaatgtgcgcggaacccctatttgtttatttttctaaatacattcaaatatgtatccgctcatgagacaataaccctgataaatgcttcaataatattgaaaaaggaagagtatgagtattcaacatttccgtgtcgcccttattcccttttttgcggcattttgccttcctgtttttgctcacccagaaacgctggtgaaagtaaaagatgctgaagatcagttgggtgcacgagtgggttacatcgaactggatctcaacagcggtaagatccttgagagttttcgccccgaagaacgttttccaatgatgagcacttttaaagttctgctatgtggcgcggtattatcccgtattgacgccgggcaagagcaactcggtcgccgcatacactattctcagaatgacttggttgagtactcaccagtcacagaaaagcatcttacggatggcatgacagtaagagaattatgcagtgctgccataaccatgagtgataacactgcggccaacttacttctgacaacgatcggaggaccgaaggagctaaccgcttttttgcacaacatgggggatcatgtaactcgccttgatcgttgggaaccggagctgaatgaagccataccaaacgacgagcgtgacaccacgatgcctgtagcaatggcaacaacgttgcgcaaactattaactggcgaactacttactctagcttcccggcaacaattaatagactggatggaggcggataaagttgcaggaccacttctgcgctcggcccttccggctggctggtttattgctgataaatctggagccggtgagcgtgggtctcgcggtatcattgcagcactggggccagatggtaagccctcccgtatcgtagttatctacacgacggggagtcaggcaactatggatgaacgaaatagacagatcgctgagataggtgcctcactgattaagcattggtaactgtcagaccaagtttactcatatatactttagattgatttaaaacttcatttttaatttaaaaggatctaggtgaagatcctttttgataatctcatgaccaaaatcccttaacgtgagttttcgttccactgagcgtcagaccccgtagaaaagatcaaaggatcttcttgagatcctttttttctgcgcgtaatctgctgcttgcaaacaaaaaaaccaccgctaccagcggtggtttgtttgccggatcaagagctaccaactctttttccgaaggtaactggcttcagcagagcgcagataccaaatactgtccttctagtgtagccgtagttaggccaccacttcaagaactctgtagcaccgcctacatacctcgctctgctaatcctgttaccagtggctgctgccagtggcgataagtcgtgtcttaccgggttggactcaagacgatagttaccggataaggcgcagcggtcgggctgaacggggggttcgtgcacacagcccagcttggagcgaacgacctacaccgaactgagatacctacagcgtgagctatgagaaagcgccacgcttcccgaagggagaaaggcggacaggtatccggtaagcggcagggtcggaacaggagagcgcacgagggagcttccagggggaaacgcctggtatctttatagtcctgtcgggtttcgccacctctgacttgagcgtcgatttttgtgatgctcgtcaggggggcggagcctatggaaaaacgccagcaacgcggcctttttacggttcctggccttttgctggccttttgctcacatgttctttcctgcgttatcccctgattctgtggataaccgtattaccgcctttgagtgagctgataccgctcgccgcagccgaacgaccgagcgcagcgagtcagtgagcgaggaagcggaagagcgcccaatacgcaaaccgcctctccccgcgcgttggccgattcattaatgcagaattcc

SEQ ID NO: 910 - protein, 736 aa, Artificial Sequence
  Description of Artificial Sequence: Synthetic polypeptide
MAADGYLPDWLEDNLSEGIREWWDLKPGAPKPKANQQKQDDGRGLVLPGYKYLGPFNGLDKGEPVNAADAAALEHDKAYDQQLKAGDNPYLRYNHADAEFQERLQEDTSFGGNLGRAVFQAKKRVLEPLGLVEEGAKTAPGKKRPVEQSPQEPDSSSGIGKKGQQPAKKRLNFGQTGDSESVPDPQPLGEPPAAPSGVGSNTMAAGGGAPMADNNEGADGVGNASGNWHCDSTWLGDRVITTSTRTWALPTYNNHLYKQISSQSGASTNDNTYFGYSTPWGYFDFNRFHCHFSPRDWQRLINNNWGFRPKRLNFKLFNIQVKEVTTNDGTTTIANNLTSTVQVFTDSEYQLPYVLGSAHQGCLPPFPADVFMIPQYGYLTLNNGSQAVGRSSFYCLEYFPSQMLRTGNNFEFSYTFEDVPFHSSYAHSQSLDRLMNPLIDQYLYYLSRTQTTSGTAGNRTLQFSQAGPSSMANQAKNWLPGPCYRQQRVSKTANQNNNSNFAWTGATKYHLNGRDSLVNPGPAMATHKDDEDKFFPMSGVLIFGKQGAGNSNVDLDNVMITSEEEIKTTNPVATEQYGTVATNLQSSNTAPATGTVNSQGALPGMVWQNRDVYLQGPIWAKIPHTDGHFHPSPLMGGFGLKHPPPQILIKNTPVPANPPTTFSPAKFASFITQYSTGQVSVEIEWELQKENSKRWNPEIQYTSNYNKSTNVDFAVDTNGVYSEPRPIGTRYLTRNL

SEQ ID NO: 911 - DNA, 2208 bp, Artificial Sequence
  Description of Artificial Sequence: Synthetic polynucleotide
atggctgccgatggttatcttccagattggctcgaggacaacctctctgagggcattcgcgagtggtgggacttgaaacctggagccccgaaacccaaagccaaccagcaaaagcaggacgacggccggggtctggtgcttcctggctacaagtacctcggacccttcaacggactcgacaagggggagcccgtcaacgcggcggacgcagcggccctcgagcacgacaaggcctacgaccagcagctcaaagcgggtgacaatccgtacctgcggtataaccacgccgacgccgagtttcaggagcgtctgcaagaagatacgtcttttgggggcaacctcgggcgagcagtcttccaggccaagaagcgggttctcgaacctctcggtctggttgaggaaggcgctaagacggctcctggaaagaagagaccggtagagcaatcaccccaggaaccagactcctcttcgggcatcggcaagaaaggccagcagcccgcgaagaagagactcaactttgggcagacaggcgactcagagtcagtgcccgaccctcaaccactcggagaaccccccgcagccccctctggtgtgggatctaatacaatggcagcaggcggtggcgctccaatggcagacaataacgaaggcgccgacggagtgggtaacgcctcaggaaattggcattgcgattccacatggctgggcgacagagtcatcaccaccagcacccgaacctgggccctccccacctacaacaaccacctctacaagcaaatctccagccaatcgggagcaagcaccaacgacaacacctacttcggctacagcaccccctgggggtattttgactttaacagattccactgccacttctcaccacgtgactggcagcgactcatcaacaacaactggggattccggcccaagagactcaacttcaagctcttcaacatccaggtcaaggaggtcacgacgaatgatggcaccacgaccatcgccaataaccttaccagcacggttcaggtctttacggactcggaataccagctcccgtacgtcctcggctctgcgcaccagggctgcctgcctccgttcccggcggacgtcttcatgattcctcagtacgggtacctgactctgaacaatggcagtcaggccgtgggccgttcctccttctactgcctggagtactttccttctcaaatgctgagaacgggcaacaactttgagttcagctacacgtttgaggacgtgccttttcacagcagctacgcgcacagccaaagcctggaccggctgatgaaccccctcatcgaccagtacctgtactacctgtctcggactcagaccacgagtggtaccgcaggaaatcggacgttgcaattttctcaggccgggcctagtagcatggcgaatcaggccaaaaactggctacccgggccctgctaccggcagcaacgcgtctccaagacagcgaatcaaaataacaacagcaactttgcctggaccggtgccaccaagtatcatctgaatggcagagactctctggtaaatcccggtcccgctatggcaacccacaaggacgacgaagacaaattttttccgatgagcggagtcttaatatttgggaaacagggagctggaaatagcaacgtggaccttgacaacgttatgataaccagtgaggaagaaattaaaaccaccaacccagtggccacagaacagtacggcacggtggccactaacctgcaatcgtcaaacaccgctcctgctacagggaccgtcaacagtcaaggagccttacctggcatggtctggcagaaccgggacgtgtacctgcagggtcctatctgggccaagattcctcacacggacggacactttcatccctcgccgctgatgggaggctttggactgaaacacccgcctcctcagatcctgattaagaatacacctgttcccgcgaatcctccaactaccttcagtccagctaagtttgcgtcgttcatcacgcagtacagcaccggacaggtcagcgtggaaattgaatgggagctgcagaaagaaaacagcaaacgctggaacccagagattcaatacacttccaactacaacaaatctacaaatgtggactttgctgttgacacaaatggcgtttattctgagcctcgccccatcggcacccgttacctcacccgtaatctg

SEQ ID NO: 912 - protein, 737 aa, Artificial Sequence
  Description of Artificial Sequence: Synthetic polypeptide
MAADGYLPDWLEDNLSEGIREWWDLKPGAPKPKANQQKQDDGRGLVLPGYKYLGPFNGLDKGEPVNAADAAALEHDKAYDQQLKAGDNPYLRYNHADAEFQERLQEDTSFGGNLGRAVFQAKKRVLEPLGLVEEGAKTAPGKKRPVEQSPQEPDSSTGIGKKGQQPAKKRLNFGQTGDSESVPDPQPLGEPPAAPSGVGSNTMAAGGGAPMADNNEGADGVGNASGNWHCDSTWLGDRVITTSTRTWALPTYNNHLYKQISNSQSGGSTNDNTYFGYSTPWGYFDFNRFHCHFSPRDWQRLINNNWGFRPKRLNFKLFNIQVKEVTTNDGTTTIANNLTSTVQVFTDSEYQLPYVLGSAHQGCLPPFPADVFMIPQYGYLTLNNGSQAVGRSSFYCLEYFPSQMLRTGNNFEFSYTFEDVPFHSSYAHSQSLDRLMNPLIDQYLYYLSRTQTTGGTAGNRTLQFSQAGPSSMANQAKNWLPGPCYRQQRVSKTTNQNNNSNFAWTGATKYHLNGRDSLVNPGVAMATHKDDEDRFFPSSGVLIFGKQGAGNDNVDLDNVMITSEEEIKTTNPVATEEYGVVATNLQSANTAPQTGTVNSQGALPGMVWQNRDVYLQGPIWAKIPHTDGNFHPSPLMGGFGLKHPPPQILIKNTPVPANPPTTFSPAKFASFITQYSTGQVSVEIEWELQKENSKRWNPEIQYTSNYNKSTNVDFAVDTEGVYSEPRPIGTRYLTRNL

SEQ ID NO: 913 - DNA, 2211 bp, Artificial Sequence
  Description of Artificial Sequence: Synthetic polynucleotide
atggctgccgatggttatcttccagattggctcgaggacaacctctctgagggcattcgcgagtggtgggacttgaaacctggagccccgaaacccaaagccaaccagcaaaagcaggacgacggccggggtctggtgcttcctggctacaagtacctcggacccttcaacggactcgacaagggggagcccgtcaacgcggcggacgcagcggccctcgagcacgacaaggcctacgaccagcagctcaaagcgggtgacaatccgtacctgcggtataaccacgccgacgccgagtttcaggagcgtctgcaagaagatacgtcttttgggggcaacctcgggcgagcagtcttccaggccaagaagcgggttctcgaacctctcggtctggttgaggaaggcgctaagacggctcctggaaagaagagaccggtagagcaatcaccccaggaaccagactcctctacgggcatcggcaagaaaggccagcagcccgcgaaaaagagactcaactttgggcagactggcgactcagagtcagtgcccgaccctcaaccactcggagaaccccccgcagccccctctggtgtgggatctaatacaatggctgcaggcggtggcgctccaatggcagacaataacgaaggcgccgacggagtgggtaatgcctcaggaaattggcattgcgattccacatggctgggcgacagagtcatcaccaccagcacccgaacctgggccctccccacctacaacaaccacctctacaagcaaatctccaacagccaatcgggaggaagcaccaacgacaacacctacttcggctacagcaccccctgggggtattttgactttaacagattccactgccacttctcaccacgtgactggcagcgactcatcaacaacaactggggattccggcccaagagactcaacttcaagctcttcaacatccaggtcaaggaggtcacgacgaatgatggcaccacgaccatcgccaataaccttaccagcacggttcaggtctttacggactcggaataccagctcccgtacgtcctcggctctgcgcaccagggctgcctgcctccgttcccggcggacgtcttcatgattcctcagtacgggtacctgactctgaacaatggcagtcaggccgtgggccgttcctccttctactgcctggagtactttccttctcaaatgctgagaacgggcaacaactttgagttcagctacacgtttgaggacgtgccttttcacagcagctacgcgcacagccaaagcctggaccggctgatgaaccccctcatcgaccagtacctgtactacctgtctcggactcagaccacgggaggtaccgcaggaaatcggacgttgcaattttctcaggccgggcctagtagcatggcgaatcaggccaaaaactggctacccgggccctgctaccggcagcaacgcgtctccaagacaacgaatcaaaataacaacagcaactttgcctggaccggtgccaccaagtatcatctgaatggcagagactctctggtaaatcccggtgtcgctatggcaacccacaaggacgacgaagaccgattttttccgtccagcggagtcttaatatttgggaaacagggagctggaaatgacaacgtggaccttgacaacgttatgataaccagtgaggaagaaattaaaaccaccaacccagtggccacagaagagtacggcgtggtggccactaacctgcaatcggcaaacaccgctcctcaaacagggaccgtcaacagtcaaggagccttacctggcatggtctggcagaaccgggacgtgtacctgcagggtcctatctgggccaagattcctcacacggacggaaactttcatccctcgccgctgatgggaggctttggactgaaacacccgcctcctcagatcctgattaagaatacacctgttcccgcgaatcctccaactaccttcagtccagctaagtttgcgtcgttcatcacgcagtacagcaccggacaggtcagcgtggaaattgaatgggagctgcagaaagaaaacagcaaacgctggaacccagagattcaatacacttccaactacaacaaatctacaaatgtggactttgctgttgacacagaaggcgtttattctgagcctcgccccatcggcacccgttacctcacccgtaatctg

SEQ ID NO: 914 - protein, 738 aa, Artificial Sequence
  Description of Artificial Sequence: Synthetic polypeptide
MAADGYLPDWLEDNLSEGIREWWDLKPGAPKPKANQQKQDDGRGLVLPGYKYLGPFNGLDKGEPVNAADAAALEHDKAYDQQLKAGDNPYLRYNHADAEFQERLQEDTSFGGNLGRAVFQAKKRVLEPLGLVEEGAKTAPGKKRPVEQSPQREPDSSTGIGKKGQQPAKKRLNFGQTGDSESVPDPQPLGEPPAAPSGVGSNTMAAGGGAPMADNNEGADGVGNSSGNWHCDSTWLGDRVITTSTRTWALPTYNNHLYKQISNGTSGGSTNDNTYFGYSTPWGYFDFNRFHCHFSPRDWQRLINNNWGFRPKRLNFKLFNIQVKEVTTNEGTKTIANNLTSTVQVFTDSEYQLPYVLGSAHQGCLPPFPADVFMIPQYGYLTLNNGSQAVGRSSFYCLEYFPSQMLRTGNNFQFSYTFEDVPFHSSYAHSQSLDRLMNPLIDQYLYYLSRTQTTGGTAGTQTLQFSQAGPSSMANQAKNWLPGPCYRQQRVSTTTNQNNNSNFAWTGATKYHLNGRDSLVNPGVAMATHKDDEDRFFPSSGVLIFGKQGAGNDNVDYSNVMITSEEEIKTTNPVATEEYGVVATNLQSANTAPQTGTVNSQGALPGMVWQNRDVYLQGPIWAKIPHTDGNFHPSPLMGGFGLKHPPPQILIKNTPVPADPPTTFNQAKLNSFITQYSTGQVSVEIEWELQKENSKRWNPEIQYTSNYYKSTNVDFAVNTEGVYSEPRPIGTRYLTRNL

SEQ ID NO: 915 - DNA, 2214 bp, Artificial Sequence
  Description of Artificial Sequence: Synthetic polynucleotide
atggctgccgatggttatcttccagattggctcgaggacaacctctctgagggcattcgcgagtggtgggacctgaaacctggagccccgaaacccaaagccaaccagcaaaagcaggacgacggccggggtctggtgcttcctggctacaagtacctcggacccttcaacggactcgacaagggggagcccgtcaacgcggcggacgcagcggccctcgagcacgacaaggcctacgaccagcagctcaaagcgggtgacaatccgtacctgcggtataatcacgccgacgccgagtttcaggagcgtctgcaagaagatacgtcttttgggggcaacctcgggcgagcagtcttccaggccaagaagcgggttctcgaacctctcggtctggttgaggaaggcgctaagacggctcctggaaagaagagaccggtagagcagtcaccacagcgtgagcccgactcctccacgggcatcggcaagaaaggccagcagcccgccaaaaagagactcaatttcggtcagactggcgactcagagtcagtccccgaccctcaacctctcggagaacctccagcagcgccctctggtgtgggatctaatacaatggctgcaggcggtggcgcaccaatggcagacaataacgaaggtgccgacggagtgggtaattcctcgggaaattggcattgcgattccacatggctgggcgacagagtcatcaccaccagcacccgaacctgggccctgcccacctacaacaaccacctctacaagcaaatctccaacgggacctcgggaggcagcaccaacgacaacacctactttggctacagcaccccctgggggtattttgactttaacagattccactgccacttctcaccacgtgactggcagcgactcatcaacaacaactggggattccggcccaagagactcaacttcaagctcttcaacatccaggtcaaagaggtcacgacgaatgaaggcaccaagaccatcgccaataacctcaccagcaccgtccaggtgtttacggactcggaataccagctgccgtacgtcctcggctctgcccaccagggctgcctgcctccgttcccggcggacgtcttcatgattcctcagtacggctacctgactctcaacaacggtagtcaggccgtgggacgttcctccttctactgcctggagtacttcccctctcagatgctgagaacgggcaacaactttcaattcagctacactttcgaggacgtgcctttccacagcagctacgcgcacagccagagtttggacaggctgatgaatcctctcatcgaccagtacctgtactacctgtcaagaacccagactacgggaggcacagcgggaacccagacgttgcagttttctcaggccgggcctagcagcatggcgaatcaggccaaaaactggctgcctggaccctgctacagacagcagcgcgtctccacgacaacgaatcaaaacaacaacagcaactttgcctggactggtgccaccaagtatcatctgaacggcagagactctctggtgaatccgggcgtcgccatggcaacccacaaggacgacgaggaccgcttcttcccatccagcggcgtcctcatatttggcaagcagggagctggaaatgacaacgtggactatagcaacgtgatgataaccagcgaggaagaaatcaagaccaccaaccccgtggccacagaagagtatggcgtggtggctactaacctacagtcggcaaacaccgctcctcaaacggggaccgtcaacagccagggagccttacctggcatggtctggcagaaccgggacgtgtacctgcagggtcctatttgggccaagattcctcacacagatggcaactttcacccgtctcctttaatgggcggctttggacttaaacatccgcctcctcagatcctcatcaaaaacactcctgttcctgcggatcctccaacaacgttcaaccaggccaagctgaattctttcatcacgcagtacagcaccggacaagtcagcgtggagatcgagtgggagctgcagaaggagaacagcaagcgctggaacccagagattcagtatacttccaactactacaaatctacaaatgtggactttgctgttaatactgagggtgtttactctgagcctcgccccattggcactcgttacctcacccgtaatctg

SEQ ID NO: 916 - protein, 738 aa, Artificial Sequence
  Description of Artificial Sequence: Synthetic polypeptide
MAADGYLPDWLEDNLSEGIREWWDLKPGAPKPKANQQKQDDGRGLVLPGYKYLGPFNGLDKGEPVNAADAAALEHDKAYDQQLKAGDNPYLRYNHADAEFQERLQEDTSFGGNLGRAVFQAKKRVLEPLGLVEEGAKTAPGKKRPVEQSPQREPDSSTGIGKKGQQPARKRLNFGQTGDSESVPDPQPLGEPPAAPSGVGSNTMAAGGGAPMADNNEGADGVGSSSGNWHCDSTWLGDRVITTSTRTWALPTYNNHLYKQISNGTSGGSTNDNTYFGYSTPWGYFDFNRFHCHFSPRDWQRLINNNWGFRPKRLNFKLFNIQVKEVTQNEGTKTIANNLTSTIQVFTDSEYQLPYVLGSAHQGCLPPFPADVFMIPQYGYLTLNNGSQAVGRSSFYCLEYFPSQMLRTGNNFQFSYTFEDVPFHSSYAHSQSLDRLMNPLIDQYLYYLSRTQTTGGTAGTQTLQFSQAGPSNMANQAKNWLPGPCYRQQRVSTTTSQNNNSNFAWTGATKYHLNGRDSLVNPGVAMATHKDDEDRFFPSSGILIFGKQGAGKDNVDYSNVMLTSEEEIKTTNPVATEEYGVVADNLQQQNTAPQIGTVNSQGALPGMVWQNRDVYLQGPIWAKIPHTDGNFHPSPLMGGFGLKHPPPQILIKNTPVPADPPTTFNQAKLNSFITQYSTGQVSVEIEWELQKENSKRWNPEIQYTSNYYKSTNVDFAVNTEGVYSEPRPIGTRYLTRNL

SEQ ID NO: 917 - DNA, 2214 bp, Artificial Sequence
  Description of Artificial Sequence: Synthetic polynucleotide
atggctgccgatggttatcttccagattggctcgaggacaacctctctgagggcattcgcgagtggtgggacctgaaacctggagccccgaaacccaaagccaaccagcaaaagcaggacgacggccggggtctggtgcttcctggctacaagtacctcggacccttcaacggactcgacaagggggagcccgtcaacgcggcggacgcagcggccctcgagcacgacaaggcctacgaccagcagctcaaagcgggtgacaatccgtacctgcggtataatcacgccgacgccgagtttcaggagcgtctgcaagaagatacgtcttttgggggcaacctcgggcgagcagtcttccaggccaagaagcgggttctcgaacctctcggtctggttgaggaaggcgctaagacggctcctggaaagaagagaccggtagagcagtcaccacagcgtgagcccgactcctccacgggcatcggcaagaaaggccagcagcccgccagaaagagactcaatttcggtcagactggcgactcagagtcagtccccgaccctcaacctctcggagaacctccagcagcgccctctggtgtgggatctaatacaatggctgcaggcggtggcgcaccaatggcagacaataacgaaggtgccgacggagtgggtagttcctcgggaaattggcattgcgattccacatggctgggcgacagagtcatcaccaccagcacccgaacctgggccctgcccacctacaacaaccacctctacaagcaaatctccaacgggacctcgggaggcagcaccaacgacaacacctactttggctacagcaccccctgggggtattttgactttaacagattccactgccacttctcaccacgtgactggcagcgactcatcaacaacaactggggattccggcccaagagactcaacttcaagctcttcaacatccaggtcaaagaggtcacgcagaatgaaggcaccaagaccatcgccaataacctcaccagcaccatccaggtgtttacggactcggaataccagctgccgtacgtcctcggctctgcccaccagggctgcctgcctccgttcccggcggacgtcttcatgattcctcagtacggctacctgactctcaacaacggtagtcaggccgtgggacgttcctccttctactgcctggagtacttcccctctcagatgctgagaacgggcaacaactttcaattcagctacactttcgaggacgtgcctttccacagcagctacgcgcacagccagagtttggacaggctgatgaatcctctcatcgaccagtacctgtactacctgtcaagaacccagactacgggaggcacagcgggaacccagacgttgcagttttctcaggccgggcctagcaacatggcgaatcaggccaaaaactggctgcctggaccctgctacagacagcagcgcgtctccacgacaacgtcgcaaaacaacaacagcaactttgcctggactggtgccaccaagtatcatctgaacggcagagactctctggtgaatccgggcgtcgccatggcaacccacaaggacgacgaggaccgcttcttcccatccagcggcatcctcatatttggcaagcagggagctggaaaagacaacgtggactatagcaacgtgatgctaaccagcgaggaagaaatcaagaccaccaaccccgtggccacagaagagtatggcgtggtggctgataacctacagcagcaaaacaccgctcctcaaatagggaccgtcaacagccagggagccttacctggcatggtctggcagaaccgggacgtgtacctgcagggtcctatttgggccaagattcctcacacagatggcaactttcacccgtctcctttaatgggcggctttggacttaaacatccgcctcctcagatcctcatcaaaaacactcctgttcctgcggatcctccaacaacgttcaaccaggccaagctgaattctttcatcacgcagtacagcaccggacaagtcagcgtggagatcgagtgggagctgcagaaggagaacagcaagcgctggaacccagagattcagtatacttccaactactacaaatctacaaatgtggactttgctgttaatactgagggtgtttactctgagcctcgccccattggcactcgttacctcacccgtaatctg

SEQ ID NO: 918 - protein, 738 aa, Artificial Sequence
  Description of Artificial Sequence: Synthetic polypeptide
MAADGYLPDWLEDNLSEGIREWWDLKPGAPKPKANQQKQDDGRGLVLPGYKYLGPFNGLDKGEPVNAADAAALEHDKAYDQQLKAGDNPYLRYNHADAEFQERLQEDTSFGGNLGRAVFQAKKRVLEPLGLVEEGAKTAPGKKRPVEPSPQRSPDSSTGIGKKGQQPARKRLNFGQTGDSESVPDPQPIGEPPAAPSGVGSGTMAAGGGAPMADNNEGADGVGSSSGNWHCDSTWLGDRVITTSTRTWALPTYNNHLYKQISNGTSGGSTNDNTYFGYSTPWGYFDFNRFHCHFSPRDWQRLINNNWGFRPKRLNFKLFNIQVKEVTQNEGTKTIANNLTSTIQVFTDSEYQLPYVLGSAHQGCLPPFPADVFMIPQYGYLTLNNGSQAVGRSSFYCLEYFPSQMLRTGNNFEFSYTFEDVPFHSSYAHSQSLDRLMNPLIDQYLYYLSRTQSTGGTAGTQQLLFSQAGPSNMSAQAKNWLPGPCYRQQRVSTTLSQNNNSNFAWTGATKYHLNGRDSLVNPGVAMATHKDDEDRFFPSSGILMFGKQGAGKDNVDYSNVMLTSEEEIKTTNPVATEQYGVVADNLQQQNTAPIVGAVNSQGALPGMVWQNRDVYLQGPIWAKIPHTDGNFHPSPLMGGFGLKHPPPQILIKNTPVPADPPTTFNQAKLNSFITQYSTGQVSVEIEWELQKENSKRWNPEIQYTSNYYKSTNVDFAVNTEGVYSEPRPIGTRYLTRNL

SEQ ID NO: 919 - DNA, 2214 bp, Artificial Sequence
  Description of Artificial Sequence: Synthetic polynucleotide
atggctgccgatggttatcttccagattggctcgaggacaacctctctgagggcattcgcgagtggtgggacctgaaacctggagccccgaaacccaaagccaaccagcaaaagcaggacgacggccggggtctggtgcttcctggctacaagtacctcggacccttcaacggactcgacaagggggagcccgtcaacgcggcggacgcagcggccctcgagcacgacaaggcctacgaccagcagctcaaagcgggtgacaatccgtacctgcggtataatcacgccgacgccgagtttcaggagcgtctgcaagaagatacgtcttttgggggcaacctcgggcgagcagtcttccaggccaagaagcgggttctcgaacctctcggtctggttgaggaaggcgctaagacggctcctggaaagaagagaccggtagagccgtcaccacagcgttcccccgactcctccacgggcatcggcaagaaaggccagcagcccgccagaaagagactcaatttcggtcagactggcgactcagagtcagtccccgaccctcaacctatcggagaacctccagcagcgccctctggtgtgggatctggtacaatggctgcaggcggtggcgcaccaatggcagacaataacgaaggtgccgacggagtgggtagttcctcgggaaattggcattgcgattccacatggctgggcgacagagtcatcaccaccagcacccgaacctgggccctgcccacctacaacaaccacctctacaagcaaatctccaacgggacctcgggaggcagcaccaacgacaacacctactttggctacagcaccccctgggggtattttgactttaacagattccactgccacttctcaccacgtgactggcagcgactcatcaacaacaactggggattccggcccaagagactcaacttcaagctcttcaacatccaggtcaaagaggtcacgcagaatgaaggcaccaagaccatcgccaataacctcaccagcaccatccaggtgtttacggactcggaataccagctgccgtacgtcctcggctctgcccaccagggctgcctgcctccgttcccggcggacgtcttcatgattcctcagtacggctacctgactctcaacaacggtagtcaggccgtgggacgttcctccttctactgcctggagtacttcccctctcagatgctgagaacgggcaacaactttgagttcagctacactttcgaggacgtgcctttccacagcagctacgcgcacagccagagtttggacaggctgatgaatcctctcatcgaccagtacctgtactacctgtcaagaacccagtctacgggaggcacagcgggaacccagcagttgctgttttctcaggccgggcctagcaacatgtcggctcaggccaaaaactggctgcctggaccctgctacagacagcagcgcgtctccacgacactgtcgcaaaacaacaacagcaactttgcctggactggtgccaccaagtatcatctgaacggcagagactctctggtgaatccgggcgtcgccatggcaacccacaaggacgacgaggaccgcttcttcccatccagcggcatcctcatgtttggcaagcagggagctggaaaagacaacgtggactatagcaacgtgatgctaaccagcgaggaagaaatcaagaccaccaaccccgtggccacagaacagtatggcgtggtggctgataacctacagcagcaaaacaccgctcctattgtgggggccgtcaacagccagggagccttacctggcatggtctggcagaaccgggacgtgtacctgcagggtcctatttgggccaagattcctcacacagatggcaactttcacccgtctcctttaatgggcggctttggacttaaacatccgcctcctcagatcctcatcaaaaacactcctgttcctgcggatcctccaacaacgttcaaccaggccaagctgaattctttcatcacgcagtacagcaccggacaagtcagcgtggagatcgagtgggagctgcagaaggagaacagcaagcgctggaacccagagattcagtatacttccaactactacaaatctacaaatgtggactttgctgttaatactgagggtgtttactctgagcctcgccccattggcactcgttacctcacccgtaatctg

SEQ ID NO: 920 - protein, 738 aa, Artificial Sequence
  Description of Artificial Sequence: Synthetic polypeptide
MAADGYLPDWLEDNLSEGIREWWDLKPGAPKPKANQQKQDDGRGLVLPGYKYLGPFNGLDKGEPVNAADAAALEHDKAYDQQLKAGDNPYLRYNHADAEFQERLQEDTSFGGNLGRAVFQAKKRVLEPLGLVEEGAKTAPGKKRPVEPSPQRSPDSSTGIGKKGQQPAKKRLNFGQTGDSESVPDPQPIGEPPAGPSGLGSGTMAAGGGAPMADNNEGADGVGSSSGNWHCDSTWLGDRVITTSTRTWALPTYNNHLYKQISNGTSGGSTNDNTYFGYSTPWGYFDFNRFHCHFSPRDWQRLINNNWGFRPKRLNFKLFNIQVKEVTQNEGTKTIANNLTSTIQVFTDSEYQLPYVLGSAHQGCLPPFPADVFMIPQYGYLTLNNGSQAVGRSSFYCLEYFPSQMLRTGNNFEFSYTFEDVPFHSSYAHSQSLDRLMNPLIDQYLYYLSRTQSTGGTAGTQQLLFSQAGPSNMSAQAKNWLPGPCYRQQRVSTTLSQNNNSNFAWTGATKYHLNGRDSLVNPGVAMATHKDDEERFFPSSGVLMFGKQGAGKDNVDYSSVMLTSEEEIKTTNPVATEQYGVVADNLQQQNTAPIVGAVNSQGALPGMVWQNRDVYLQGPIWAKIPHTDGNFHPSPLMGGFGLKHPPPQILIKNTPVPADPPTTFSQAKLASFITQYSTGQVSVEIEWELQKENSKRWNPEIQYTSNYYKSTNVDFAVNTEGTYSEPRPIGTRYLTRNL

SEQ ID NO: 921 - DNA, 2214 bp, Artificial Sequence
  Description of Artificial Sequence: Synthetic polynucleotide
atggctgccgatggttatcttccagattggctcgaggacaacctctctgagggcattcgcgagtggtgggacttgaaacctggagccccgaaacccaaagccaaccagcaaaagcaggacgacggccggggtctggtgcttcctggctacaagtacctcggacccttcaacggactcgacaagggggagcccgtcaacgcggcggacgcagcggccctcgagcacgacaaggcctacgaccagcagctcaaagcgggtgacaatccgtacctgcggtataaccacgccgacgccgagtttcaggagcgtctgcaagaagatacgtcttttgggggcaacctcgggcgagcagtcttccaggccaagaagcgggttctcgaacctctcggtctggttgaggaaggcgctaagacggctcctggaaagaagagaccggtagagccatcaccccagcgttctccagactcctctacgggcatcggcaagaaaggccagcagcccgcgaaaaagagactcaactttgggcagactggcgactcagagtcagtgcccgaccctcaaccaatcggagaaccccccgcaggcccctctggtctgggatctggtacaatggctgcaggcggtggcgctccaatggcagacaataacgaaggcgccgacggagtgggtagttcctcaggaaattggcattgcgattccacatggctgggcgacagagtcatcaccaccagcacccgaacctgggccctccccacctacaacaaccacctctacaagcaaatctccaacgggacttcgggaggaagcaccaacgacaacacctacttcggctacagcaccccctgggggtattttgactttaacagattccactgccacttctcaccacgtgactggcagcgactcatcaacaacaactggggattccggcccaagagactcaacttcaagctcttcaacatccaggtcaaggaggtcacgcagaatgaaggcaccaagaccatcgccaataaccttaccagcacgattcaggtctttacggactcggaataccagctcccgtacgtcctcggctctgcgcaccagggctgcctgcctccgttcccggcggacgtcttcatgattcctcagtacgggtacctgactctgaacaatggcagtcaggccgtgggccgttcctccttctactgcctggagtactttccttctcaaatgctgagaacgggcaacaactttgagttcagctacacgtttgaggacgtgccttttcacagcagctacgcgcacagccaaagcctggaccggctgatgaaccccctcatcgaccagtacctgtactacctgtctcggactcagtccacgggaggtaccgcaggaactcagcagttgctattttctcaggccgggcctagtaacatgtcggctcaggccaaaaactggctacccgggccctgctaccggcagcaacgcgtctccacgacactgtcgcaaaataacaacagcaactttgcctggaccggtgccaccaagtatcatctgaatggcagagactctctggtaaatcccggtgtcgctatggcaacccacaaggacgacgaagagcgattttttccgtccagcggagtcttaatgtttgggaaacagggagctggaaaagacaacgtggactatagcagcgttatgctaaccagtgaggaagaaattaaaaccaccaacccagtggccacagaacagtacggcgtggtggccgataacctgcaacagcaaaacaccgctcctattgtaggggccgtcaacagtcaaggagccttacctggcatggtctggcagaaccgggacgtgtacctgcagggtcctatctgggccaagattcctcacacggacggaaactttcatccctcgccgctgatgggaggctttggactgaaacacccgcctcctcagatcctgattaagaatacacctgttcccgcggatcctccaactaccttcagtcaagctaagctggcgtcgttcatcacgcagtacagcaccggacaggtcagcgtggaaattgaatgggagctgcagaaagaaaacagcaaacgctggaacccagagattcaatacacttccaactactacaaatctacaaatgtggactttgctgttaacacagaaggcacttattctgagcctcgccccatcggcacccgttacctcacccgtaatctg

SEQ ID NO: 922 - protein, 737 aa, Artificial Sequence
  Description of Artificial Sequence: Synthetic polypeptide
MAADGYLPDWLEDNLSEGIREWWDLKPGAPKPKANQQKQDDGRGLVLPGYKYLGPFNGLDKGEPVNAADAAALEHDKAYDQQLKAGDNPYLRYNHADAEFQERLQEDTSFGGNLGRAVFQAKKRVLEPLGLVEEGAKTAPGKKRPVEPSPQRSPDSSTGIGKKGQQPAKKRLNFGQTGDSESVPDPQPLGEPPAAPSGVGSGTMAAGGGAPMADNNEGADGVGNASGNWHCDSTWLGDRVITTSTRTWALPTYNNHLYKQISSQSAGSTNDNTYFGYSTPWGYFDFNRFHCHFSPRDWQRLINNNWGFRPKKLRFKLFNIQVKEVTTNDGVTTIANNLTSTVQVFSDSEYQLPYVLGSAHQGCLPPFPADVFMIPQYGYLTLNNGSQSVGRSSFYCLEYFPSQMLRTGNNFEFSYTFEDVPFHSSYAHSQSLDRLMNPLIDQYLYYLARTQSTTGGTAGNRELQFYQAGPSTMAEQAKNWLPGPCYRQQRVSKTLDQNNNSNFAWTGATKYHLNGRNSLVNPGVAMATHKDDEDRFFPSSGVLIFGKTGAANKTTLENVLMTNEEEIKTTNPVATEEYGVVSSNLQSANTAPQTQTVNSQGALPGMVWQNRDVYLQGPIWAKIPHTDGNFHPSPLMGGFGLKHPPPQILIKNTPVPANPPEVFTPAKFASFITQYSTGQVSVEIEWELQKENSKRWNPEIQYTSNYDKSTNVDFAVDSEGVYSEPRPIGTRYLTRNL

SEQ ID NO: 923 - DNA, 2211 bp, Artificial Sequence
  Description of Artificial Sequence: Synthetic polynucleotide
atggctgccgatggttatcttccagattggctcgaggacaacctctctgagggcattcgcgagtggtgggacctgaaacctggagccccgaaacccaaagccaaccagcaaaagcaggacgacggccggggtctggtgcttcctggctacaagtacctcggacccttcaacggactcgacaagggggagcccgtcaacgcggcggacgcagcggccctcgagcacgacaaggcctacgaccagcagctcaaagcgggtgacaatccgtacctgcggtataaccacgccgacgccgagtttcaggagcgtctgcaagaagatacgtcatttgggggcaacctcgggcgagcagtcttccaggccaagaagcgggttctcgaacctctcggtctggttgaggaaggcgctaagacggctcctggaaagaagagaccggtagagccgtcacctcagcgttcccccgactcctccacgggcatcggcaagaaaggccagcagcccgccaaaaagagactcaatttcggtcagactggcgactcagagtcagtccccgaccctcaacctctcggagaacctccagcagcgccctctggtgtgggatctggtacaatggctgcaggcggtggcgcaccaatggcagacaataacgaaggtgccgacggagtgggtaatgcctcaggaaattggcattgcgattccacatggctgggcgacagagtcattaccaccagcacccgaacctgggccctgcccacctacaacaaccacctctacaagcaaatctccagtcaaagtgcaggtagtaccaacgacaacacctacttcggctacagcaccccctgggggtattttgactttaacagattccactgccacttctcaccacgtgactggcagcgactcatcaacaacaactggggattccggcccaagaagctgcggttcaagctcttcaacatccaggtcaaggaggtcacgacgaatgacggcgttacgaccatcgctaataaccttaccagcacggttcaggtattctcggactcggaataccagctgccgtacgtcctcggctctgcgcaccagggctgcctgcctccgttcccggcggacgtcttcatgattcctcagtacggctacctgactctcaacaatggcagtcagtctgtgggacgttcctccttctactgcctggagtacttcccctctcagatgctgagaacgggcaacaactttgagttcagctacaccttcgaggacgtgcctttccacagcagctacgcacacagccagagcctggaccggctgatgaatcccctcatcgaccagtacttgtactacctggccagaacacagagtaccacaggaggcacagctggcaatcgggaactgcagttttaccaggccgggccttcaactatggccgaacaagccaagaattggttacctggaccttgctaccggcaacaaagagtctccaaaacgctggatcaaaacaacaacagcaactttgcttggactggtgccaccaaatatcacctgaacggcagaaactcgttggttaatcccggcgtcgccatggcaactcacaaggacgacgaggaccgctttttcccatccagcggagtcctgatttttggaaaaactggagcagctaacaaaactacattggaaaatgtgttaatgacaaatgaagaagaaattaaaactactaatcctgtagccacggaagaatacggggtagtcagcagcaacttacaatcggctaatactgcaccccagacacaaactgtcaacagccagggagccttacctggcatggtctggcagaaccgggacgtgtacctgcagggtcccatctgggccaagattcctcacacggatggcaactttcacccgtctcctttgatgggcggctttggacttaaacatccgcctcctcagatcctgatcaagaacactcccgttcccgctaatcctccggaggtgtttactcctgccaagtttgcttcgttcatcacacagtacagcaccggacaagtcagcgtggaaatcgagtgggagctgcagaaggaaaacagcaagcgctggaacccggagattcagtacacctccaactatgataagtcgactaatgtggactttgccgttgacagcgagggtgtttactctgagcctcgccctattggcactcgttacctcacccgtaatctg

SEQ ID NO: 924 - protein, 735 aa, Artificial Sequence
  Description of Artificial Sequence: Synthetic polypeptide
MAADGYLPDWLEDNLSEGIREWWDLKPGAPKPKANQQKQDDGRGLVLPGYKYLGPFNGLDKGEPVNAADAAALEHDKAYDQQLKAGDNPYLRYNHADAEFQERLQEDTSFGGNLGRAVFQAKKRVLEPLGLVEEGAKTAPGKKRPVEQSPQEPDSSSGIGKSGQQPAKKRLNFGQTGDSESVPDPQPLGEPPAAPSGVGSNTMASGGGAPMADNNEGADGVGNASGNWHCDSTWLGDRVITTSTRTWALPTYNNHLYKQISSQSGASNDNHYFGYSTPWGYFDFNRFHCHFSPRDWQRLINNNWGFRPKRLNFKLFNIQVKEVTTNDGTTTIANNLTSTVQVFTDSEYQLPYVLGSAHQGCLPPFPADVFMIPQYGYLTLNNGSQAVGRSSFYCLEYFPSQMLRTGNNFTFSYTFEDVPFHSSYAHSQSLDRLMNPLIDQYLYYLSRTQTTSGTAQNRELQFSQAGPSSMANQAKNWLPGPCYRQQRVSKTANDNNNSNFAWTGATKYHLNGRDSLVNPGPAMASHKDDEDKFFPMSGVLIFGKQGAGASNVDLDNVMITDEEEIKTTNPVATEQYGTVATNLQSSNTAPATGTVNSQGALPGMVWQDRDVYLQGPIWAKIPHTDGHFHPSPLMGGFGLKHPPPQILIKNTPVPANPPTTFSPAKFASFITQYSTGQVSVEIEWELQKENSKRWNPEIQYTSNYNKSANVDFTVDTNGVYSEPRPIGTRYLTRNL

SEQ ID NO: 925 - DNA, 2205 bp, Artificial Sequence
  Description of Artificial Sequence: Synthetic polynucleotide
atggctgccgatggttatcttccagattggctcgaggacaacctctctgagggcattcgcgagtggtgggacttgaaacctggagccccgaaacccaaagccaaccagcaaaagcaggacgacggccggggtctggtgcttcctggctacaagtacctcggacccttcaacggactcgacaagggggagcccgtcaacgcggcggatgcagcggccctcgagcacgacaaggcctacgaccagcagctcaaagcgggtgacaatccgtacctgcggtataaccacgccgacgccgagtttcaggagcgtctgcaagaagatacgtcttttgggggcaacctcgggcgagcagtcttccaggccaagaagagggttctcgaacctcttggtctggttgaggaaggtgctaagacggctcctggaaagaaacgtccggtagagcagtcgccacaagagccagactcctcctcgggcattggcaagtcaggccagcagcccgctaaaaagagactcaattttggtcagactggcgactcagagtcagtccccgacccacaacctctcggagaacctccagcagccccctctggtgtgggatctaatacaatggcttcaggcggtggcgcaccaatggcagacaataacgaaggcgccgacggagtgggtaatgcctcaggaaattggcattgcgattccacatggctgggcgacagagtcatcaccaccagcacccgaacatgggccttgcccacctataacaaccacctctacaagcaaatctccagtcaatcaggggccagcaacgacaaccactacttcggctacagcaccccctgggggtattttgatttcaacagattccactgccatttctcaccacgtgactggcagcgactcatcaacaacaattggggattccggcccaagagactcaacttcaagctcttcaacatccaagtcaaggaggtcacgacgaatgatggcaccacgaccatcgctaataaccttaccagcacggttcaagtcttcacggactcggagtaccagttgccgtacgtcctcggctctgcgcaccagggctgcctccctccgttcccggcggacgtgttcatgattccgcagtacggctacctaacgctcaacaatggcagccaggcagtgggacggtcatccttttactgcctggaatatttcccatcgcagatgctgagaacgggcaataactttaccttcagctacaccttcgaggacgtgcctttccacagcagctacgcgcacagccagagcctggaccggctgatgaatcctctcatcgaccagtacctgtattacctgagcagaactcagactacgtccggaactgcccaaaacagggagttgcagtttagccaggcgggtccatctagcatggctaatcaggccaaaaactggctacctggaccctgttaccggcagcagcgcgtttctaaaacagcaaatgacaacaacaacagcaactttgcctggactggtgctacaaaatatcaccttaatgggcgtgattctttagtcaaccctggccctgctatggcctcacacaaagacgacgaagacaagttctttcccatgagcggtgtcttgatttttggaaagcagggcgccggagcttcaaacgttgatttggacaatgtcatgatcacagacgaagaggaaatcaaaaccactaaccccgtggccaccgaacaatatgggactgtggcaaccaatctccagagcagcaacacagcccctgcgaccggaactgtgaattctcagggagccttacctggaatggtgtggcaagacagagacgtatacctgcagggtcctatttgggccaaaattcctcacacggatggacactttcacccgtctcctctcatgggcggctttggacttaagcacccgcctcctcagatcctcatcaaaaacacgcctgttcctgcgaatcctccgacaacgttttcgcctgcaaagtttgcttcattcatcacccagtattccacaggacaagtgagcgtggagattgaatgggagctgcagaaagaaaacagcaaacgctggaatcccgaaatacagtatacatctaactataataaatctgccaacgttgatttcactgtggacaccaatggagtttatagtgagcctcgccccattggcacccgttacctcacccgtaacctg

SEQ ID NO: 926 - protein, 735 aa, Artificial Sequence
  Description of Artificial Sequence: Synthetic polypeptide
MAADGYLPDWLEDNLSEGIREWWDLKPGAPQPKANQQHQDDGRGLVLPGYKYLGPFNGLDKGEPVNEADAAALEHDKAYDQQLKAGDNPYLKYNHADAEFQERLQEDTSFGGNLGRAVFQAKKRVLEPLGLVEEAAKTAPGKKRPVEQSPQEPDSSSGIGKSGQQPARKRLNFGQTGDSESVPDPQPLGEPPAAPSGVGSNTMASGGGAPMADNNEGADGVGNSSGNWHCDSTWLGDRVITTSTRTWALPTYNNHLYKQISSQSGASNDNHYFGYSTPWGYFDFNRFHCHFSPRDWQRLINNNWGFRPKKLNFKLFNIQVKEVTQNDGTTTIANNLTSTVQVFTDSEYQLPYVLGSAHQGCLPPFPADVFMIPQYGYLTLNNGSQAVGRSSFYCLEYFPSQMLRTGNNFTFSYTFEDVPFHSSYAHSQSLDRLMNPLIDQYLYYLSRTQTTSGTTQQSRLQFSQAGPSSMAQQAKNWLPGPCYRQQRVSKTANDNNNSNFAWTGATKYHLNGRDSLVNPGPAMASHKDDEEKFFPMHGVLIFGKQGTGASNVDLDNVMITDEEEIRTTNPVATEQYGTVATNLQSSNTAPATGTVNSQGALPGMVWQDRDVYLQGPIWAKIPHTDGHFHPSPLMGGFGLKHPPPQILIKNTPVPANPPTTFSPAKFASFITQYSTGQVSVEIEWELQKENSKRWNPEIQYTSNYNKSVNVDFTVDTNGVYSEPRPIGTRYLTRNL

SEQ ID NO: 927 - DNA, 2205 bp, Artificial Sequence
  Description of Artificial Sequence: Synthetic polynucleotide
atggctgctgacggttatcttccagattggctcgaggacaacctttctgaaggcattcgtgagtggtgggatctgaaacctggagcccctcaacccaaagcgaaccaacaacaccaggacgacggtcggggtcttgtgcttccgggttacaaatacctcggaccctttaacggactcgacaaaggagagccggtcaacgaggcggacgcggcagccctcgaacacgacaaagcttacgaccagcagctcaaggccggtgacaacccgtacctcaagtacaaccacgccgacgccgagtttcaggagcgtcttcaagaagatacgtcttttgggggcaaccttggcagagcagtcttccaggccaaaaagagggtccttgagcctcttggtctggttgaggaagcagctaaaacggctcctggaaagaagaggcctgtagaacagtctcctcaggaaccggactcatcatctggtattggcaaatcgggccaacagcctgccagaaaaagactaaatttcggtcagactggagactcagagtcagtcccagaccctcaacctctcggagaaccaccagcagccccctcaggtgtgggatctaatacaatggcttcaggcggtggcgcaccaatggcagacaataacgagggtgccgatggagtgggtaattcctcaggaaattggcattgcgattccacatggctgggcgacagagtcatcaccaccagcaccagaacctgggccctgcccacttacaacaaccatctctacaagcaaatctccagccaatcaggagcttcaaacgacaaccactactttggctacagcaccccttgggggtattttgactttaacagattccactgccacttctcaccacgtgactggcagcgactcattaacaacaactggggattccggcccaagaaactcaacttcaagctcttcaacatccaagttaaagaggtcacgcagaacgatggcacgacgactattgccaataaccttaccagcacggttcaagtgtttacggactcggagtatcagctcccgtacgtgctcgggtcggcgcaccaaggctgtctcccgccgtttccagcggacgtcttcatgatccctcagtatggatacctcaccctgaacaacggaagtcaagcggtgggacgctcatccttttactgcctggagtacttcccttcgcagatgctaaggactggaaataacttcacattcagctataccttcgaggatgtaccttttcacagcagctacgctcacagccagagtttggatcgcttgatgaatcctcttattgatcagtatctgtactacctgagcagaacgcaaacaacctctggaacaacccaacaatcacggctgcaatttagccaggctgggccttcgtctatggctcagcaggccaaaaattggctacctgggccctgctaccggcaacagagagtttcaaagactgctaacgacaacaacaacagtaactttgcttggacaggggccaccaaatatcatctcaatggccgcgactcgctggtgaatccaggaccagctatggccagtcacaaggacgatgaagaaaaatttttccctatgcacggcgttctaatatttggcaaacaagggacaggggcaagtaacgtagatttagataatgtaatgattacggatgaagaagagattcgtaccaccaatcctgtggcaacagagcagtatggaactgtggcaactaacttgcagagctcaaatacagctcccgcgactggaactgtcaatagtcagggggccttacctggcatggtgtggcaagatcgtgacgtgtaccttcaaggacctatctgggcaaagattcctcacacggatggacactttcatccttctcctctgatgggaggctttggactgaaacatccgcctcctcaaatcttgatcaaaaatactccggtaccggcaaatcctccgacgactttcagcccggccaagtttgcttcatttatcactcagtactccactggacaggtcagcgtggaaattgagtgggagctacagaaagaaaacagcaaacgttggaatccagagattcagtacacttccaactacaacaagtctgttaatgtggactttactgtagacactaatggtgtttatagtgaacctcgccctattggaacccggtatctcacacgaaacttg

SEQ ID NO: 928 - protein, 736 aa, Artificial Sequence
  Description of Artificial Sequence: Synthetic polypeptide
MAADGYLPDWLEDNLSEGIREWWDLKPGAPKPKANQQKQDDGRGLVLPGYKYLGPFNGLDKGEPVNAADAAALEHDKAYDQQLKAGDNPYLRYNHADAEFQERLQEDTSFGGNLGRAVFQAKKRVLEPLGLVEEGAKTAPGKKRPVEQSPQEPDSSSGIGKKGQQPARKRLNFGQTGDSESVPDPQPLGEPPAAPSGVGSNTMAAGGGAPMADNNEGADGVGNASGNWHCDSTWLGDRVITTSTRTWALPTYNNHLYKQISSQSGGSTNDNTYFGYSTPWGYFDFNRFHCHFSPRDWQRLINNNWGFRPKRLNFKLFNIQVKEVTTNDGTTTIANNLTSTVQVFTDSEYQLPYVLGSAHQGCLPPFPADVFMIPQYGYLTLNNGSQAVGRSSFYCLEYFPSQMLRTGNNFEFSYTFEDVPFHSSYAHSQSLDRLMNPLIDQYLYYLSRTQTTSGTAGNRTLQFSQAGPSSMANQAKNWLPGPCYRQQRVSKTANQNNNSNFAWTGATKYHLNGRDSLVNPGPAMATHKDDEDKFFPMSGVLIFGKQGAGNSNVDLDNVMITNEEEIKTTNPVATEQYGTVATNLQSANTAPATGTVNSQGALPGMVWQDRDVYLQGPIWAKIPHTDGHFHPSPLMGGFGLKHPPPQILIKNTPVPANPPTTFSPAKFASFITQYSTGQVSVEIEWELQKENSKRWNPEIQYTSNYNKSTNVDFAVDTNGVYSEPRPIGTRYLTRNL

SEQ ID NO: 929 - protein, 736 aa, Artificial Sequence
  Description of Artificial Sequence: Synthetic polypeptide
MAADGYLPDWLEDNLSEGIREWWDLKPGAPKPKANQQKQDDGRGLVLPGYKYLGPFNGLDKGEPVNAADAAALEHDKAYDQQLKAGDNPYLRYNHADAEFQERLQEDTSFGGNLGRAVFQAKKRVLEPLGLVEEGAKTAPGKKRPVEQSPQEPDSSSGIGKKGQQPAKKRLNFGQTGDSESVPDPQPLGEPPAAPSGVGSNTMASGGGAPMADNNEGADGVGNASGNWHCDSTWLGDRVITTSTRTWALPTYNNHLYKQISSQSGASTNDNTYFGYSTPWGYFDFNRFHCHFSPRDWQRLINNNWGFRPKRLNFKLFNIQVKEVTTNDGTTTIANNLTSTVQVFTDSEYQLPYVLGSAHQGCLPPFPADVFMIPQYGYLTLNNGSQAVGRSSFYCLEYFPSQMLRTGNNFQFSYTFEDVPFHSSYAHSQSLDRLMNPLIDQYLYYLSRTQTTSGTAGNRELQFSQAGPSSMANQAKNWLPGPCYRQQRVSKTTNQNNNSNFAWTGATKYHLNGRDSLVNPGPAMATHKDDEDKFFPMSGVLIFGKQGAGNSNVDLDNVMITNEEEIKTTNPVATEEYGTVATNLQSANTAPATGTVNSQGALPGMVWQNRDVYLQGPIWAKIPHTDGHFHPSPLMGGFGLKHPPPQILIKNTPVPANPPTTFSPAKFASFITQYSTGQVSVEIEWELQKENSKRWNPEIQYTSNYNKSTNVDFAVDTNGVYSEPRPIGTRYLTRNL

SEQ ID NO: 930 - protein, 736 aa, Artificial Sequence
  Description of Artificial Sequence: Synthetic polypeptide
MAADGYLPDWLEDNLSEGIREWWDLKPGAPKPKANQQKQDDGRGLVLPGYKYLGPFNGLDKGEPVNAADAAALEHDKAYDQQLKAGDNPYLRYNHADAEFQERLQEDTSFGGNLGRAVFQAKKRVLEPLGLVEEGAKTAPGKKRPVEQSPQEPDSSSGIGKKGQQPARKRLNFGQTGDSESVPDPQPLGEPPAAPSGVGSNTMAAGGGAPMADNNEGADGVGNASGNWHCDSTWLGDRVITTSTRTWALPTYNNHLYKQISSQSGGSTNDNTYFGYSTPWGYFDFNRFHCHFSPRDWQRLINNNWGFRPKRLNFKLFNIQVKEVTTNDGTTTIANNLTSTVQVFTDSEYQLPYVLGSAHQGCLPPFPADVFMIPQYGYLTLNNGSQAVGRSSFYCLEYFPSQMLRTGNNFEFSYTFEDVPFHSSYAHSQSLDRLMNPLIDQYLYYLSRTQTTSGTAGNRELQFSQAGPSSMANQAKNWLPGPCYRQQRVSKTTNQNNNSNFAWTGATKYHLNGRDSLVNPGPAMATHKDDEDKFFPMSGVLIFGKQGAGNSNVDLDNVMITSEEEIKTTNPVATEEYGTVATNLQSSNTAPATGTVNSQGALPGMVWQERDVYLQGPIWAKIPHTDGHFHPSPLMGGFGLKHPPPQILIKNTPVPANPPTTFSPAKFASFITQYSTGQVSVEIEWELQKENSKRWNPEIQYTSNYNKSTNVDFAVDTNGVYSEPRPIGTRYLTRNL

SEQ ID NO: 931 - protein, 736 aa, Artificial Sequence
  Description of Artificial Sequence: Synthetic polypeptide
MAADGYLPDWLEDNLSEGIREWWDLKPGAPKPKANQQKQDDGRGLVLPGYKYLGPFNGLDKGEPVNAADAAALEHDKAYDQQLKAGDNPYLRYNHADAEFQERLQEDTSFGGNLGRAVFQAKKRVLEPLGLVEEGAKTAPGKKRPVEQSPQEPDSSSGIGKKGQQPARKRLNFGQTGDSESVPDPQPLGEPPAAPSGVGSNTMASGGGAPMADNNEGADGVGNASGNWHCDSTWLGDRVITTSTRTWALPTYNNHLYKQISSQSGGSTNDNTYFGYSTPWGYFDFNRFHCHFSPRDWQRLINNNWGFRPKKLNFKLFNIQVKEVTTNDGTTTIANNLTSTVQVFTDSEYQLPYVLGSAHQGCLPPFPADVFMIPQYGYLTLNNGSQAVGRSSFYCLEYFPSQMLRTGNNFEFSYTFEDVPFHSSYAHSQSLDRLMNPLIDQYLYYLSRTQTTSGTAGNRELQFSQAGPSSMANQAKNWLPGPCYRQQRVSKTTNQNNNSNFAWTGATKYHLNGRDSLVNPGPAMATHKDDEDKFFPMSGVLIFGKQGAGNSNVDLDNVMITSEEEIKTTNPVATEEYGTVATNLQSANTAPATGTVNSQGALPGMVWQDRDVYLQGPIWAKIPHTDGHFHPSPLMGGFGLKHPPPQILIKNTPVPANPPTTFSPAKFASFITQYSTGQVSVEIEWELQKENSKRWNPEIQYTSNYNKSTNVDFAVDTNGVYSEPRPIGTRYLTRNL

SEQ ID NO: 932 - protein, 736 aa, Artificial Sequence
  Description of Artificial Sequence: Synthetic polypeptide
MAADGYLPDWLEDNLSEGIREWWDLKPGAPKPKANQQKQDDGRGLVLPGYKYLGPFNGLDKGEPVNAADAAALEHDKAYDQQLKAGDNPYLRYNHADAEFQERLQEDTSFGGNLGRAVFQAKKRVLEPLGLVEEGAKTAPGKKRPVEQSPQEPDSSSGIGKKGQQPARKRLNFGQTGDSESVPDPQPLGEPPAAPSGVGSNTMAAGGGAPMADNNEGADGVGNASGNWHCDSTWLGDRVITTSTRTWALPTYNNHLYKQISSQSGGSTNDNTYFGYSTPWGYFDFNRFHCHFSPRDWQRLINNNWGFRPKKLNFKLFNIQVKEVTTNDGTTTIANNLTSTVQVFTDSEYQLPYVLGSAHQGCLPPFPADVFMIPQYGYLTLNNGSQAVGRSSFYCLEYFPSQMLRTGNNFQFSYTFEDVPFHSSYAHSQSLDRLMNPLIDQYLYYLSRTQTTSGTAGNRTLQFSQAGPSSMANQAKNWLPGPCYRQQRVSKTTNQNNNSNFAWTGATKYHLNGRDSLVNPGPAMATHKDDEDKFFPMSGVLIFGKQGAGNSNVDLDNVMITNEEEIKTTNPVATEEYGTVATNLQSANTAPATGTVNSQGALPGMVWQDRDVYLQGPIWAKIPHTDGHFHPSPLMGGFGLKHPPPQILIKNTPVPANPPTTFSPAKFASFITQYSTGQVSVEIEWELQKENSKRWNPEIQYTSNYNKSTNVDFAVDTNGVYSEPRPIGTRYLTRNL

SEQ ID NO: 933 - protein, 736 aa, Artificial Sequence
  Description of Artificial Sequence: Synthetic polypeptide
MAADGYLPDWLEDNLSEGIREWWDLKPGAPKPKANQQKQDDGRGLVLPGYKYLGPFNGLDKGEPVNAADAAALEHDKAYDQQLKAGDNPYLRYNHADAEFQERLQEDTSFGGNLGRAVFQAKKRVLEPLGLVEEGAKTAPGKKRPVEQSPQEPDSSSGIGKKGQQPAKKRLNFGQTGDSESVPDPQPLGEPPAAPSGVGSNTMAAGGGAPMADNNEGADGVGNASGNWHCDSTWLGDRVITTSTRTWALPTYNNHLYKQISSQSGGSTNDNTYFGYSTPWGYFDFNRFHCHFSPRDWQRLINNNWGFRPKKLNFKLFNIQVKEVTTNDGTTTIANNLTSTVQVFTDSEYQLPYVLGSAHQGCLPPFPADVFMIPQYGYLTLNNGSQAVGRSSFYCLEYFPSQMLRTGNNFEFSYTFEDVPFHSSYAHSQSLDRLMNPLIDQYLYYLSRTQTTSGTAGNRTLQFSQAGPSSMANQAKNWLPGPCYRQQRVSKTANQNNNSNFAWTGATKYHLNGRDSLVNPGPAMATHKDDEDKFFPMSGVLIFGKQGAGNSNVDLDNVMITSEEEIKTTNPVATEQYGTVATNLQSSNTAPATGTVNSQGALPGMVWQNRDVYLQGPIWAKIPHTDGHFHPSPLMGGFGLKHPPPQILIKNTPVPANPPTTFSPAKFASFITQYSTGQVSVEIEWELQKENSKRWNPEIQYTSNYNKSTNVDFAVDTNGVYSEPRPIGTRYLTRNL

SEQ ID NO: 934 - protein, 736 aa, Artificial Sequence
  Description of Artificial Sequence: Synthetic polypeptide
MAADGYLPDWLEDNLSEGIREWWDLKPGAPKPKANQQKQDDGRGLVLPGYKYLGPFNGLDKGEPVNAADAAALEHDKAYDQQLKAGDNPYLRYNHADAEFQERLQEDTSFGGNLGRAVFQAKKRVLEPLGLVEEGAKTAPGKKRPVEQSPQEPDSSSGIGKKGQQPAKKRLNFGQTGDSESVPDPQPLGEPPAAPSGVGSNTMASGGGAPMADNNEGADGVGNASGNWHCDSTWLGDRVITTSTRTWALPTYNNHLYKQISSQSGGSTNDNTYFGYSTPWGYFDFNRFHCHFSPRDWQRLINNNWGFRPKKLNFKLFNIQVKEVTTNDGTTTIANNLTSTVQVFTDSEYQLPYVLGSAHQGCLPPFPADVFMIPQYGYLTLNNGSQAVGRSSFYCLEYFPSQMLRTGNNFEFSYTFEDVPFHSSYAHSQSLDRLMNPLIDQYLYYLSRTQTTSGTAGNRTLQFSQAGPSSMANQAKNWLPGPCYRQQRVSKTANQNNNSNFAWTGATKYHLNGRDSLVNPGPAMATHKDDEDKFFPMSGVLIFGKQGAGNSNVDLDNVMITSEEEIKTTNPVATEEYGTVATNLQSSNTAPATGTVNSQGALPGMVWQNRDVYLQGPIWAKIPHTDGHFHPSPLMGGFGLKHPPPQILIKNTPVPANPPTTFSPAKFASFITQYSTGQVSVEIEWELQKENSKRWNPEIQYTSNYNKSTNVDFAVDTNGVYSEPRPIGTRYLTRNL

SEQ ID NO: 935 - protein, 736 aa, Artificial Sequence
  Description of Artificial Sequence: Synthetic polypeptide
MAADGYLPDWLEDNLSEGIREWWDLKPGAPKPKANQQKQDDGRGLVLPGYKYLGPFNGLDKGEPVNAADAAALEHDKAYDQQLKAGDNPYLRYNHADAEFQERLQEDTSFGGNLGRAVFQAKKRVLEPLGLVEEGAKTAPGKKRPVEQSPQEPDSSSGIGKKGQQPAKKRLNFGQTGDSESVPDPQPLGEPPAAPSGVGSNTMASGGGAPMADNNEGADGVGNASGNWHCDSTWLGDRVITTSTRTWALPTYNNHLYKQISSQSGGSTNDNTYFGYSTPWGYFDFNRFHCHFSPRDWQRLINNNWGFRPKKLNFKLFNIQVKEVTTNDGTTTIANNLTSTVQVFTDSEYQLPYVLGSAHQGCLPPFPADVFMIPQYGYLTLNNGSQAVGRSSFYCLEYFPSQMLRTGNNFQFSYTFEDVPFHSSYAHSQSLDRLMNPLIDQYLYYLSRTQTTSGTAGNRELQFSQAGPSSMANQAKNWLPGPCYRQQRVSKTTNQNNNSNFAWTGATKYHLNGRDSLVNPGPAMATHKDDEDKFFPMSGVLIFGKQGAGNSNVDLDNVMITNEEEIKTTNPVATEQYGTVATNLQSANTAPATGTVNSQGALPGMVWQDRDVYLQGPIWAKIPHTDGHFHPSPLMGGFGLKHPPPQILIKNTPVPANPPTTFSPAKFASFITQYSTGQVSVEIEWELQKENSKRWNPEIQYTSNYNKSTNVDFAVDTNGVYSEPRPIGTRYLTRNL

SEQ ID NO: 936 - DNA, 2211 bp, Artificial Sequence
  Description of Artificial Sequence: Synthetic polynucleotide
atggctgccgatggttatcttccagattggctcgaggacaacctctctgagggcattcgcgagtggtgggacttgaaacctggagccccgaaacccaaagccaaccagcaaaagcaggacgacggccggggtctggtgcttcctggctacaagtacctcggacccttcaacggactcgacaagggggagcccgtcaacgcggcggacgcagcggccctcgagcacgacaaggcctacgaccagcagctcaaagcgggtgacaatccgtacctgcggtataaccacgccgacgccgagtttcaggagcgtctgcaagaagatacgtcttttgggggcaacctcgggcgagcagtcttccaggccaagaagcgggttctcgaacctctcggtctggttgaggaaggcgctaagacggctcctggaaagaagagaccggtagagcaatcaccccaggaaccagactcctcttcgggcatcggcaagaaaggccagcagcccgcgaaaaagagactcaactttgggcagacaggcgactcagagtcagtgcccgaccctcaaccactcggagaaccccccgcagccccctctggtgtgggatctaatacaatggctgcaggcggtggcgctccaatggcagacaataacgaaggcgccgacggagtgggtaacgcctcaggaaattggcattgcgattccacatggctgggcgacagagtcatcaccaccagcacccgaacctgggccctccccacctacaacaaccacctctacaagcaaatctccagccaatcgggagcaagcaccaacgacaacacctacttcggctacagcaccccctgggggtattttgactttaacagattccactgccacttctcaccacgtgactggcagcgactcatcaacaacaactggggattccggcccaagagactcaacttcaagctcttcaacatccaggtcaaggaggtcacgacgaatgatggcaccacgaccatcgccaataaccttaccagcacggttcaggtctttacggactcggaataccagctcccgtacgtcctcggctctgcgcaccagggctgcctgcctccgttcccggcggacgtcttcatgattcctcagtacgggtacctgactctgaacaatggcagtcaggccgtgggccgttcctccttctactgcctggagtactttccttctcaaatgctgagaacgggcaacaactttgagttcagctacacgtttgaggacgtgccttttcacagcagctacgcgcacagccaaagcctggaccggctgatgaaccccctcatcgaccagtacctgtactacctgtctcggactcagaccacgagtggtaccgcaggaaatcggacgttgcaattttctcaggccgggcctagtagcatggcgaatcaggccaaaaactggctacccgggccctgctaccggcagcaacgcgtctccaagacagcgaatcaaaataacaacagcaactttgcctggaccggtgccaccaagtatcatctgaatggcagagactctctggtaaatcccggtcccgctatggcaacccacaaggacgacgaagacaaattttttccgatgagcggagtcttaatatttgggaaacagggagctggaaatagcaacgtggaccttgacaacgttatgataaccagtgaggaagaaattaaaaccaccaacccagtggccacagaacagtacggcacggtggccactaacctgcaatcgtcaaacaccgctcctgctacagggaccgtcaacagtcaaggagccttacctggcatggtctggcagaaccgggacgtgtacctgcagggtcctatctgggccaagattcctcacacggacggacactttcatccctcgccgctgatgggaggctttggactgaaacacccgcctcctcagatcctgattaagaatacacctgttcccgcgaatcctccaactaccttcagtccagctaagtttgcgtcgttcatcacgcagtacagcaccggacaggtcagcgtggaaattgaatgggagctgcagaaagaaaacagcaaacgctggaacccagagattcaatacacttccaactacaacaaatctacaaatgtggactttgctgttgacacaaatggcgtttattctgagcctcgccccatcggcacccgttacctcacccgtaatctgtaa

SEQ ID NO: 937 - protein, 738 aa, Artificial Sequence; identical to SEQ ID NO: 16
  Description of Artificial Sequence: Synthetic polypeptide

SEQ ID NO: 938 - DNA, 2211 bp, Artificial Sequence
  Description of Artificial Sequence: Synthetic polynucleotide
atggctgccgatggttatcttccagattggctcgaggacaacctctctgagggcattcgcgagtggtgggacttgaaacctggagccccgaaacccaaagccaaccagcaaaagcaggacgacggccggggtctggtgcttcctggctacaagtacctcggacccttcaacggactcgacaagggggagcccgtcaacgcggcggacgcagcggccctcgagcacgacaaggcctacgaccagcagctcaaagcgggtgacaatccgtacctgcggtataaccacgccgacgccgagtttcaggagcgtctgcaagaagatacgtcttttgggggcaacctcgggcgagcagtcttccaggccaagaagcgggttctcgaaccttttggtctggttgaggaaggcgctaagacggctcctggaaagaaacgtccggtagagcagtcgccacaagagccagactcctcctcgggcatcggcaagacaggccagcagcccgctaaaaagagactcaattttggtcagactggcgactcagagtcagtccccgacccacaacctctcggagaacctccagcaacccccgctgctgtgggacctactacaatggcttcaggcggtggcgcaccaatggcagacaataacgaaggcgccgacggagtgggtaatgcctcaggaaattggcattgcgattccacatggctgggcgacagagtcatcaccaccagcacccgcacctgggccttgcccacctacaataaccacctctacaagcaaatctccagtgcttcaacgggggccagcaacgacaaccactacttcggctacagcaccccctgggggtattttgatttcaacagattccactgccacttttcaccgcgtgactggcagcgactcatcaacaacaattggggattccggcccaagagactcaacttcaagctcttcaacatccaagtcaaggaggtcacgacgagtgatggcgtcacaaccatcgctaataaccttaccagcacggttcaagtcttctcggactcggagtaccagcttccgtacgtcctcggctctgcgcaccagggctgcctccctccgttcccggcggacgtgttcatgattccgcaatacggctacctgacgctcaacaatggcagccaagccgtgggacgttcatccttttactgcctggaatatttcccttctcagatgctgagaacgggcaacaactttaccttcagctacacctttgaggaagtgcctttccacagcagctacgcgcacagccagagcctggaccggctgatgaatcctctcatcgaccaatacctgtattacctgaacagaactcaaaatcagtccggaagtgcccaaaacaaggacttgctgtttagccgtgggtctccagctggcatgtctgttcagcccaaaaactggctacctggaccctgttatcggcagcagcgcgtttctaaaacaaaaacaggcaacaacaacagcaattttacctggactggtgcttcaaaatataacctcaatgggcatgaatccatcatcaaccctggcactgctatggcctcacacaaagacgacgaagacaagttctttcccatgagcggtgtcatgatttttggaaaagagagcgccggagcttcaaacactgcattggacaatgtcatgattacagacgaagaggaaattaaagccactaaccctgtggccaccgaaagatttgggaccgtggcagtcaatttccagagcagcagcacacaccctgcgaccggagatgtgcatgttatgggagcattacctggcatggtgtggcaagatagagacgtgtacctgcagggtcccatctgggccaaaattcctcacacagatggacactttcacccgtctcctcttatgggcggctttggactcaagcacccgcctcctcagatcctcatcaaaaacacgcctgttcctgcgaatcctccggcggagttttcagctacaaagtttgcttcattcatcacccaatactccacaggacaagtgagtgtggaaattgaatgggagctgcagaaagaaaacagcaagcgctggaatcccgaagtgcagtacacatccaattatgcaaaatctgccaacgttgattttaccgtggacaacaatggactttatactgagcctcgccccattggcacccgttaccttacccgtcccctgtaa

SEQ ID NO: 939 - DNA, 2211 bp, Artificial Sequence; identical to SEQ ID NO: 938
  Description of Artificial Sequence: Synthetic polynucleotide

SEQ ID NO: 940 - DNA, 2202 bp, Artificial Sequence
  Description of Artificial Sequence: Synthetic polynucleotide
atgactgacggttaccttccagattggctagaggacaacctctctgaaggcgttcgagagtggtgggcgctgcaacctggagcccctaaacccaaggcaaatcaacaacatcaggacaacgctcggggtcttgtgcttccgggttacaaatacctcggacccggcaacggacttgacaagggggaacccgtcaacgcagcggacgcggcagccctcgaacacgacaaggcctacgaccagcagctcaaggccggtgacaacccctacctcaagtacaaccacgccgacgccgagtttcaggagcgtcttcaagaagatacgtcttttgggggcaacctcggacgagcagtcttccaggccaaaaagaggatccttgagcctctgggtctggttgaggaagcggctaagacggctcctggaaaaaagagacctgtagagcaatctccagcagaaccggactcctcttcgggcatcggcaaatcaggccagcagcccgctagaaaaagactgaattttggtcagactggcgacacagagtcagtcccagaccctcaaccactcggacaacctcccgcagccccctctggtgtgggatctactacaatggcttcaggcggtggcgcaccaatggcagacaataacgagggtgccgatggagtgggtaattcctcaggaaattggcattgcgattcccaatggctgggcgacagagtcatcaccaccagcacccgcacctgggccctgcccacctacaacaatcacctctacaagcaaatctccagccaatcaggagccaccaacgacaaccactactttggctacagcaccccctgggggtattttgacttcaacagattccactgccacttttcaccacgtgactggcaaagactcatcaacaacaactggggattccgacccaagagactcaacttcaagctctttaacattcaagtcaaagaggtcacgcagaatgacggtacgacgacgattgccaataaccttaccagcacggttcaggtgtttactgactccgagtaccagctcccgtacgtcctcggctcggcgcatcagggatgcctcccgccgttcccagcagacgtcttcatggtcccacagtatggatacctcaccctgaacaacgggagtcaggcggtaggacgctcttccttttactgcctggagtactttccttctcagatgctgcgtactggaaacaactttcagtttagctacacttttgaagacgtgcctttccacagcagctacgctcacagccaaagtctggaccgtctcatgaatcctctgatcgaccagtacctgtactatctgaacaggacacaaacagccagtggaactcagcagtctcggctactgtttagccaagctggacccaccagtatgtctcttcaagctaaaaactggctgcctggaccttgctacagacagcagcgtctgtcaaagcaggcaaacgacaacaacaacagcaactttccctggactggtgccaccaaatatcatctgaatggccgggactcattggtgaacccgggccctgctatggccagtcacaaggatgacaaagaaaagtttttccccatgcatggaaccctgatatttggtaaagaaggaacaaatgccaacaacgcggatttggaaaatgtcatgattacagatgaagaagaaatccgcaccaccaatcccgtggctacggagcagtacgggactgtgtcaaataatttgcaaaactcaaacgctggtccaactactggaactgtcaatcaccaaggagcgttacctggtatggtgtggcaggatcgagacgtgtacctgcagggacccatttgggccaagattcctcacaccgatggacactttcatccttctccactgatgggaggttttgggctcaaacacccgcctcctcagatcatgatcaaaaacactcccgttccagccaatcctcccacaaactttagtgcggcaaagtttgcttccttcatcacacagtactccacggggcaggtcagcgtggagatcgagtgggagctgcagaaggagaacagcaaacgctggaatcccgaaattcagtacacttccaactacaacaaatctgttaatgtggactttactgtggacactaatggtgtgtattcagagcctcgccccattggcaccagatacctgactcgtaatctgtaa

SEQ ID NO: 941 - DNA, 2211 bp, Artificial Sequence
  Description of Artificial Sequence: Synthetic polynucleotide
atggctgccgatggttatcttccagattggctcgaggacaacctctctgagggcattcgcgagtggtgggacttgaaacctggagccccgaaacccaaagccaaccagcaaaagcaggacgacggccggggtctggtgcttcctggctacaagtacctcggacccttcaacggactcgacaagggggagcccgtcaacgcggcggacgcagcggccctcgagcacgacaaggcctacgaccagcagctcaaagcgggtgacaatccgtacctgcggtataaccacgccgacgccgagtttcaggagcgtctgcaagaagatacgtcttttgggggcaacctcgggcgagcagtcttccaggccaagaagcgggttctcgaaccttttggtctggttgaggaaggcgctaagacggctcctggaaagaaacgtccggtagagcagtcgccacaagagccagactcctcctcgggcatcggcaagacaggccagcagcccgctaaaaagagactcaattttggtcagactggcgactcagagtcagtccccgacccacaacctctcggagaacctccagcaacccccgctgctgtgggacctactacaatggcttcaggcggtggcgcaccaatggcagacaataacgaaggcgccgacggagtgggtaatgcctcaggaaattggcattgcgattccacatggctgggcgacagagtcatcaccaccagcacccgcacctgggccttgcccacctacaataaccacctctacaagcaaatctccagtgcttcaacgggggccagcaacgacaaccactacttcggctacagcaccccctgggggtattttgatttcaacagattccactgccacttttcaccacgtgactggcagcgactcatcaacaacaattggggattccggcccaagagactcaacttcaagctcttcaacatccaagtcaaggaggtcacgacgaatgatggcgtcacaaccatcgctaataaccttaccagcacggttcaagtcttctcggactcggagtaccagcttccgtacgtcctcggctctgcgcaccagggctgcctccctccgttcccggcggacgtgttcatgattccgcaatacggctacctgacgctcaacaatggcagccaagccgtgggacgttcatccttttactgcctggaatatttcccttctcagatgctgagaacgggcaacaactttaccttcagctacacctttgaggaagtgcctttccacagcagctacgcgcacagccagagcctggaccggctgatgaatcctctcatcgaccaatacctgtattacctgaacagaactcaaaatcagtccggaagtgcccaaaacaaggacttgctgtttagccgtgggtctccagctggcatgtctgttcagcccaaaaactggctacctggaccctgttatcggcagcagcgcgtttctaaaacaaaaacagacaacaacaacagcaattttacctggactggtgcttcaaaatataacctcaatgggcgtgaatccatcatcaaccctggcactgctatggcctcacacaaagacgacgaagacaagttctttcccatgagcggtgtcatgatttttggaaaagagagcgccggagcttcaaacactgcattggacaatgtcatgattacagacgaagaggaaattaaagccactaaccctgtggccaccgaaagatttgggaccgtggcagtcaatttccagagcagcagcacagaccctgcgaccggagatgtgcatgttatgggagcattacctggcatggtgtggcaagatagagacgtgtacctgcagggtcccatctgggccaaaattcctcacacagatggacactttcacccgtctcctcttatgggcggctttggactcaagcacccgcctcctcagatcctcatcaaaaacacgcctgttcctgcgaatcctccggcggagttttcagctacaaagtttgcttcattcatcacccaatactccacaggacaagtgagtgtggaaattgaatgggagctgcagaaagaaaacagcaagcgctggaatcccgaagtgcagtacacatccaattatgcaaaatctgccaacgttgattttaccgtggacaacaatggactttatactgagcctcgccccattggcacccgttaccttacccgtcccctgtaa

SEQ ID NO: 942 - DNA, 2211 bp, Artificial Sequence
  Description of Artificial Sequence: Synthetic polynucleotide
atggctgccgatggttatcttccagattggctcgaggacaacctctctgagggcattcgcaagtggtgggacttgaaacctggagccccgaaacccaaagccaaccagcaaaagcaggacgacggccggggtctggtgcttcctggctacaagtacctcggacccttcaacggactcgacaagggggagcccgtcaacgcggcggacgcagcggccctcgagcacgacaaggcctacgaccagcagctcaaagcgggtgacaatccgtacctgcggtataaccacgccgacgccgagtttcaggagcgtctgcaagaagatacgtcttttgggggcaacctcgggagagcagtcttccaggccaagaagcgggttctcgaaccttttggtctggttgaggaaggcgctaagacggctcctggaaagaaacgtccggtagagcagtcgccacaagagccagactcctcctcgggcatcggcaagacaggccagcagcccgctaaaaagagactcaattttggtcagactggcgactcagagtcagtccccgacccacaacctctcggagaacctccagcaacccccgctgctgtgggacctactacaatggcttcaggcggtggcgcaccaatggcagacaataacgaaggcgccgacggagtgggtaatgcctcaggaaattggcattgcgattccacatggctgggcgacagagtcatcaccaccagcacccgcacctgggccttgcccacctacaataaccacctctacaagcaaatctccagtgcttcaacgggggccagcaacgacaaccactacttcggctacagcaccccctgggggtattttgatttcaacagattccactgccacttttcaccacgtgactggcagcgactcatcaacaacaattggggattccggcccaagagactcaacttcaagctcttcaacatccaagtcaaggaggtcacgacgaatgatggcgtcacaaccatcgctaataaccttaccagcacggttcaagtcttctcggactcggagtaccagcttccgtacgtcctcggctctgcgcaccagggctgcctccctccgttcccggcggacgtgttcatgattccgcaatacggctacctgacgctcaacaatggcagccaagccgtgggacgttcatccttttactgcctggaatatttcccttctcagatgctgagaacgggcaacaactttaccttcagctacacctttgaggaagtgcctttccacagcagctacgcgcacagccagagcctggaccggctgatgaatcctctcatcgaccaatacctgtattacctgaacagaactcaaaatcagtccggaagtgcccaaaacaaggacttgctgtttagccgtgggtctccagctggcatgtctgttcagcccaaaaactggctacctggaccctgttatcggcagcagcgcgtttctaaaacaaaaacagacaacaacaacagcaattttacctggactggtgcttcaaaatataacctcaatgggcgtgaatccatcatcaaccctggcactgctatggcctcacacaaagacgacaaagacaagttctttcccatgagcggtgtcatgatttttggaaaagagagcgccggagcttcaaacactgcattggacaatgtcatgattacagacgaagaggaaattaaagccactaaccctgtggccaccgaaagatttgggaccgtggcagtcaatttccagagcagcagcacagaccctgcgaccggagatgtgcatgttatgggagcattacctggcatggtgtggcaagatagagacgtgtacctgcagggtcccatttgggccaaaattcctcacacagatggacactttcacccgtctcctcttatgggcggctttggactcaagcacccgcctcctcagatcctcatcaaaaacacacctgttcctgcgaatcctccggcggagttttcagctacaaagtttgcttcattcatcacccaatactccacaggacaagtgagtgtggaaattgaatgggagctgcagaaagaaaacagcaagcgctggaatcccgaagtgcagtacacatccaattatgcaaaatctgccaacgttgattttaccgtggacaacaatggactttatactgagcctcgccccattggcacccgttaccttacccgtcccctgtaa

SEQ ID NO: 943 - DNA, 2211 bp, Artificial Sequence
  Description of Artificial Sequence: Synthetic polynucleotide
atggctgccgatggttatcttccagattggctcgaggacaacctctctgagggcattcgcgagtggtgggacttgaaacctggagccccgaaacccaaagccaaccagcaaaagcaggacaacggccggggtctggtgcttcctggctacaagtacctcggacccttcaacggactcgacaagggggagcccgtcaacgcggcggacgcagcggccctcgagcacgacaaggcctacgaccagcagctcaaagcgggtgacaatccgtacctgcggtataaccacgccgacgccgagtttcaggagcgtctgcaagaagatacgtcttttgggggcaacctcgggcgagcagtcttccaggccaagaagcgggttctcgaaccttttggtctggttgaggaaggcgctaagacggctcctggaaagaaacgtccggtagagcagtcgccacaagagccagactcctcctcgggcatcggcaagacaggccagcagcccgctaaaaagagactcaattttggtcagactggcgactcagagtcagtccccgacccacaacctctcggagaacctccagcaacccccgctgctgtgggacctactacaatggcttcaggcggtggcgcaccaatggcagacaataacgaaggcgccgacggagtgggtaatgcctcaggaaattggcattgcgattccacatggctgggcgacagagtcatcaccaccagcacccgcacctgggccttgcccacctacaataaccacctctacaagcaaatctccagtgcttcaacgggggccagcaacgacaaccactacttcggctacagcaccccctgggggtattttgatttcaacagattccactgccacttttcaccacgtgactggcagcgactcatcaacaacaattggggattccggcccaagagactcaacttcaagctcttcaacatccaagtcaaggaggtcacgacgaatgatggcgtcacaaccatcgctaataaccttaccagcacggttcaagtcttctcggactcggagtaccagcttccgtacgtcctcggctctgcgcaccagggctgcctccctccgttcccggcggacgtgttcatgattccgcaatacggctacctgacgctcaacaatggcagccaagccgtgggacgttcatccttttactgcctggaatatttcccttctcagatgctgagaacgggcaacaactttaccttcagctacacctttgaggaagtgcctttccacagcagctacgcgcacagccagagcctggaccggctgatgaatcctctcatcgaccaatacctgtattacctgaacagaactcaaaatcagtccggaagtgcccaaaacaaggacttgctgtttagccgtgggtctccagctggcatgtctgttcagcccaaaaactggctacctggaccctgttatcggcagcagcgcgtttctaaaacaaaaacagacaacaacaacagcaattttacctggactggtgcttcaaaatataacctcaatgggcgtgaatccatcatcaaccctggcactgctatggcctcacacaaagacgacgaagacaagttctttcccatgagcggtgtcatgatttttggaaaagagagcgccggagcttcaaacactgcattggacaatgtcatgattacagacgaagaggaaattaaagccactaaccctgtggccaccgaaagatttgggaccgtggcagtcaatttccagagcagcagcacacaccctgcgaccggagatgtgcatgttatgggagcattacctggcatggtgtggcaagatagagacgtgtacctgcagggtcccatctgggccaaaattcctcacacagatggacactttcacccgtctcctcttatgggcggctttggactcaagcacccgcctcctcagatcctcatcaaaaacacgcctgttcctgcgaatcctccggcggagttttcagctacaaagtttgcttcattcatcacccaatactccacaggacaagtgagtgtggaaattgaatgggagctgcagaaagaaaacagcaagcgctggaatcccgaagtgcagtacacatccaattatgcaaaatctgccaacgttgattttaccgtggacaacaatggactttatactgagcctcgccccattggcacccgttaccttacccgtcccctgtaa

SEQ ID NO: 944 - DNA, 2211 bp, Artificial Sequence
  Description of Artificial Sequence: Synthetic polynucleotide
atggctgccgatggttatcttccagattggctcgaggacaacctctctgagggcattcgcgagtggtgggacttgaaacctggagccccgaaacccaaagccaaccagcaaaagcaggacgacggccggggtctggtgcttcctggctacaagtacctcggacccttcaacggactcgacaagggggagcccgtcaacgcggcggacgcagcggccctcgagcacgacaaggcctacgaccagcagctcaaagcgggtgacaatccgtacctgcggtataaccacgccgacgccgagtttcaggagcgtctgcaagaagatacgtcttttgggggcaacctcgggcgagcagtcttccaggccaaaaagcgggttctcgaaccttttggtctggttgaggaaggcgctaagacggctcctggaaagaaacgtccggtagagcagtcgccacaagagccagactcctcctcgggcatcggcaagacaggccagcagcccgctaaaaagagactcaattttggtcagactggcgactcagagtcagtccccgacccacaacctctcggagaacctccagcaacccccgctgctgtgggacctactacaatggcttcaggcggtggcgcaccaatggcagacaataacgaaggcgccgacggagtgggtaatgcctcaggaaattggcattgcgattccacatggctgggcgacagagtcatcaccaccagcacccgcacctgggccttgcccacctacaataaccacctctacaagcaaatctccagtgcttcaacgggggccagcaacgacaaccactacttcggctacagcaccccctgggggtattttgatttcaacagattccactgccacttttcaccacgtgactggcagcgactcatcaacaacaattggggattccggcccaagagactcaacttcaagctcttcaacatccaagtcaaggaggtcacgacgaatgatggcgtcacaaccatcgctaataaccttaccagcacggttcaagtcttctcggactcggagtaccagcttccgtacgtcctcggctctgcgcaccagggctgcctccctccgttcccggcggacgtgttcatgattccgcaatacggctacctgacgctcaacaatggcagccaagccgtgggacgttcatccttttattgcctggaatatttcccatcgcagatgctgagaacgggcaataactttaccttcagctacacctttgaggacgtgcctttccacagcagctacgcgcacagccagagcctggaccggctgatgaatcctctcatcgaccagtacctgtattacctgaacagaactcagaaccagtccggaagtgcccaaaacaaggacttgctgtttagccgggggtctccagctggcatgtctgttcagctcaaaaactggctacctggaccctgttatcggcagcagcgcgtttctaaaacaaaaacagacaacaacaacagcaattttacctggactggtgcttcaaaatataaccttaatgggcgtgaatccatcatcaaccctggcactgctatggcctcacacaaagacgacgaagacaagttctttcccatgagcggtgtcatgatttttggaaaagagagcgccggagcttcaaacactgcattggacaatgtcatgattacagacgaagaggaaattaaagccactaaccctgtggccaccgaaagatttgggaccgtggcagtcaatttccagagcagcagcacagaccctgcgaccggagatgtgcatgttatgggagcattacctggcatggtgtggcaagatagagacgtgtacctgcagggtcccatttgggccaaaattcctcacacagatggacactttcacccgtctcctcttatgggcggctttggactcaaacacccgcctcctcagatcctcatcaaaaacacacctgttcctgcgaatcctccggcggagttttcagctacaaagtttgcttcattcatcacccaatactccacaggacaagtgagcgtggaaattgaatgggagctgcagaaagaaaacagcaagcgctggaatcccgaagtgcagtacacatccaattatgcaaaatctgccaacgttgattttaccgtggacaacaatggactttatactgagcctcgccccattggcacccgttaccttacccgtcccctgtaa

SEQ ID NO: 945 - DNA, 2211 bp, Artificial Sequence
  Description of Artificial Sequence: Synthetic polynucleotide
atggctgccgatggttatcttccagattggctcgaggacaacctctctgagggcattcgcgagtggtgggacttgaaacctggagccccgaaacccaaagccaaccagcaaaagcaggacgacggccggggtctggtgcttcctggctacaagtacctcggacccttcaacggactcgacaagggggagcccgtcaacgcggcggacgcagcggccctcgagcacgacaaggcctacgaccagcagctcaaagcgggtgacaatccgtacctgcggtataaccacgccgacgccgagtttcaggagcgtctgcaagaagatacgtcttttgggggcaacctcgggcgagcagtcttccaggccaagaagcgggttctcgaaccttttggtctggttgaggaaggtgctaagacggctcctggaaagaagagaccggtagagcagtcgccccaagaaccagactcctcatcgggcatcggcaaatcaggccagcagcccgctaaaaagagactcaattttggtcagactggcgactcagagtcagtccccgacccacaacctctcggagaacctccagcaacccccgctgctgtgggacctactacaatggcttcaggcggtggcgcaccaatggcagacaataacgaaggcgccgacggagtgggtaatgcctcaggaaattggcattgcgattccacatggctgggcgacagagtcattaccaccagcacccgaacctgggccctgcccacctataacaaccacctctacaaacaaatctccagcgcttcaacgggggccagcaacgacaaccactacttcggctacagcaccccctgggggtattttgattttaacagattccactgccacttctcaccacgtgactggcagcgactcatcaacaacaattggggattccggcccaagagactcaacttcaagctcttcaacatccaagtcaaggaggtcacgacgaacgatggcgtcacgaccatcgctaataaccttaccagcacggttcaagtcttctcggactcggagtaccagttgccgtacgtcctcggctctgcgcaccagggctgcctccctccgttcccggcggacgtgttcatgattccgcagtacggctacctaacactcaacaatggcagccaggccgtgggacgttcatccttttactgcctggaatatttcccatcgcagatgctgagaacgggcaataactttaccttcagctacacattcgaggacgtgcctttccacagcagctacgcgcacagccaaagcctggaccggctgatgaatcctctcatcgaccagtacttgtattacctaaacagaactcaaaatcagtccggaagtgcccaaaacaaggacttgctgtttagccgggggtctccagctggcatgtctgttcagcccaaaaactggctacctggaccctgttatcggcagcagcgcgtttctaaaacaaaaacagacaacaacaacagcaactttacctggactggtgcttcaaaatataaccttaatgggcgtgaatctataatcaaccctggcactgctatggcttcacacaaagacgacgaagacaagttctttccaatgagcggtgtcatgatttttggcaaggagagcgccggagcttcaaacactgcattggacaatgtcatgattacagacgaagaggaaattaaagccactaaccctgtggccaccgaaagatttgggaccgtggcagtcaatttccagagcagcagcacagaccctgcgaccggagatgtgcatgttatgggagcattacctggcatggtgtggcaagatagagacgtgtacctgcagggtccaatttgggccaaaattcctcacacagatggacactttcacccgtctcctcttatgggcggctttggacttaagcacccgcctcctcagatcctcatcaaaaacacgcctgttcctgcgaatcctccggcagagttttcggctacaaagtttgcttcattcatcacccagtattccacaggacaagtgagtgtggaaattgaatgggagttgcagaaagaaaacagcaagcgttggaatcccgaagtgcagtacacatctaattatgcaaaatctgccaacgttgatttcactgtggacaacaatggactttatactgagcctcgccccattggcacccgttacctcacccgtcccctgtaa

SEQ ID NO: 946 - DNA, 2211 bp, Artificial Sequence
  Description of Artificial Sequence: Synthetic polynucleotide
atggctgccgatggttatcttccagattggctcgaggacaacctctctgagggcattcgcgagtggtgggacttgaaacctggagccccgaaacccaaagccaaccagcaaaagcaggacgacggccggggtctggtgcttcctggctacaagtacctcggacccttcaacggactcgacaagggggagcccgtcaacgcggcggacgcagcggccctcgagcacgacaaggcctacgaccagcagctcaaagcgggtgacaatccgtacctgcggtataaccacgccgacgccgagtttcaggagcgtctgcaagaagatacgtcttttgggggcaacctcgggcgagcagtcttccaggccaagaagagggttctcgaaccttttggtctggttgaggaaggtgctaagacggctcctggaaagaaacgtccggtagagcagtcaccccaagaaccagactcctcctcgggcattggcaaatcaggccagcagcccgctaaaaagagactcaattttggtcagactggcgactcagagtcagtccccgacccacaacctctcggagaacctccagcaacccccgctgctttgggacctactacaatggcttcaggcggtggcgcaccaatggcagacaataacgaaggcgccgacggagtgggtaatgcctcaggaaattggcattgcgattccacatggctgggcgacagagtcatcaccaccagcacccgcacctgggccttgcccacctacaataaccacctctacaagcaaatctccagtgcttcaacgggggccagcaacgacaaccactacttcggctacagcaccccctgggggtattttgatttcaacagattccactgccatttctcaccacgtgactggcagcgactcatcaacaacaactggggattccggcccaagagactcaacttcaagctcttcaacatccaagtcaaggaggtcacgacgaacgatggcgtcacgaccatcgctaataaccttaccagcacggttcaagtcttctcggactcggagtaccagcttccgtacgtcctcggctctgcgcaccagggctgcctccctccgttcccggcggacgtgttcatgattccgcagtacggctacctgacgctcaacaatggcagcaaagccgtgggacgttcatccttttactgcctggaatatttcccttctcagatgctgagaacgggcaacaactttaccttcagctacacctttgaggaagtgcctttccacagcagctacgcgcacagccagagcctggaccggctgatgaatcctctcatcgaccaatacctgtattacctgaacagaactcaaaatcagtccggaagtgcccaaaacaaggacttgctgtttagccgtgggtctccagctggcatgtctgttcagcccaaaaactggctacctggaccctgttatcggcagcagcgcgtttctaaaacaaaaacagacaacaacaacagcaattttacctggactggtgcttcaaaatataacctcaatgggcgtgaatccatcatcaaccctggcactgctatggcctcacacaaagacgacgaagacaagttctttcccatgagcggtgtcatgatttttggaaaagagagcgccggagcttcaaacactgcattggacaatgtcatgattacagacgaagaggaaattaaagccactaaccctgtggccaccgaaagatttgggaccgtggcagtcaatttccagagcagcagcacagaccctgcgaccggagatgtgcatgttatgggagcattacctggcatggtgtggcaagatagagacgtgtacctgcagggtcccatttgggccaaaattcctcacacggatggacactttcacccgtctcctcttatgggcggctttggactcaagcacccgcctcctcagatcctcatcaaaaacacacctgttcctgcgaatcctccggcagagttttcggctacaaagtttgcttcattcatcacccagtactccacaggacaagtgagcgtggaaattgaatgggagttgcagaaagaaaacagtaagcgctggaatcccgaagtgcagtacacatctaattatgcaaaatctgccaacgttgacttcactgtggacaacaatggactttatactgagcctcgccccattggcacccgttacctcacccgtcccctgtaa

SEQ ID NO: 947 - DNA, 2970 bp, Artificial Sequence
  Description of Artificial Sequence: Synthetic polynucleotide
agatgaccgccaaggtcgtagagtccgccaaggccattctgggcggcagcaaggtgcgcgtggaccaaaaatgcaaggcctctgcgcagatcgaccccacccccgtgatcgtcacctccaacaccaacatgtgcgccgtgattgacgggaacagcaccaccttcgagcaccagcagcccctgcaggaccggatgttcaagtttgaactcacccgccgcctcgactacgactttggcaaggtcaccaagcaggaagtcaaggactttttccggtgggcggctgatcacgtgactgacgtggctcatgagttttacgtcacaaagggtggagctaagaaaaggcccgccccctctgacgaggatataagcgagcccaagcggccgcgcgtgtcatttgcgcagccggagacgtcagacgcggaagctcccggagacttcgccgacaggtaccaaaacaaatgttctcgtcacgcgggtatgctgcagatgctctttccctgcaagacgtgcgagagaatgaatcagaattccaacgtctgcttcacgcacggtcagaaagattgcggggagtgctttcccgggtcagaatctcaaccggtttctgtcgtcagaaaaacgtatcagaaactgtgcatccttcatcagctccggggggcacccgagatcgcctgctctgcttgcgaccaactcaaccccgatttggacgattgccaatttgagcaataaatgactgaaatcaggtatggctgctgacggttatcttccagattggctcgaggacaacctctctgaaggcattcgcgagtggtgggcgctgaaacctggagctccacaacccaaggccaaccaacagcatcaggacaacggcaggggtcttgtgcttcctgggtacaagtacctcggacccttcaacggactcgacaagggagagccggtcaacgaggcagacgccgcggccctcgagcacgacaaggcctacgacaagcagctcgagcagggggacaacccgtatctcaagtacaaccacggcgacgccgagttccagcagcgcttggcgaccgacacctcttttgggggcaacctcgggcgagcagtcttccaggccaaaaagaggattctcgagcctctgggtctggttgaagagggcgttaaaacggctcctggaaagaaacgcccattagaaaagactccaaatcggccgaccaacccggactctgggaaggccccggccaagaaaaagcaaaaagacggcgaaccagccgactctgctagaaggacactcgactttgaagactctggagcaggagacggaccccctgagggatcatcttccggagaaatgtctcatgatgctgagatgcgtgcggcgccaggcggaaatgctgtcgaggcgggacaaggtgccgatggagtgggtaatgcctccggtgattggcattgcgattccacctggtcagagggccgagtcaccaccaccagcacccgaacctgggtcctacccacgtacaacaaccacctgtacctgcgaatcggaacaacggccaacagcaacacctacaacggattctccaccccctggggatactttgactttaaccgcttccactgccacttttccccacgcgactggcagcgactcatcaacaacaactggggactcaggccgaaatcgatgcgtgttaaaatcttcaacatacaggtcaaggaggtcacgacgtcaaacggcgagactacggtcgctaataaccttaccagcacggttcagatctttgcggattcgacgtatgaactcccatacgtgatggacgccggtcaggaggggagctttcctccgtttcccaacgacgtctttatggttccccaatacggatactgcggagttgtcactggaaaaaaccagaaccagacagacagaaatgccttttactgcctggaatactttccatcccaaatgctaagaactggcaacaattttgaagtcagttaccaatttgaaaaagttcctttccattcaatgtacgcgcacagccagagcctggacagaatgatgaatcctttactggatcagtacctgtggcatctgcaatcgaccactaccggaaattcccttaatcaaggaacagctaccaccacgtacgggaaaattaccactggagactttgcctactacaggaaaaactggttgcctggagcctgcattaaacaacaaaaattttcaaagaatgccaatcaaaactacaagattcccgccagcgggggagacgcccttttaaagtatgacacgcataccactctaaatgggcgatggagtaacatggctcctggacctccaatggcaaccgcaggtgccggggactcggattttagcaacagccagctgatctttgccggacccaatccgagcggtaacacgaccacatcttcaaacaatttgttgtttacctcagaagaggagattgccacaacaaacccacgagacacggacatgtttggacagattgcagataataatcaaaatgccaccaccgcccctcacatcgctaacctggacgctatgggaattgttcccggaatggtctggcaaaacagagacatctactaccagggccctatttgggccaaggtccctcacacggacggacactttcacccttcgccgctgatgggaggatttggactgaaacacccgcctccacagattttcatcaaaaacacccccgtacccgccaatcccaatactacctttagcgctgcaaggattaattcttttctgacgcagtacagcaccggacaagttgccgttcagatcgactgggaaattcagaaggagcattccaaacgctggaatcccgaagttcaatttacttcaaactacggcactcaaaattctatgctgtgggctcccgacaatgctggcaactaccacgaactccgggctattgggtcccgtttcctcacccaccacttgtaa

SEQ ID NO: 948 - protein, 736 aa, Artificial Sequence
  Description of Artificial Sequence: Synthetic polypeptide
MAADGYLPDWLEDNLSEGIREWWDLKPGAPKPKANQQKQDDGRGLVLPGYKYLGPFNGLDKGEPVNAADAAALEHDKAYDQQLKAGDNPYLRYNHADAEFQERLQEDTSFGGNLGRAVFQAKKRVLEPFGLVEEGAKTAPGKKRPVEQSPQEPDSSSGIGKTGQQPAKKRLNFGQTGDSESVPDPQPLGEPPATPAAVGPTTMASGGGAPMADNNEGADGVGNASGNWHCDSTWLGDRVITTSTRTWALPTYNNHLYKQISSASTGASNDNHYFGYSTPWGYFDFNRFHCHFSPRDWQRLINNNWGFRPKRLNFKLFNIQVKEVTTSDGVTTIANNLTSTVQVFSDSEYQLPYVLGSAHQGCLPPFPADVFMIPQYGYLTLNNGSQAVGRSSFYCLEYFPSQMLRTGNNFTFSYTFEEVPFHSSYAHSQSLDRLMNPLIDQYLYYLNRTQNQSGSAQNKDLLFSRGSPAGMSVQPKNWLPGPCYRQQRVSKTKTGNNNSNFTWTGASKYNLNGHESIINPGTAMASHKDDEDKFFPMSGVMIFGKESAGASNTALDNVMITDEEEIKATNPVATERFGTVAVNFQSSSTHPATGDVHVMGALPGMVWQDRDVYLQGPIWAKIPHTDGHFHPSPLMGGFGLKHPPPQILIKNTPVPANPPAEFSATKFASFITQYSTGQVSVEIEWELQKENSKRWNPEVQYTSNYAKSANVDFTVDNNGLYTEPRPIGTRYLTRPL

SEQ ID NO: 949 - protein, 736 aa, Artificial Sequence; identical to SEQ ID NO: 948
  Description of Artificial Sequence: Synthetic polypeptide

SEQ ID NO: 950 - protein, 733 aa, Artificial Sequence
  Description of Artificial Sequence: Synthetic polypeptide
MTDGYLPDWLEDNLSEGVREWWALQPGAPKPKANQQHQDNARGLVLPGYKYLGPGNGLDKGEPVNAADAAALEHDKAYDQQLKAGDNPYLKYNHADAEFQERLQEDTSFGGNLGRAVFQAKKRILEPLGLVEEAAKTAPGKKRPVEQSPAEPDSSSGIGKSGQQPARKRLNFGQTGDTESVPDPQPLGQPPAAPSGVGSTTMASGGGAPMADNNEGADGVGNSSGNWHCDSQWLGDRVITTSTRTWALPTYNNHLYKQISSQSGATNDNHYFGYSTPWGYFDFNRFHCHFSPRDWQRLINNNWGFRPKRLNFKLFNIQVKEVTQNDGTTTIANNLTSTVQVFTDSEYQLPYVLGSAHQGCLPPFPADVFMVPQYGYLTLNNGSQAVGRSSFYCLEYFPSQMLRTGNNFQFSYTFEDVPFHSSYAHSQSLDRLMNPLIDQYLYYLNRTQTASGTQQSRLLFSQAGPTSMSLQAKNWLPGPCYRQQRLSKQANDNNNSNFPWTGATKYHLNGRDSLVNPGPAMASHKDDKEKFFPMHGTLIFGKEGTNANNADLENVMITDEEEIRTTNPVATEQYGTVSNNLQNSNAGPTTGTVNHQGALPGMVWQDRDVYLQGPIWAKIPHTDGHFHPSPLMGGFGLKHPPPQIMIKNTPVPANPPTNFSAAKFASFITQYSTGQVSVEIEWELQKENSKRWNPEIQYTSNYNKSVNVDFTVDTNGVYSEPRPIGTRYLTRNL

SEQ ID NO: 951 - protein, 736 aa, Artificial Sequence; identical to SEQ ID NO: 766
  Description of Artificial Sequence: Synthetic polypeptide

SEQ ID NO: 952 - protein, 736 aa, Artificial Sequence
  Description of Artificial Sequence: Synthetic polypeptide
MAADGYLPDWLEDNLSEGIRKWWDLKPGAPKPKANQQKQDDGRGLVLPGYKYLGPFNGLDKGEPVNAADAAALEHDKAYDQQLKAGDNPYLRYNHADAEFQERLQEDTSFGGNLGRAVFQAKKRVLEPFGLVEEGAKTAPGKKRPVEQSPQEPDSSSGIGKTGQQPAKKRLNFGQTGDSESVPDPQPLGEPPATPAAVGPTTMASGGGAPMADNNEGADGVGNASGNWHCDSTWLGDRVITTSTRTWALPTYNNHLYKQISSASTGASNDNHYFGYSTPWGYFDFNRFHCHFSPRDWQRLINNNWGFRPKRLNFKLFNIQVKEVTTNDGVTTIANNLTSTVQVFSDSEYQLPYVLGSAHQGCLPPFPADVFMIPQYGYLTLNNGSQAVGRSSFYCLEYFPSQMLRTGNNFTFSYTFEEVPFHSSYAHSQSLDRLMNPLIDQYLYYLNRTQNQSGSAQNKDLLFSRGSPAGMSVQPKNWLPGPCYRQQRVSKTKTDNNNSNFTWTGASKYNLNGRESIINPGTAMASHKDDKDKFFPMSGVMIFGKESAGASNTALDNVMITDEEEIKATNPVATERFGTVAVNFQSSSTDPATGDVHVMGALPGMVWQDRDVYLQGPIWAKIPHTDGHFHPSPLMGGFGLKHPPPQILIKNTPVPANPPAEFSATKFASFITQYSTGQVSVEIEWELQKENSKRWNPEVQYTSNYAKSANVDFTVDNNGLYTEPRPIGTRYLTRPL

SEQ ID NO: 953 - protein, 736 aa, Artificial Sequence
  Description of Artificial Sequence: Synthetic polypeptide
MAADGYLPDWLEDNLSEGIREWWDLKPGAPKPKANQQKQDNGRGLVLPGYKYLGPFNGLDKGEPVNAADAAALEHDKAYDQQLKAGDNPYLRYNHADAEFQERLQEDTSFGGNLGRAVFQAKKRVLEPFGLVEEGAKTAPGKKRPVEQSPQEPDSSSGIGKTGQQPAKKRLNFGQTGDSESVPDPQPLGEPPATPAAVGPTTMASGGGAPMADNNEGADGVGNASGNWHCDSTWLGDRVITTSTRTWALPTYNNHLYKQISSASTGASNDNHYFGYSTPWGYFDFNRFHCHFSPRDWQRLINNNWGFRPKRLNFKLFNIQVKEVTTNDGVTTIANNLTSTVQVFSDSEYQLPYVLGSAHQGCLPPFPADVFMIPQYGYLTLNNGSQAVGRSSFYCLEYFPSQMLRTGNNFTFSYTFEEVPFHSSYAHSQSLDRLMNPLIDQYLYYLNRTQNQSGSAQNKDLLFSRGSPAGMSVQPKNWLPGPCYRQQRVSKTKTDNNNSNFTWTGASKYNLNGRESIINPGTAMASHKDDEDKFFPMSGVMIFGKESAGASNTALDNVMITDEEEIKATNPVATERFGTVAVNFQSSSTHPATGDVHVMGALPGMVWQDRDVYLQGPIWAKIPHTDGHFHPSPLMGGFGLKHPPPQILIKNTPVPANPPAEFSATKFASFITQYSTGQVSVEIEWELQKENSKRWNPEVQYTSNYAKSANVDFTVDNNGLYTEPRPIGTRYLTRPL

SEQ ID NO: 954 - protein, 736 aa, Artificial Sequence
  Description of Artificial Sequence: Synthetic polypeptide
MAADGYLPDWLEDNLSEGIREWWDLKPGAPKPKANQQKQDDGRGLVLPGYKYLGPFNGLDKGEPVNAADAAALEHDKAYDQQLKAGDNPYLRYNHADAEFQERLQEDTSFGGNLGRAVFQAKKRVLEPFGLVEEGAKTAPGKKRPVEQSPQEPDSSSGIGKTGQQPAKKRLNFGQTGDSESVPDPQPLGEPPATPAAVGPTTMASGGGAPMADNNEGADGVGNASGNWHCDSTWLGDRVITTSTRTWALPTYNNHLYKQISSASTGASNDNHYFGYSTPWGYFDFNRFHCHFSPRDWQRLINNNWGFRPKRLNFKLFNIQVKEVTTNDGVTTIANNLTSTVQVFSDSEYQLPYVLGSAHQGCLPPFPADVFMIPQYGYLTLNNGSQAVGRSSFYCLEYFPSQMLRTGNNFTFSYTFEDVPFHSSYAHSQSLDRLMNPLIDQYLYYLNRTQNQSGSAQNKDLLFSRGSPAGMSVQLKNWLPGPCYRQQRVSKTKTDNNNSNFTWTGASKYNLNGRESIINPGTAMASHKDDEDKFFPMSGVMIFGKESAGASNTALDNVMITDEEEIKATNPVATERFGTVAVNFQSSSTDPATGDVHVMGALPGMVWQDRDVYLQGPIWAKIPHTDGHFHPSPLMGGFGLKHPPPQILIKNTPVPANPPAEFSATKFASFITQYSTGQVSVEIEWELQKENSKRWNPEVQYTSNYAKSANVDFTVDNNGLYTEPRPIGTRYLTRPL

SEQ ID NO: 955 - protein, 736 aa, Artificial Sequence
  Description of Artificial Sequence: Synthetic polypeptide
MAADGYLPDWLEDNLSEGIREWWDLKPGAPKPKANQQKQDDGRGLVLPGYKYLGPFNGLDKGEPVNAADAAALEHDKAYDQQLKAGDNPYLRYNHADAEFQERLQEDTSFGGNLGRAVFQAKKRVLEPFGLVEEGAKTAPGKKRPVEQSPQEPDSSSGIGKSGQQPAKKRLNFGQTGDSESVPDPQPLGEPPATPAAVGPTTMASGGGAPMADNNEGADGVGNASGNWHCDSTWLGDRVITTSTRTWALPTYNNHLYKQISSASTGASNDNHYFGYSTPWGYFDFNRFHCHFSPRDWQRLINNNWGFRPKRLNFKLFNIQVKEVTTNDGVTTIANNLTSTVQVFSDSEYQLPYVLGSAHQGCLPPFPADVFMIPQYGYLTLNNGSQAVGRSSFYCLEYFPSQMLRTGNNFTFSYTFEDVPFHSSYAHSQSLDRLMNPLIDQYLYYLNRTQNQSGSAQNKDLLFSRGSPAGMSVQPKNWLPGPCYRQQRVSKTKTDNNNSNFTWTGASKYNLNGRESIINPGTAMASHKDDEDKFFPMSGVMIFGKGSAGASNTALDNVMITDEEEIKATNPVATERFGTVAVNFQSSSTDPATGDVHVMGALPGMVWQDRDVYLQGPIWAKIPHTDGHFHPSPLMGGFGLKHPPPQILIKNTPVPANPPAEFSATKFASFITQYSTGQVSVEIEWELQKENSKRWNPEVQYTSNYAKSANVDFTVDNNGLYTEPRPIGTRYLTRPL

SEQ ID NO: 956 - protein, 736 aa, Artificial Sequence; identical to SEQ ID NO: 697
  Description of Artificial Sequence: Synthetic polypeptide

SEQ ID NO: 957 - protein, 742 aa, Artificial Sequence
  Description of Artificial Sequence: Synthetic polypeptide
MAADGYLPDWLEDNLSEGIREWWALKPGAPQPKANQQHQDNGRGLVLPGYKYLGPFNGLDKGEPVNEADAAALEHDKAYDKQLEQGDNPYLKYNHADAEFQQRLATDTSFGGNLGRAVFQAKKRILEPLGLVEEGVKTAPGKKRPLEKTPNRPTNPDSGKAPAKKKQKDGEPADSARRTLDFEDSGAGDGPPEGSSSGEMSHDAEMRAAPGGNAVEAGQGADGVGNASGDWHCDSTWSEGRVTTTSTRTWVLPTYNNHLYLRIGTTANSNTYNGFSTPWGYFDFNRFHCHFSPRDWQRLINNNWGLRPKSMRVKIFNIQVKEVTTSNGETTVANNLTSTVQIFADSTYELPYVMDAGQEGSFPPFPNDVFMVPQYGYCGVVTGKNQNQTDRNAFYCLEYFPSQMLRTGNNFEVSYQFEKVPFHSMYAHSQSLDRMMNPLLDQYLWHLQSTTTGNSLNQGTATTTYGKITTGDFAYYRKNWLPGACIKQQKFSKNANQNYKIPASGGDALLKYDTHTTLNGRWSNMAPGPPMATAGAGDSDFSNSQLIFAGPNPSGNTTTSSNNLLFTSEEEIATTNPRDTDMFGQIADNNQNATTAPHIANLDAMGIVPGMVWQNRDIYYQGPIWAKVPHTDGHFHPSPLMGGFGLKHPPPQIFIKNTPVPANPNTTFSAARINSFLTQYSTGQVAVQIDWEIQKEHSKRWNPEVQFTSNYGTQNSMLWAPDNAGNYHELRAIGSRFLTHHL

SEQ ID NO: 958 - DNA, 2211 bp, Artificial Sequence
  Description of Artificial Sequence: Synthetic polynucleotide
atggctgccgatggttatcttccagattggctcgaggacaacctctctgagggcattcgcgagtggtgggacttgaaacctggagccccgaagcccaaagccaaccagcaaaagcaggacgacggccggggtctggtgcttcctggctacaagtacctcggacccttcaacggactcgacaagggggagcccgtcaacgcggcggacgcagcggccctcgagcacgacaaggcctacgaccagcagctcaaagcgggtgacaatccgtacctgcggtataaccacgccgacgccgagtttcaggagcgtctgcaagaagatacgtcttttgggggcaacctcgggcgagcagtcttccaggccaagaagcgggttctcgaacctctcggtctggttgaggaaggcgctaaggcggctcctggaaagaaacgtccggtagagcagtcgccacaagagccagactcctcctcgggcatcggcaagacaggccagcagcccgctaaaaagagactcaattttggtcagactggcgactcagagtcagtccccgatccacaacctctcggagaacctccagcagccccctcaggtctgggacctaatacaatggcttcaggcggtggcgctccaatggcagacaataacgaaggcgccgacggagtgggtaattcctcgggaaattggcattgcgattccacatggctgggggacagagtcatcaccaccagcacccgaacctgggccctgcccacctacaacaaccacctctacaagcaaatctccaacggcacctcgggaggaagcaccaacgacaacacctattttggctacagcaccccctgggggtattttgacttcaacagattccactgtcacttttcaccacgtgactggcaacgactcatcaacaacaattggggattccggcccaaaagactcaacttcaagctgttcaacatccaggtcaaggaagtcacgacgaacgaaggcaccaagaccatcgccaataatctcaccagcaccgtgcaggtctttacggactcggagtaccagttaccgtacgtgctaggatccgctcaccagggatgtctgcctccgttcccggcggacgtcttcatggttcctcagtacggctatttaactttaaacaatggaagccaagccctgggacgttcctccttctactgtctggagtatttcccatcgcagatgctgagaaccggcaacaactttcagttcagctacaccttcgaggacgtgcctttccacagcagctacgcgcacagccagagcctggacaggctgatgaatcccctcatcgaccagtacctgtactacctggtcagaacgcaaacgactggaactggagggacgcagactctggcattcagccaagcgggtcctagctcaatggccaaccaggctagaaattgggtgcccggaccttgctaccggcagcagcgcgtctccacgacaaccaaccagaacaacaacagcaactttgcctggacgggagctgccaagtttaagctgaacggccgagactctctaatgaatccgggcgtggcaatggcttcccacaaggatgacgacgaccgcttcttcccttcgagcggggtcctgatttttggcaagcaaggagccgggaacgatggagtggattacagccaagtgctgattacagatgaggaagaaatcaaggctaccaaccccgtggccacagaagaatatggagcagtggccatcaacaaccaggccgccaatacgcaggcgcagaccggactcgtgcacaaccagggggtgattcccggcatggtgtggcagaatagagacgtgtacctgcagggtcccatctgggccaaaattcctcacacggacggcaactttcacccgtctcccctgatgggcggctttggactgaagcacccgcctcctcaaattctcatcaagaacacaccggttccagcggacccgccgcttaccttcaaccaggccaagctgaactctttcatcacgcagtacagcaccggacaggtcagcgtggaaatcgagtgggagctgcagaaagaaaacagcaaacgctggaatccagagattcaatacacttccaactactacaaatctacaaatgtggactttgctgtcaacacggagggggtttatagcgagcctcgccccattggcacccgttacctcacccgcaacctgtaa

SEQ ID NO: 959 - DNA, 2592 bp, Artificial Sequence
  Description of Artificial Sequence: Synthetic polynucleotide
ctggctgccgatggttatcttccagattggctcgaggacaacctctctgagggcattcgcgagtggtgggacttgaaacctggagccccgaagcccaaagccaaccagcaaaagcaggacgacggccggggtctggtgcttcctggctacaagtacctcggacccttcaacggactcgacaagggggagcccgtcaacgcggcggacgcagcggccctcgagcacgacaaggcctacgaccagcagctcaaagcgggtgacaatccgtacctgcggtataaccacgccgacgccgagtttcaggagcgtctgcaagaagatacgtcttttgggggcaacctcgggcgagcagtcttccaggccaagaagcgggttctcgaacctctcggtctggttgaggaaggcgctaagatggaagtgcagctccaagccagtggtggcggactggtgcaggcaggaggcagcttgaggctcagctgtgccgccagcggcttcaagatcacccactacaccatgggctggttccggcaggcccctggcaaggagagggagttcgtgagcaggattacctggggtggtgacaacaccttctacagcaacagcgtgaagggcaggttcaccatcagcagggacaacgccaagaacaccgtgtacctgcagatgaacagcctgaagcccgaggacaccgccgactactactgtgcagccggcagtaccagcaccgctacccccctgagggtggactactggggcaaaggcactcaggtgacagtgtcttcaggagggggtggcagcgctcctggaaagaaacgtccggtagagcagtcgccacaagagccagactcctcctcgggcatcggcaagacaggccagcagcccgctaaaaagagactcaattttggtcagactggcgactcagagtcagtccccgatccacaacctctcggagaacctccagcagccccctcaggtctgggacctaatacaatggcttcaggcggtggcgctccaatggcagacaataacgaaggcgccgacggagtgggtaattcctcgggaaattggcattgcgattccacatggctgggggacagagtcatcaccaccagcacccgaacctgggccctgcccacctacaacaaccacctctacaagcaaatctccaacggcacctcgggaggaagcaccaacgacaacacctattttggctacagcaccccctgggggtattttgacttcaacagattccactgtcacttttcaccacgtgactggcaacgactcatcaacaacaattggggattccggcccaaaagactcaacttcaagctgttcaacatccaggtcaaggaagtcacgacgaacgaaggcaccaagaccatcgccaataatctcaccagcaccgtgcaggtctttacggactcggagtaccagttaccgtacgtgctaggatccgctcaccagggatgtctgcctccgttcccggcggacgtcttcatggttcctcagtacggctatttaactttaaacaatggaagccaagccctgggacgttcctccttctactgtctggagtatttcccatcgcagatgctgagaaccggcaacaactttcagttcagctacaccttcgaggacgtgcctttccacagcagctacgcgcacagccagagcctggacaggctgatgaatcccctcatcgaccagtacctgtactacctggtcagaacgcaaacgactggaactggagggacgcagactctggcattcagccaagcgggtcctagctcaatggccaaccaggctagaaattgggtgcccggaccttgctaccggcagcagcgcgtctccacgacaaccaaccagaacaacaacagcaactttgcctggacgggagctgccaagtttaagctgaacggccgagactctctaatgaatccgggcgtggcaatggcttcccacaaggatgacgacgaccgcttcttcccttcgagcggggtcctgatttttggcaagcaaggagccgggaacgatggagtggattacagccaagtgctgattacagatgaggaagaaatcaaggctaccaaccccgtggccacagaagaatatggagcagtggccatcaacaaccaggccgccaatacgcaggcgcagaccggactcgtgcacaaccagggggtgattcccggcatggtgtggcagaatagagacgtgtacctgcagggtcccatctgggccaaaattcctcacacggacggcaactttcacccgtctcccctgatgggcggctttggactgaagcacccgcctcctcaaattctcatcaagaacacaccggttccagcggacccgccgcttaccttcaaccaggccaagctgaactctttcatcacgcagtacagcaccggacaggtcagcgtggaaatcgagtgggagctgcagaaagaaaacagcaaacgctggaatccagagattcaatacacttccaactactacaaatctacaaatgtggactttgctgtcaacacggagggggtttatagcgagcctcgccccattggcacccgttacctcacccgcaacctgtaa

SEQ ID NO: 960 - DNA, 2601 bp, Artificial Sequence
  Description of Artificial Sequence: Synthetic polynucleotide
ctggctgccgatggttatcttccagattggctcgaggacaacctctctgagggcattcgcgagtggtgggacttgaaacctggagccccgaagcccaaagccaaccagcaaaagcaggacgacggccggggtctggtgcttcctggctacaagtacctcggacccttcaacggactcgacaagggggagcccgtcaacgcggcggacgcagcggccctcgagcacgacaaggcctacgaccagcagctcaaagcgggtgacaatccgtacctgcggtataaccacgccgacgccgagtttcaggagcgtctgcaagaagatacgtcttttgggggcaacctcgggcgagcagtcttccaggccaagaagcgggttctcgaacctctcggtctggttgaggaaggcgctaagatggaggtgcagctgcaggcttctggaggaggactggtgcaggctggagggagtctgaggctgtcttgcagtgcctcagtgaggactttctccatctacgccatgggctggtttaggcaggctcccgggaaggagcgcgaattcgtggccggaatcaaccggtctggcgacgtgaccaagtacgctgatttcgtgaaaggccggtttagcatttccagagacaacgccaagaatatggtgtatctgcagatgaactccctgaaacctgaagacacagctctgtactattgtgccgctacttgggcctacgataccgtgggggctctgacatcaggatataatttttggggccaggggacccaggtgacagtgagctccggaggaggaggaagcgctcctggaaagaaacgtccggtagagcagtcgccacaagagccagactcctcctcgggcatcggcaagacaggccagcagcccgctaaaaagagactcaattttggtcagactggcgactcagagtcagtccccgatccacaacctctcggagaacctccagcagccccctcaggtctgggacctaatacaatggcttcaggcggtggcgctccaatggcagacaataacgaaggcgccgacggagtgggtaattcctcgggaaattggcattgcgattccacatggctgggggacagagtcatcaccaccagcacccgaacctgggccctgcccacctacaacaaccacctctacaagcaaatctccaacggcacctcgggaggaagcaccaacgacaacacctattttggctacagcaccccctgggggtattttgacttcaacagattccactgtcacttttcaccacgtgactggcaacgactcatcaacaacaattggggattccggcccaaaagactcaacttcaagctgttcaacatccaggtcaaggaagtcacgacgaacgaaggcaccaagaccatcgccaataatctcaccagcaccgtgcaggtctttacggactcggagtaccagttaccgtacgtgctaggatccgctcaccagggatgtctgcctccgttcccggcggacgtcttcatggttcctcagtacggctatttaactttaaacaatggaagccaagccctgggacgttcctccttctactgtctggagtatttcccatcgcagatgctgagaaccggcaacaactttcagttcagctacaccttcgaggacgtgcctttccacagcagctacgcgcacagccagagcctggacaggctgatgaatcccctcatcgaccagtacctgtactacctggtcagaacgcaaacgactggaactggagggacgcagactctggcattcagccaagcgggtcctagctcaatggccaaccaggctagaaattgggtgcccggaccttgctaccggcagcagcgcgtctccacgacaaccaaccagaacaacaacagcaactttgcctggacgggagctgccaagtttaagctgaacggccgagactctctaatgaatccgggcgtggcaatggcttcccacaaggatgacgacgaccgcttcttcccttcgagcggggtcctgatttttggcaagcaaggagccgggaacgatggagtggattacagccaagtgctgattacagatgaggaagaaatcaaggctaccaaccccgtggccacagaagaatatggagcagtggccatcaacaaccaggccgccaatacgcaggcgcagaccggactcgtgcacaaccagggggtgattcccggcatggtgtggcagaatagagacgtgtacctgcagggtcccatctgggccaaaattcctcacacggacggcaactttcacccgtctcccctgatgggcggctttggactgaagcacccgcctcctcaaattctcatcaagaacacaccggttccagcggacccgccgcttaccttcaaccaggccaagctgaactctttcatcacgcagtacagcaccggacaggtcagcgtggaaatcgagtgggagctgcagaaagaaaacagcaaacgctggaatccagagattcaatacacttccaactactacaaatctacaaatgtggactttgctgtcaacacggagggggtttatagcgagcctcgccccattggcacccgttacctcacccgcaacctgtaa

SEQ ID NO: 961 - DNA, 2367 bp, Artificial Sequence
  Description of Artificial Sequence: Synthetic polynucleotide
ctggctgccgatggttatcttccagattggctcgaggacaacctctctgagggcattcgcgagtggtgggacttgaaacctggagccccgaagcccaaagccaaccagcaaaagcaggacgacggccggggtctggtgcttcctggctacaagtacctcggacccttcaacggactcgacaagggggagcccgtcaacgcggcggacgcagcggccctcgagcacgacaaggcctacgaccagcagctcaaagcgggtgacaatccgtacctgcggtataaccacgccgacgccgagtttcaggagcgtctgcaagaagatacgtcttttgggggcaacctcgggcgagcagtcttccaggccaagaagcgggttctcgaacctctcggtctggttgaggaaggcgctaagatgccaagcagtgtaatcgatgcgctgcagtacaagctggagggcaccacgaggctgaccaggaagaggggtctgaagctggccacggccctcagccttagcaataagttcgtagagggcagccccagcggcggcggcggcagcggcggcggcggcagcgctcctggaaagaaacgtccggtagagcagtcgccacaagagccagactcctcctcgggcatcggcaagacaggccagcagcccgctaaaaagagactcaattttggtcagactggcgactcagagtcagtccccgatccacaacctctcggagaacctccagcagccccctcaggtctgggacctaatacaatggcttcaggcggtggcgctccaatggcagacaataacgaaggcgccgacggagtgggtaattcctcgggaaattggcattgcgattccacatggctgggggacagagtcatcaccaccagcacccgaacctgggccctgcccacctacaacaaccacctctacaagcaaatctccaacggcacctcgggaggaagcaccaacgacaacacctattttggctacagcaccccctgggggtattttgacttcaacagattccactgtcacttttcaccacgtgactggcaacgactcatcaacaacaattggggattccggcccaaaagactcaacttcaagctgttcaacatccaggtcaaggaagtcacgacgaacgaaggcaccaagaccatcgccaataatctcaccagcaccgtgcaggtctttacggactcggagtaccagttaccgtacgtgctaggatccgctcaccagggatgtctgcctccgttcccggcggacgtcttcatggttcctcagtacggctatttaactttaaacaatggaagccaagccctgggacgttcctccttctactgtctggagtatttcccatcgcagatgctgagaaccggcaacaactttcagttcagctacaccttcgaggacgtgcctttccacagcagctacgcgcacagccagagcctggacaggctgatgaatcccctcatcgaccagtacctgtactacctggtcagaacgcaaacgactggaactggagggacgcagactctggcattcagccaagcgggtcctagctcaatggccaaccaggctagaaattgggtgcccggaccttgctaccggcagcagcgcgtctccacgacaaccaaccagaacaacaacagcaactttgcctggacgggagctgccaagtttaagctgaacggccgagactctctaatgaatccgggcgtggcaatggcttcccacaaggatgacgacgaccgcttcttcccttcgagcggggtcctgatttttggcaagcaaggagccgggaacgatggagtggattacagccaagtgctgattacagatgaggaagaaatcaaggctaccaaccccgtggccacagaagaatatggagcagtggccatcaacaaccaggccgccaatacgcaggcgcagaccggactcgtgcacaaccagggggtgattcccggcatggtgtggcagaatagagacgtgtacctgcagggtcccatctgggccaaaattcctcacacggacggcaactttcacccgtctcccctgatgggcggctttggactgaagcacccgcctcctcaaattctcatcaagaacacaccggttccagcggacccgccgcttaccttcaaccaggccaagctgaactctttcatcacgcagtacagcaccggacaggtcagcgtggaaatcgagtgggagctgcagaaagaaaacagcaaacgctggaatccagagattcaatacacttccaactactacaaatctacaaatgtggactttgctgtcaacacggagggggtttatagcgagcctcgccccattggcacccgttacctcacccgcaacctgtaa

SEQ ID NO: 962 - DNA, 2328 bp, Artificial Sequence
  Description of Artificial Sequence: Synthetic polynucleotide
ctggctgccgatggttatcttccagattggctcgaggacaacctctctgagggcattcgcgagtggtgggacttgaaacctggagccccgaagcccaaagccaaccagcaaaagcaggacgacggccggggtctggtgcttcctggctacaagtacctcggacccttcaacggactcgacaagggggagcccgtcaacgcggcggacgcagcggccctcgagcacgacaaggcctacgaccagcagctcaaagcgggtgacaatccgtacctgcggtataaccacgccgacgccgagtttcaggagcgtctgcaagaagatacgtcttttgggggcaacctcgggcgagcagtcttccaggccaagaagcgggttctcgaacctctcggtctggttgaggaaggcgctaagatgtataccatctggatgcccgagaaccccaggcccggtaccccctgcgacatcttcaccaacagcaggggcaagcgagccagcaacggcggcggcggcggcagcggcggcggcggcagcgctcctggaaagaaacgtccggtagagcagtcgccacaagagccagactcctcctcgggcatcggcaagacaggccagcagcccgctaaaaagagactcaattttggtcagactggcgactcagagtcagtccccgatccacaacctctcggagaacctccagcagccccctcaggtctgggacctaatacaatggcttcaggcggtggcgctccaatggcagacaataacgaaggcgccgacggagtgggtaattcctcgggaaattggcattgcgattccacatggctgggggacagagtcatcaccaccagcacccgaacctgggccctgcccacctacaacaaccacctctacaagcaaatctccaacggcacctcgggaggaagcaccaacgacaacacctattttggctacagcaccccctgggggtattttgacttcaacagattccactgtcacttttcaccacgtgactggcaacgactcatcaacaacaattggggattccggcccaaaagactcaacttcaagctgttcaacatccaggtcaaggaagtcacgacgaacgaaggcaccaagaccatcgccaataatctcaccagcaccgtgcaggtctttacggactcggagtaccagttaccgtacgtgctaggatccgctcaccagggatgtctgcctccgttcccggcggacgtcttcatggttcctcagtacggctatttaactttaaacaatggaagccaagccctgggacgttcctccttctactgtctggagtatttcccatcgcagatgctgagaaccggcaacaactttcagttcagctacaccttcgaggacgtgcctttccacagcagctacgcgcacagccagagcctggacaggctgatgaatcccctcatcgaccagtacctgtactacctggtcagaacgcaaacgactggaactggagggacgcagactctggcattcagccaagcgggtcctagctcaatggccaaccaggctagaaattgggtgcccggaccttgctaccggcagcagcgcgtctccacgacaaccaaccagaacaacaacagcaactttgcctggacgggagctgccaagtttaagctgaacggccgagactctctaatgaatccgggcgtggcaatggcttcccacaaggatgacgacgaccgcttcttcccttcgagcggggtcctgatttttggcaagcaaggagccgggaacgatggagtggattacagccaagtgctgattacagatgaggaagaaatcaaggctaccaaccccgtggccacagaagaatatggagcagtggccatcaacaaccaggccgccaatacgcaggcgcagaccggactcgtgcacaaccagggggtgattcccggcatggtgtggcagaatagagacgtgtacctgcagggtcccatctgggccaaaattcctcacacggacggcaactttcacccgtctcccctgatgggcggctttggactgaagcacccgcctcctcaaattctcatcaagaacacaccggttccagcggacccgccgcttaccttcaaccaggccaagctgaactctttcatcacgcagtacagcaccggacaggtcagcgtggaaatcgagtgggagctgcagaaagaaaacagcaaacgctggaatccagagattcaatacacttccaactactacaaatctacaaatgtggactttgctgtcaacacggagggggtttatagcgagcctcgccccattggcacccgttacctcacccgcaacctgtaa

SEQ ID NO: 963 - DNA, 2298 bp, Artificial Sequence
  Description of Artificial Sequence: Synthetic polynucleotide
ctggctgccgatggttatcttccagattggctcgaggacaacctctctgagggcattcgcgagtggtgggacttgaaacctggagccccgaagcccaaagccaaccagcaaaagcaggacgacggccggggtctggtgcttcctggctacaagtacctcggacccttcaacggactcgacaagggggagcccgtcaacgcggcggacgcagcggccctcgagcacgacaaggcctacgaccagcagctcaaagcgggtgacaatccgtacctgcggtataaccacgccgacgccgagtttcaggagcgtctgcaagaagatacgtcttttgggggcaacctcgggcgagcagtcttccaggccaagaagcgggttctcgaacctctcggtctggttgaggaaggcgctaagatgaccttcttctacggcggcagcaggggcaagaggaacaacttcaagaccgaggagtacggcggcggcggcagcggcggcggcggcagcgctcctggaaagaaacgtccggtagagcagtcgccacaagagccagactcctcctcgggcatcggcaagacaggccagcagcccgctaaaaagagactcaattttggtcagactggcgactcagagtcagtccccgatccacaacctctcggagaacctccagcagccccctcaggtctgggacctaatacaatggcttcaggcggtggcgctccaatggcagacaataacgaaggcgccgacggagtgggtaattcctcgggaaattggcattgcgattccacatggctgggggacagagtcatcaccaccagcacccgaacctgggccctgcccacctacaacaaccacctctacaagcaaatctccaacggcacctcgggaggaagcaccaacgacaacacctattttggctacagcaccccctgggggtattttgacttcaacagattccactgtcacttttcaccacgtgactggcaacgactcatcaacaacaattggggattccggcccaaaagactcaacttcaagctgttcaacatccaggtcaaggaagtcacgacgaacgaaggcaccaagaccatcgccaataatctcaccagcaccgtgcaggtctttacggactcggagtaccagttaccgtacgtgctaggatccgctcaccagggatgtctgcctccgttcccggcggacgtcttcatggttcctcagtacggctatttaactttaaacaatggaagccaagccctgggacgttcctccttctactgtctggagtatttcccatcgcagatgctgagaaccggcaacaactttcagttcagctacaccttcgaggacgtgcctttccacagcagctacgcgcacagccagagcctggacaggctgatgaatcccctcatcgaccagtacctgtactacctggtcagaacgcaaacgactggaactggagggacgcagactctggcattcagccaagcgggtcctagctcaatggccaaccaggctagaaattgggtgcccggaccttgctaccggcagcagcgcgtctccacgacaaccaaccagaacaacaacagcaactttgcctggacgggagctgccaagtttaagctgaacggccgagactctctaatgaatccgggcgtggcaatggcttcccacaaggatgacgacgaccgcttcttcccttcgagcggggtcctgatttttggcaagcaaggagccgggaacgatggagtggattacagccaagtgctgattacagatgaggaagaaatcaaggctaccaaccccgtggccacagaagaatatggagcagtggccatcaacaaccaggccgccaatacgcaggcgcagaccggactcgtgcacaaccagggggtgattcccggcatggtgtggcagaatagagacgtgtacctgcagggtcccatctgggccaaaattcctcacacggacggcaactttcacccgtctcccctgatgggcggctttggactgaagcacccgcctcctcaaattctcatcaagaacacaccggttccagcggacccgccgcttaccttcaaccaggccaagctgaactctttcatcacgcagtacagcaccggacaggtcagcgtggaaatcgagtgggagctgcagaaagaaaacagcaaacgctggaatccagagattcaatacacttccaactactacaaatctacaaatgtggactttgctgtcaacacggagggggtttatagcgagcctcgccccattggcacccgttacctcacccgcaacctgtaa

SEQ ID NO: 964 - DNA, 2211 bp, Artificial Sequence
  Description of Artificial Sequence: Synthetic polynucleotide
atggctgccgatggttatcttccagattggctcgaggacaaccttagtgaaggaattcgcgagtggtgggctttgaaacctggagcccctcaacccaaggcaaatcaacaacatcaagacaacgctcgaggtcttgtgcttccgggttacaaataccttggacccggcaacggactcgacaagggggagccggtcaacgcagcagacgcggcggccctcgagcacgacaaggcctacgaccagcagctcaaggccggagacaacccgtacctcaagtacaaccacgccgacgccgagttccaggagcggctcaaagaagatacgtcttttgggggcaacctcgggcgagcagtcttccaggccaaaaagaggcttcttgaacctcttggtctggttgaggaagcggctaaggcggctcctggaaagaagaggcctgtagagcagtctcctcaggaaccggactcctccgcgggtattggcaaatcgggtgcacagcccgctaaaaagagactcaatttcggtcagactggcgacacagagtcagtcccagaccctcaaccaatcggagaacctcccgcagccccctcaggtgtgggatctcttacaatggcttcaggtggtggcgcaccagtggcagacaataacgaaggtgccgatggagtgggtagttcctcgggaaattggcattgcgattcccaatggctgggggacagagtcatcaccaccagcacccgaacctgggccctgcccacctacaacaatcacctctacaagcaaatctccaacagcacatctggaggatcttcaaatgacaacgcctacttcggctacagcaccccctgggggtattttgacttcaacagattccactgccacttctcaccacgtgactggcagcgactcatcaacaacaactggggattccggcctaagcgactcaacttcaagctcttcaacattcaggtcaaagaggttacggacaacaatggagtcaagaccatcgccaataaccttaccagcacggtccaggtcttcacggactcagactatcagctcccgtacgtgctcgggtcggctcacgagggctgcctcccgccgttcccagcggacgttttcatgattcctcagtacgggtatctgacgcttaatgatggaagccaggccgtgggtcgttcgtccttttactgcctggaatatttcccgtcgcaaatgctaagaacgggtaacaacttccagttcaactacgagtttgagaacgtacctttccatagcagctacgctcacagccaaagcctggaccgactaatgaatccactcatcgaccaatacttgtactatctctcaaagactattaacgattctggacagaatcaacaaacgctaaaattcagtgtggccggacccagcaacatggctgtccagggaagaaactacatacctggacccagctaccgacaacaacgtgtctcaaccactgtgactcaaaacaacaacagcgaatttgcttggcctggagcttcttcttgggctctcaatggacgtaatagcttgatgaatcctggacctgctatggccagccacaaagaaggagaggaccgtttctttcctttgtctggatctttaatttttggcaaacaaggaactggaagagacaacgtggatgcggacgaagtcatgataaccaacgaagaagaaattaaaactactaacccggtagcaacggagtcctatggacaagtggccataaaccaccagagtgcccaagcacaggcgcagaccggctgggttcaaaaccaaggaatacttccgggtatggtttggcaggacagagatgtgtacctgcaaggacccatttgggccaaaattcctcacacggacggcaactttcacccttctccgctgatgggagggtttggaatgaagcacccgcctcctcagatcctcatcaaaaacacacctgtacctgcggatcctccaacggccttcaacaaggacaagctgaactctttcatcacccagtattctactggccaagtcagcgtggagatcgagtgggagctgcagaaggaaaacagcaagcgctggaacccggagatccagtacacttccaactattacaagtctaataatgttgaatttgctgttaatactgaaggtgtatatagtgaaccccgccccattggcaccagatacctgactcgtaatctgtaa

SEQ ID NO: 965 - DNA, 2277 bp, Artificial Sequence
  Description of Artificial Sequence: Synthetic polynucleotide
ctggctgccgatggttatcttccagattggctcgaggacaaccttagtgaaggaattcgcgagtggtgggctttgaaacctggagcccctcaacccaaggcaaatcaacaacatcaagacaacgctcgaggtcttgtgcttccgggttacaaataccttggacccggcaacggactcgacaagggggagccggtcaacgcagcagacgcggcggccctcgagcacgacaaggcctacgaccagcagctcaaggccggagacaacccgtacctcaagtacaaccacgccgacgccgagttccaggagcggctcaaagaagatacgtcttttgggggcaacctcgggcgagcagtcttccaggccaaaaagaggcttcttgaacctcttggtctggttgaggaagcggctaagatgaacaaccagaagatcgtgaacctgaaggagaaggtggcccagctggaggccggcggcggcggcagcgctcctggaaagaagaggcctgtagagcagtctcctcaggaaccggactcctccgcgggtattggcaaatcgggtgcacagcccgctaaaaagagactcaatttcggtcagactggcgacacagagtcagtcccagaccctcaaccaatcggagaacctcccgcagccccctcaggtgtgggatctcttacaatggcttcaggtggtggcgcaccagtggcagacaataacgaaggtgccgatggagtgggtagttcctcgggaaattggcattgcgattcccaatggctgggggacagagtcatcaccaccagcacccgaacctgggccctgcccacctacaacaatcacctctacaagcaaatctccaacagcacatctggaggatcttcaaatgacaacgcctacttcggctacagcaccccctgggggtattttgacttcaacagattccactgccacttctcaccacgtgactggcagcgactcatcaacaacaactggggattccggcctaagcgactcaacttcaagctcttcaacattcaggtcaaagaggttacggacaacaatggagtcaagaccatcgccaataaccttaccagcacggtccaggtcttcacggactcagactatcagctcccgtacgtgctcgggtcggctcacgagggctgcctcccgccgttcccagcggacgttttcatgattcctcagtacgggtatctgacgcttaatgatggaagccaggccgtgggtcgttcgtccttttactgcctggaatatttcccgtcgcaaatgctaagaacgggtaacaacttccagttcaactacgagtttgagaacgtacctttccatagcagctacgctcacagccaaagcctggaccgactaatgaatccactcatcgaccaatacttgtactatctctcaaagactattaacgattctggacagaatcaacaaacgctaaaattcagtgtggccggacccagcaacatggctgtccagggaagaaactacatacctggacccagctaccgacaacaacgtgtctcaaccactgtgactcaaaacaacaacagcgaatttgcttggcctggagcttcttcttgggctctcaatggacgtaatagcttgatgaatcctggacctgctatggccagccacaaagaaggagaggaccgtttctttcctttgtctggatctttaatttttggcaaacaaggaactggaagagacaacgtggatgcggacgaagtcatgataaccaacgaagaagaaattaaaactactaacccggtagcaacggagtcctatggacaagtggccataaaccaccagagtgcccaagcacaggcgcagaccggctgggttcaaaaccaaggaatacttccgggtatggtttggcaggacagagatgtgtacctgcaaggacccatttgggccaaaattcctcacacggacggcaactttcacccttctccgctgatgggagggtttggaatgaagcacccgcctcctcagatcctcatcaaaaacacacctgtacctgcggatcctccaacggccttcaacaaggacaagctgaactctttcatcacccagtattctactggccaagtcagcgtggagatcgagtgggagctgcagaaggaaaacagcaagcgctggaacccggagatccagtacacttccaactattacaagtctaataatgttgaatttgctgttaatactgaaggtgtatatagtgaaccccgccccattggcaccagatacctgactcgtaatctgtaa

SEQ ID NO: 966 - DNA, 2313 bp, Artificial Sequence
  Description of Artificial Sequence: Synthetic polynucleotide
ctggctgccgatggttatcttccagattggctcgaggacaaccttagtgaaggaattcgcgagtggtgggctttgaaacctggagcccctcaacccaaggcaaatcaacaacatcaagacaacgctcgaggtcttgtgcttccgggttacaaataccttggacccggcaacggactcgacaagggggagccggtcaacgcagcagacgcggcggccctcgagcacgacaaggcctacgaccagcagctcaaggccggagacaacccgtacctcaagtacaaccacgccgacgccgagttccaggagcggctcaaagaagatacgtcttttgggggcaacctcgggcgagcagtcttccaggccaaaaagaggcttcttgaacctcttggtctggttgaggaagcggctaagatgtataccatctggatgcccgagaaccccaggcccggtaccccctgcgacatcttcaccaacagcaggggcaagcgagccagcaacggcggcggcggcggcagcgctcctggaaagaagaggcctgtagagcagtctcctcaggaaccggactcctccgcgggtattggcaaatcgggtgcacagcccgctaaaaagagactcaatttcggtcagactggcgacacagagtcagtcccagaccctcaaccaatcggagaacctcccgcagccccctcaggtgtgggatctcttacaatggcttcaggtggtggcgcaccagtggcagacaataacgaaggtgccgatggagtgggtagttcctcgggaaattggcattgcgattcccaatggctgggggacagagtcatcaccaccagcacccgaacctgggccctgcccacctacaacaatcacctctacaagcaaatctccaacagcacatctggaggatcttcaaatgacaacgcctacttcggctacagcaccccctgggggtattttgacttcaacagattccactgccacttctcaccacgtgactggcagcgactcatcaacaacaactggggattccggcctaagcgactcaacttcaagctcttcaacattcaggtcaaagaggttacggacaacaatggagtcaagaccatcgccaataaccttaccagcacggtccaggtcttcacggactcagactatcagctcccgtacgtgctcgggtcggctcacgagggctgcctcccgccgttcccagcggacgttttcatgattcctcagtacgggtatctgacgcttaatgatggaagccaggccgtgggtcgttcgtccttttactgcctggaatatttcccgtcgcaaatgctaagaacgggtaacaacttccagttcaactacgagtttgagaacgtacctttccatagcagctacgctcacagccaaagcctggaccgactaatgaatccactcatcgaccaatacttgtactatctctcaaagactattaacgattctggacagaatcaacaaacgctaaaattcagtgtggccggacccagcaacatggctgtccagggaagaaactacatacctggacccagctaccgacaacaacgtgtctcaaccactgtgactcaaaacaacaacagcgaatttgcttggcctggagcttcttcttgggctctcaatggacgtaatagcttgatgaatcctggacctgctatggccagccacaaagaaggagaggaccgtttctttcctttgtctggatctttaatttttggcaaacaaggaactggaagagacaacgtggatgcggacgaagtcatgataaccaacgaagaagaaattaaaactactaacccggtagcaacggagtcctatggacaagtggccataaaccaccagagtgcccaagcacaggcgcagaccggctgggttcaaaaccaaggaatacttccgggtatggtttggcaggacagagatgtgtacctgcaaggacccatttgggccaaaattcctcacacggacggcaactttcacccttctccgctgatgggagggtttggaatgaagcacccgcctcctcagatcctcatcaaaaacacacctgtacctgcggatcctccaacggccttcaacaaggacaagctgaactctttcatcacccagtattctactggccaagtcagcgtggagatcgagtgggagctgcagaaggaaaacagcaagcgctggaacccggagatccagtacacttccaactattacaagtctaataatgttgaatttgctgttaatactgaaggtgtatatagtgaaccccgccccattggcaccagatacctgactcgtaatctgtaa

SEQ ID NO: 967 - DNA, 2283 bp, Artificial Sequence
  Description of Artificial Sequence: Synthetic polynucleotide
ctggctgccgatggttatcttccagattggctcgaggacaaccttagtgaaggaattcgcgagtggtgggctttgaaacctggagcccctcaacccaaggcaaatcaacaacatcaagacaacgctcgaggtcttgtgcttccgggttacaaataccttggacccggcaacggactcgacaagggggagccggtcaacgcagcagacgcggcggccctcgagcacgacaaggcctacgaccagcagctcaaggccggagacaacccgtacctcaagtacaaccacgccgacgccgagttccaggagcggctcaaagaagatacgtcttttgggggcaacctcgggcgagcagtcttccaggccaaaaagaggcttcttgaacctcttggtctggttgaggaagcggctaagatgaccttcttctacggcggcagcaggggcaagaggaacaacttcaagaccgaggagtacggcggcggcggcagcgctcctggaaagaagaggcctgtagagcagtctcctcaggaaccggactcctccgcgggtattggcaaatcgggtgcacagcccgctaaaaagagactcaatttcggtcagactggcgacacagagtcagtcccagaccctcaaccaatcggagaacctcccgcagccccctcaggtgtgggatctcttacaatggcttcaggtggtggcgcaccagtggcagacaataacgaaggtgccgatggagtgggtagttcctcgggaaattggcattgcgattcccaatggctgggggacagagtcatcaccaccagcacccgaacctgggccctgcccacctacaacaatcacctctacaagcaaatctccaacagcacatctggaggatcttcaaatgacaacgcctacttcggctacagcaccccctgggggtattttgacttcaacagattccactgccacttctcaccacgtgactggcagcgactcatcaacaacaactggggattccggcctaagcgactcaacttcaagctcttcaacattcaggtcaaagaggttacggacaacaatggagtcaagaccatcgccaataaccttaccagcacggtccaggtcttcacggactcagactatcagctcccgtacgtgctcgggtcggctcacgagggctgcctcccgccgttcccagcggacgttttcatgattcctcagtacgggtatctgacgcttaatgatggaagccaggccgtgggtcgttcgtccttttactgcctggaatatttcccgtcgcaaatgctaagaacgggtaacaacttccagttcaactacgagtttgagaacgtacctttccatagcagctacgctcacagccaaagcctggaccgactaatgaatccactcatcgaccaatacttgtactatctctcaaagactattaacgattctggacagaatcaacaaacgctaaaattcagtgtggccggacccagcaacatggctgtccagggaagaaactacatacctggacccagctaccgacaacaacgtgtctcaaccactgtgactcaaaacaacaacagcgaatttgcttggcctggagcttcttcttgggctctcaatggacgtaatagcttgatgaatcctggacctgctatggccagccacaaagaaggagaggaccgtttctttcctttgtctggatctttaatttttggcaaacaaggaactggaagagacaacgtggatgcggacgaagtcatgataaccaacgaagaagaaattaaaactactaacccggtagcaacggagtcctatggacaagtggccataaaccaccagagtgcccaagcacaggcgcagaccggctgggttcaaaaccaaggaatacttccgggtatggtttggcaggacagagatgtgtacctgcaaggacccatttgggccaaaattcctcacacggacggcaactttcacccttctccgctgatgggagggtttggaatgaagcacccgcctcctcagatcctcatcaaaaacacacctgtacctgcggatcctccaacggccttcaacaaggacaagctgaactctttcatcacccagtattctactggccaagtcagcgtggagatcgagtgggagctgcagaaggaaaacagcaagcgctggaacccggagatccagtacacttccaactattacaagtctaataatgttgaatttgctgttaatactgaaggtgtatatagtgaaccccgccccattggcaccagatacctgactcgtaatctgtaa

SEQ ID NO: 968 - DNA, 2283 bp, Artificial Sequence
  Description of Artificial Sequence: Synthetic polynucleotide
ctggctgccgatggttatcttccagattggctcgaggacaaccttagtgaaggaattcgcgagtggtgggctttgaaacctggagcccctcaacccaaggcaaatcaacaacatcaagacaacgctcgaggtcttgtgcttccgggttacaaataccttggacccggcaacggactcgacaagggggagccggtcaacgcagcagacgcggcggccctcgagcacgacaaggcctacgaccagcagctcaaggccggagacaacccgtacctcaagtacaaccacgccgacgccgagttccaggagcggctcaaagaagatacgtcttttgggggcaacctcgggcgagcagtcttccaggccaaaaagaggcttcttgaacctcttggtctggttgaggaagcggctaagatggcagctgcggccgccgcggctgcagcggctgcagccgccgcagctgcggctgcagcgggcggcggcggcagcgctcctggaaagaagaggcctgtagagcagtctcctcaggaaccggactcctccgcgggtattggcaaatcgggtgcacagcccgctaaaaagagactcaatttcggtcagactggcgacacagagtcagtcccagaccctcaaccaatcggagaacctcccgcagccccctcaggtgtgggatctcttacaatggcttcaggtggtggcgcaccagtggcagacaataacgaaggtgccgatggagtgggtagttcctcgggaaattggcattgcgattcccaatggctgggggacagagtcatcaccaccagcacccgaacctgggccctgcccacctacaacaatcacctctacaagcaaatctccaacagcacatctggaggatcttcaaatgacaacgcctacttcggctacagcaccccctgggggtattttgacttcaacagattccactgccacttctcaccacgtgactggcagcgactcatcaacaacaactggggattccggcctaagcgactcaacttcaagctcttcaacattcaggtcaaagaggttacggacaacaatggagtcaagaccatcgccaataaccttaccagcacggtccaggtcttcacggactcagactatcagctcccgtacgtgctcgggtcggctcacgagggctgcctcccgccgttcccagcggacgttttcatgattcctcagtacgggtatctgacgcttaatgatggaagccaggccgtgggtcgttcgtccttttactgcctggaatatttcccgtcgcaaatgctaagaacgggtaacaacttccagttcaactacgagtttgagaacgtacctttccatagcagctacgctcacagccaaagcctggaccgactaatgaatccactcatcgaccaatacttgtactatctctcaaagactattaacgattctggacagaatcaacaaacgctaaaattcagtgtggccggacccagcaacatggctgtccagggaagaaactacatacctggacccagctaccgacaacaacgtgtctcaaccactgtgactcaaaacaacaacagcgaatttgcttggcctggagcttcttcttgggctctcaatggacgtaatagcttgatgaatcctggacctgctatggccagccacaaagaaggagaggaccgtttctttcctttgtctggatctttaatttttggcaaacaaggaactggaagagacaacgtggatgcggacgaagtcatgataaccaacgaagaagaaattaaaactactaacccggtagcaacggagtcctatggacaagtggccataaaccaccagagtgcccaagcacaggcgcagaccggctgggttcaaaaccaaggaatacttccgggtatggtttggcaggacagagatgtgtacctgcaaggacccatttgggccaaaattcctcacacggacggcaactttcacccttctccgctgatgggagggtttggaatgaagcacccgcctcctcagatcctcatcaaaaacacacctgtacctgcggatcctccaacggccttcaacaaggacaagctgaactctttcatcacccagtattctactggccaagtcagcgtggagatcgagtgggagctgcagaaggaaaacagcaagcgctggaacccggagatccagtacacttccaactattacaagtctaataatgttgaatttgctgttaatactgaaggtgtatatagtgaaccccgccccattggcaccagatacctgactcgtaatctgtaa

SEQ ID NO: 969 - protein, 726 aa, Artificial Sequence
  Description of Artificial Sequence: Synthetic polypeptide
MEVQLQASGGGLVQAGGSLRLSCAASGFKITHYTMGWFRQAPGKEREFVSRITWGGDNTFYSNSVKGRFTISRDNAKNTVYLQMNSLKPEDTADYYCAAGSTSTATPLRVDYWGKGTQVTVSSGGGGSAPGKKRPVEQSPQEPDSSSGIGKTGQQPAKKRLNFGQTGDSESVPDPQPLGEPPAAPSGLGPNTMASGGGAPMADNNEGADGVGNSSGNWHCDSTWLGDRVITTSTRTWALPTYNNHLYKQISNGTSGGSTNDNTYFGYSTPWGYFDFNRFHCHFSPRDWQRLINNNWGFRPKRLNFKLFNIQVKEVTTNEGTKTIANNLTSTVQVFTDSEYQLPYVLGSAHQGCLPPFPADVFMVPQYGYLTLNNGSQALGRSSFYCLEYFPSQMLRTGNNFQFSYTFEDVPFHSSYAHSQSLDRLMNPLIDQYLYYLVRTQTTGTGGTQTLAFSQAGPSSMANQARNWVPGPCYRQQRVSTTTNQNNNSNFAWTGAAKFKLNGRDSLMNPGVAMASHKDDDDRFFPSSGVLIFGKQGAGNDGVDYSQVLITDEEEIKATNPVATEEYGAVAINNQAANTQAQTGLVHNQGVIPGMVWQNRDVYLQGPIWAKIPHTDGNFHPSPLMGGFGLKHPPPQILIKNTPVPADPPLTFNQAKLNSFITQYSTGQVSVEIEWELQKENSKRWNPEIQYTSNYYKSTNVDFAVNTEGVYSEPRPIGTRYLTRNL

SEQ ID NO: 970 - protein, 729 aa, Artificial Sequence
  Description of Artificial Sequence: Synthetic polypeptide
MEVQLQASGGGLVQAGGSLRLSCSASVRTFSIYAMGWFRQAPGKEREFVAGINRSGDVTKYADFVKGRFSISRDNAKNMVYLQMNSLKPEDTALYYCAATWAYDTVGALTSGYNFWGQGTQVTVSSGGGGSAPGKKRPVEQSPQEPDSSSGIGKTGQQPAKKRLNFGQTGDSESVPDPQPLGEPPAAPSGLGPNTMASGGGAPMADNNEGADGVGNSSGNWHCDSTWLGDRVITTSTRTWALPTYNNHLYKQISNGTSGGSTNDNTYFGYSTPWGYFDFNRFHCHFSPRDWQRLINNNWGFRPKRLNFKLFNIQVKEVTTNEGTKTIANNLTSTVQVFTDSEYQLPYVLGSAHQGCLPPFPADVFMVPQYGYLTLNNGSQALGRSSFYCLEYFPSQMLRTGNNFQFSYTFEDVPFHSSYAHSQSLDRLMNPLIDQYLYYLVRTQTTGTGGTQTLAFSQAGPSSMANQARNWVPGPCYRQQRVSTTTNQNNNSNFAWTGAAKFKLNGRDSLMNPGVAMASHKDDDDRFFPSSGVLIFGKQGAGNDGVDYSQVLITDEEEIKATNPVATEEYGAVAINNQAANTQAQTGLVHNQGVIPGMVWQNRDVYLQGPIWAKIPHTDGNFHPSPLMGGFGLKHPPPQILIKNTPVPADPPLTFNQAKLNSFITQYSTGQVSVEIEWELQKENSKRWNPEIQYTSNYYKSTNVDFAVNTEGVYSEPRPIGTRYLTRNL

SEQ ID NO: 971 - protein, 651 aa, Artificial Sequence
  Description of Artificial Sequence: Synthetic polypeptide
MPSSVIDALQYKLEGTTRLTRKRGLKLATALSLSNKFVEGSPSGGGGSGGGGSAPGKKRPVEQSPQEPDSSSGIGKTGQQPAKKRLNFGQTGDSESVPDPQPLGEPPAAPSGLGPNTMASGGGAPMADNNEGADGVGNSSGNWHCDSTWLGDRVITTSTRTWALPTYNNHLYKQISNGTSGGSTNDNTYFGYSTPWGYFDFNRFHCHFSPRDWQRLINNNWGFRPKRLNFKLFNIQVKEVTTNEGTKTIANNLTSTVQVFTDSEYQLPYVLGSAHQGCLPPFPADVFMVPQYGYLTLNNGSQALGRSSFYCLEYFPSQMLRTGNNFQFSYTFEDVPFHSSYAHSQSLDRLMNPLIDQYLYYLVRTQTTGTGGTQTLAFSQAGPSSMANQARNWVPGPCYRQQRVSTTTNQNNNSNFAWTGAAKFKLNGRDSLMNPGVAMASHKDDDDRFFPSSGVLIFGKQGAGNDGVDYSQVLITDEEEIKATNPVATEEYGAVAINNQAANTQAQTGLVHNQGVIPGMVWQNRDVYLQGPIWAKIPHTDGNFHPSPLMGGFGLKHPPPQILIKNTPVPADPPLTFNQAKLNSFITQYSTGQVSVEIEWELQKENSKRWNPEIQYTSNYYKSTNVDFAVNTEGVYSEPRPIGTRYLTRNL

SEQ ID NO: 972 - protein, 638 aa, Artificial Sequence
  Description of Artificial Sequence: Synthetic polypeptide
MYTIWMPENPRPGTPCDIFTNSRGKRASNGGGGGSGGGGSAPGKKRPVEQSPQEPDSSSGIGKTGQQPAKKRLNFGQTGDSESVPDPQPLGEPPAAPSGLGPNTMASGGGAPMADNNEGADGVGNSSGNWHCDSTWLGDRVITTSTRTWALPTYNNHLYKQISNGTSGGSTNDNTYFGYSTPWGYFDFNRFHCHFSPRDWQRLINNNWGFRPKRLNFKLFNIQVKEVTTNEGTKTIANNLTSTVQVFTDSEYQLPYVLGSAHQGCLPPFPADVFMVPQYGYLTLNNGSQALGRSSFYCLEYFPSQMLRTGNNFQFSYTFEDVPFHSSYAHSQSLDRLMNPLIDQYLYYLVRTQTTGTGGTQTLAFSQAGPSSMANQARNWVPGPCYRQQRVSTTTNQNNNSNFAWTGAAKFKLNGRDSLMNPGVAMASHKDDDDRFFPSSGVLIFGKQGAGNDGVDYSQVLITDEEEIKATNPVATEEYGAVAINNQAANTQAQTGLVHNQGVIPGMVWQNRDVYLQGPIWAKIPHTDGNFHPSPLMGGFGLKHPPPQILIKNTPVPADPPLTFNQAKLNSFITQYSTGQVSVEIEWELQKENSKRWNPEIQYTSNYYKSTNVDFAVNTEGVYSEPRPIGTRYLTRNL

SEQ ID NO: 973 - protein, 628 aa, Artificial Sequence
  Description of Artificial Sequence: Synthetic polypeptide
MTFFYGGSRGKRNNFKTEEYGGGGSGGGGSAPGKKRPVEQSPQEPDSSSGIGKTGQQPAKKRLNFGQTGDSESVPDPQPLGEPPAAPSGLGPNTMASGGGAPMADNNEGADGVGNSSGNWHCDSTWLGDRVITTSTRTWALPTYNNHLYKQISNGTSGGSTNDNTYFGYSTPWGYFDFNRFHCHFSPRDWQRLINNNWGFRPKRLNFKLFNIQVKEVTTNEGTKTIANNLTSTVQVFTDSEYQLPYVLGSAHQGCLPPFPADVFMVPQYGYLTLNNGSQALGRSSFYCLEYFPSQMLRTGNNFQFSYTFEDVPFHSSYAHSQSLDRLMNPLIDQYLYYLVRTQTTGTGGTQTLAFSQAGPSSMANQARNWVPGPCYRQQRVSTTTNQNNNSNFAWTGAAKFKLNGRDSLMNPGVAMASHKDDDDRFFPSSGVLIFGKQGAGNDGVDYSQVLITDEEEIKATNPVATEEYGAVAINNQAANTQAQTGLVHNQGVIPGMVWQNRDVYLQGPIWAKIPHTDGNFHPSPLMGGFGLKHPPPQILIKNTPVPADPPLTFNQAKLNSFITQYSTGQVSVEIEWELQKENSKRWNPEIQYTSNYYKSTNVDFAVNTEGVYSEPRPIGTRYLTRNL

SEQ ID NO: 974 - protein, 621 aa, Artificial Sequence
  Description of Artificial Sequence: Synthetic polypeptide
MNNQKIVNLKEKVAQLEAGGGGSAPGKKRPVEQSPQEPDSSAGIGKSGAQPAKKRLNFGQTGDTESVPDPQPIGEPPAAPSGVGSLTMASGGGAPVADNNEGADGVGSSSGNWHCDSQWLGDRVITTSTRTWALPTYNNHLYKQISNSTSGGSSNDNAYFGYSTPWGYFDFNRFHCHFSPRDWQRLINNNWGFRPKRLNFKLFNIQVKEVTDNNGVKTIANNLTSTVQVFTDSDYQLPYVLGSAHEGCLPPFPADVFMIPQYGYLTLNDGSQAVGRSSFYCLEYFPSQMLRTGNNFQFNYEFENVPFHSSYAHSQSLDRLMNPLIDQYLYYLSKTINDSGQNQQTLKFSVAGPSNMAVQGRNYIPGPSYRQQRVSTTVTQNNNSEFAWPGASSWALNGRNSLMNPGPAMASHKEGEDRFFPLSGSLIFGKQGTGRDNVDADEVMITNEEEIKTTNPVATESYGQVAINHQSAQAQAQTGWVQNQGILPGMVWQDRDVYLQGPIWAKIPHTDGNFHPSPLMGGFGMKHPPPQILIKNTPVPADPPTAFNKDKLNSFITQYSTGQVSVEIEWELQKENSKRWNPEIQYTSNYYKSNNVEFAVNTEGVYSEPRPIGTRYLTRNL

SEQ ID NO: 975 - protein, 633 aa, Artificial Sequence
  Description of Artificial Sequence: Synthetic polypeptide
MYTIWMPENPRPGTPCDIFTNSRGKRASNGGGGGSAPGKKRPVEQSPQEPDSSAGIGKSGAQPAKKRLNFGQTGDTESVPDPQPIGEPPAAPSGVGSLTMASGGGAPVADNNEGADGVGSSSGNWHCDSQWLGDRVITTSTRTWALPTYNNHLYKQISNSTSGGSSNDNAYFGYSTPWGYFDFNRFHCHFSPRDWQRLINNNWGFRPKRLNFKLFNIQVKEVTDNNGVKTIANNLTSTVQVFTDSDYQLPYVLGSAHEGCLPPFPADVFMIPQYGYLTLNDGSQAVGRSSFYCLEYFPSQMLRTGNNFQFNYEFENVPFHSSYAHSQSLDRLMNPLIDQYLYYLSKTINDSGQNQQTLKFSVAGPSNMAVQGRNYIPGPSYRQQRVSTTVTQNNNSEFAWPGASSWALNGRNSLMNPGPAMASHKEGEDRFFPLSGSLIFGKQGTGRDNVDADEVMITNEEEIKTTNPVATESYGQVAINHQSAQAQAQTGWVQNQGILPGMVWQDRDVYLQGPIWAKIPHTDGNFHPSPLMGGFGMKHPPPQILIKNTPVPADPPTAFNKDKLNSFITQYSTGQVSVEIEWELQKENSKRWNPEIQYTSNYYKSNNVEFAVNTEGVYSEPRPIGTRYLTRNL

SEQ ID NO: 976 - protein, 623 aa, Artificial Sequence
  Description of Artificial Sequence: Synthetic polypeptide
MTFFYGGSRGKRNNFKTEEYGGGGSAPGKKRPVEQSPQEPDSSAGIGKSGAQPAKKRLNFGQTGDTESVPDPQPIGEPPAAPSGVGSLTMASGGGAPVADNNEGADGVGSSSGNWHCDSQWLGDRVITTSTRTWALPTYNNHLYKQISNSTSGGSSNDNAYFGYSTPWGYFDFNRFHCHFSPRDWQRLINNNWGFRPKRLNFKLFNIQVKEVTDNNGVKTIANNLTSTVQVFTDSDYQLPYVLGSAHEGCLPPFPADVFMIPQYGYLTLNDGSQAVGRSSFYCLEYFPSQMLRTGNNFQFNYEFENVPFHSSYAHSQSLDRLMNPLIDQYLYYLSKTINDSGQNQQTLKFSVAGPSNMAVQGRNYIPGPSYRQQRVSTTVTQNNNSEFAWPGASSWALNGRNSLMNPGPAMASHKEGEDRFFPLSGSLIFGKQGTGRDNVDADEVMITNEEEIKTTNPVATESYGQVAINHQSAQAQAQTGWVQNQGILPGMVWQDRDVYLQGPIWAKIPHTDGNFHPSPLMGGFGMKHPPPQILIKNTPVPADPPTAFNKDKLNSFITQYSTGQVSVEIEWELQKENSKRWNPEIQYTSNYYKSNNVEFAVNTEGVYSEPRPIGTRYLTRNL

SEQ ID NO: 977 - protein, 623 aa, Artificial Sequence
  Description of Artificial Sequence: Synthetic polypeptide
MAAAAAAAAAAAAAAAAAAAGGGGSAPGKKRPVEQSPQEPDSSAGIGKSGAQPAKKRLNFGQTGDTESVPDPQPIGEPPAAPSGVGSLTMASGGGAPVADNNEGADGVGSSSGNWHCDSQWLGDRVITTSTRTWALPTYNNHLYKQISNSTSGGSSNDNAYFGYSTPWGYFDFNRFHCHFSPRDWQRLINNNWGFRPKRLNFKLFNIQVKEVTDNNGVKTIANNLTSTVQVFTDSDYQLPYVLGSAHEGCLPPFPADVFMIPQYGYLTLNDGSQAVGRSSFYCLEYFPSQMLRTGNNFQFNYEFENVPFHSSYAHSQSLDRLMNPLIDQYLYYLSKTINDSGQNQQTLKFSVAGPSNMAVQGRNYIPGPSYRQQRVSTTVTQNNNSEFAWPGASSWALNGRNSLMNPGPAMASHKEGEDRFFPLSGSLIFGKQGTGRDNVDADEVMITNEEEIKTTNPVATESYGQVAINHQSAQAQAQTGWVQNQGILPGMVWQDRDVYLQGPIWAKIPHTDGNFHPSPLMGGFGMKHPPPQILIKNTPVPADPPTAFNKDKLNSFITQYSTGQVSVEIEWELQKENSKRWNPEIQYTSNYYKSNNVEFAVNTEGVYSEPRPIGTRYLTRNL

SEQ ID NO: 978 - DNA, 2214 bp, Artificial Sequence
  Description of Artificial Sequence: Synthetic polynucleotide
atggctgccgatggttatcttccagattggctcgaggacaacctctctgagggcattcgcgagtggtgggacttgaaacctggagccccgaagcccaaagccaaccagcaaaagcaggacgacggccggggtctggtgcttcctggctacaagtacctcggacccttcaacggactcgacaagggggagcccgtcaacgcggcggacgcagcggccctcgagcacgacaaggcctacgaccagcagctcaaagcgggtgacaatccgtacctgcggtataaccacgccgacgtcgagtttcaggagcgtctgcaagaagatacgtcttttgggggcaacctcgggcgagcagtcttccaggccaagaagagggttctcgaaccttttggtctggttgaggaaggcgctaagacggctcctggaaagaaacgtccggtagagcagtcgccacaagagccagactcctcctcgggcatcggcaagaaaggccaacagcccgccagaaaaagactcaattttggccagactggcgactcagagtcagttccagaccctcaacctctcggagaacctccagcagcgccctctggtgtgggacctaatacaatggctgcaggcggtggcgcaccaatggcagacaataacgagggcgccgacggagtgggtaattcctcgggaaattggcattgcgattccacatggatgggggacagagtcatcaccaccagcacccgaacctgggccctgcccacctacaacaaccacctctacaagcaaatctccaacggcacctcgggaggaagcaccaacgacaacacctattttggctacagcaccccctgggggtattttgatttcaacagattccactgccacttctcaccacgtgactggcagcgactcatcaacaacaactggggattccggccaaaaagactcagcttcaagctcttcaacatccaggtcaaggaggtcacgcagaatgaaggcaccaagaccatcgccaataaccttaccagcacgattcaggtatttacggactcggaataccagctgccatacgtcctcggctccgcgcaccagggctgcctgcctccgttcccggcggacgtcttcatgattccccagtacggctaccttacactgaacaatggaagtcaagccgtaggccgttcctccttctactgcctggaatattttccttctcaaatgctgagaacgggcaacaactttgagttcagctaccagtttgaggacgtgccttttcacagcagctacgcgcacagccaaagcctggaccggctgatgaaccccctcatcgaccagtacctgtactacctgtctcggactcagtccacgggaggtaccgcaagaactcagcagttgctattttctcaggccgggcctaatacaatggccaatcaggcaaagaactggctgccaggaccctgttaccgccaacaacgcgtctcaacgacaaccgggcaaaacaacaatagcaactctgcctggactgctgggaccaaataccatctgaatggaagaaattcattggctaatcctggcatcgctatggcaacacacaaagacgacgaggagcgtttttttcccagtaacgggatcctgatttttggcaaacaaaatgctgccagagacaatgcggattacagcgatgtcatgctcaccagcgaggaagaaatcaaaaccactaaccctgtggctacagaggaatacggtatcgtggcagataacttgcagcagcaaaacacggctcctcaaattggaactgtcaacagccagggggccttacccggtatggtctggcagaaccgggacgtgtacctgcagggtcccatctgggccaagattcctcacacggacggcaacttccacccatctccgctgatgggcggctttggcctgaaacatcctccgcctcagatcctgatcaagaacacgcctgtacctgcggatcctccgaccaccttcaaccagtcaaagctgaactctttcatcacgcaatacagcaccggacaggtcagcgtggaaattgaatgggagctacagaaggaaaacagcaagcgctggaaccccgagatccagtacacctccaactactacaaatctacaagtgtggactttgctgttaatacagaaggcgtgtactctgaaccccgccccattggcacccgttacctcacccgtaatctgtaa

SEQ ID NO: 979 - DNA, 2214 bp, Artificial Sequence
  Description of Artificial Sequence: Synthetic polynucleotide
atggctgccgatggttatcttccagattggctcgaggacaacctctctgagggcattcgcgagtggtgggcgctgaaacctggagccccgaagcccaaagccaaccagcaaaagcaggacgacggccggggtctggtgcttcctggctacaagtacctcggacccttcaacggactcgacaagggggagcccgtcaacgcggcggacgcagcggccctcgagcacgacaaggcctacgaccagcagctcaaagcgggtgacaatccgtacctgcggtataaccacgccgacgccgagtttcaggagcgtctgcaagaagatacgtcttttgggggcaacctcgggcgagcagtcttccaggccaagaagcgggttctcgaacctctcggtctggttgaggacggcgctaagacggctcctggaaagaagagaccagtagagcagtcaccccaagaaccagactcctcctcgggcatcggcaagaaaggccaacagcccgccagaaaaagactcaattttggccagactggcgactcagagtcagttccagaccctcaacctctcggagaacctccagcaacccccgctgctgtgggacctactacaatggcttcaggcggtggcgcaccaatggcagacaataacgaaggcgccgacggagtgggtagttcctcgggaaattggcattgcgattccacatggctgggcgacagagtcatcaccaccagcacccgaacctgggccctgcccacctacaacaaccacctctacaagcaaatctccaacgggacatcgggaggagccaccaacgacaacacctacttcggctacagcaccccctgggggtattttgactttaacagattccactgccacttttcaccacgtgactggcagcgactcatcaacaacaactggggattccggcccaagagactcagcttcaagctcttcaacatccaggtcaaggaggtcacgcagaatgaaggcaccaagaccatcgccaataacctcaccagcaccatccaggtgtttacggactcggagtaccagctgccgtacgttctcggctctgcccaccagggctgcctgcctccgttcccggcggacgtgttcatgattccccagtacggctacctaacactcaacaacggtagtcaggccgtgggacgctcctccttctactgcctggaatactttccttcgcagatgctgagaaccggcaacaacttccagtttacttacaccttcgaggacgtgcctttccacagcagctacgcccacagccagagcttggaccggctgatgaatcctctgattgaccagtacctgtactacttgtctcggactcaaacaacaggaggcacggcaaatacgcagactctgggcttcagccaaggtgggcctaatacaatggccaatcaggcaaagaactggctgccaggaccctgttaccgccaacaacgcgtctcaacgacaaccgggcaaaacaacaatagcaactttgcctggactgctgggaccaaataccatctgaatggaagaaattcattggctaatcctggcatcgctatggcaacacacaaggacgacgaggagcgtttttttcccagtaacgggatcctgatttttggcaaacaaaatgctgccagagacaatgcggattacagcgatgtcatgctcaccagcgaggaagaaatcaaaaccactaaccctgtggctacagaggaatacggtatcgtggcagataacttgcagcagcaaaacacggctcctcaaattggaactgtcaacagccagggggccttacccggtatggtctggcagaaccgggacgtgtacctgcagggtcccatctgggccaagattcctcacacggacggcaacttccacccgtctccgctgatgggcggctttggcctgaaacatcctccgcctcagatcctgatcaagaacacgcctgtacctgcggatcctccgaccaccttcaaccagtcaaagctgaactctttcatcacgcaatacagcaccggacaggtcagcgtggaaatcgagtgggagctgcagaaagaaaacagcaagcgctggaaccccgagatccagtacacctccaactactacaaatctacaaatgtggactttgctgtcaacacggagggggtttatagcgagcctcgccccattggcacccgttacctcacccgcaacctgtaa

SEQ ID NO: 980 - DNA, 2211 bp, Artificial Sequence
  Description of Artificial Sequence: Synthetic polynucleotide
  modified_base (715)..(715): a, c, g, or t
atggctgccgatggttatcttccagattggctcgaggacaacctctctgagggcattcgcgagtggtgggcgctgaaacctggagccccgaagcccaaagccaaccagcaaaagcaggacgacggccggggtctggtgcttcctggctacaagtacctcggacccttcaacggactcgacaagggggagcccgtcaacgcggcggacgcagcggccctcgagcacgacaaggcctacgaccagcagctcaaagcgggtgacaatccgtacctgcggtataaccacgccgacgccgagtttcaggagcgtctgcaagaagatacgtcttttgggggcaacctcgggcgagcagtcttccaggccaagaagcgggttctcgaacctctcggtctggttgaggaaggcgctaagacggctcctggaaagaaacgtccggtagagcagtcgccacaagagccagactcctcctcgggcatcggcaagacaggccagcagcccgctaaaaagaggctcaattttggtcagactggcgactcagagtcagtccccgacccacaacctctcggagaacctccagcaacccccgctgctgtgggacctactacaatggcttcaggcggtggcgcaccaatggcagacaataacgaaggcgccgacggagtgggtaatgcctcaggaaattggcattgcgattccacatggctgggcgacagantcatcaccaccagcacccgaacatgggccttgcccacctataacaaccacctctacaagcaaatctccagtgcttcaacgggggccagcaacgacaaccactacttcggctacagcaccccctgggggtattttgatttcaacagattccactgccatttctcaccacgtgactggcagcgactcatcaacaacaattggggattccggcccaagagactcaacttcaagctcttcaacatccaagtcaaggaggtcacgcagaatgaaggcaccaagaccatcgccaataacctcaccagcaccatccaggtgtttacggactcggagtaccagctgccgtacgttctcggctctgcccaccagggctgcctgcctccgttcccggcggacgtgttcatgattccccagtacggctacctaacactcaacaacggtagtcaggccgtgggacgctcctccttctactgcctggaatattttccatctcaaatgctgcgaactggaaacaattttgaattcagctacaccttcgaggacgtgcctttccacagcagctacgcacacagccagagcttggaccgactgatgaatcctctcatcgaccagtacctgtactacttgtctcggactcaaacaacaggaggcacggcaaatacgcagactctgggcttcagccaaggtgggcctaatacaatggccaatcaggcaaagaactggctgccaggaccctgttaccgccaacaacgcgtctcaacgacaaccgggcaaaacaacaatagcaactttgcctggactgctgggaccaaataccatctgaatggaagaaattcattggctaatcctggcatcgctatggcaacacacaaagacgacgaggagcgtttttttcccagtaacgggatcctgatttttggcaaacaaaatgctgccagagacaatgcggattacagcgatgtcatgctcaccagcgaggaagaaatcaaaaccactaaccctgtggctacagaggaatacggtatcgtggcagataacttgcagcagcaaaacacggctcctcaaattggaactgtcaacagccaggggaccttacccggtatggtctggcagaaccgggacgtgtacctgcagggtcccatctgggccaagattcctcacacggacggcaacttccacccgtctccgctgatgggcggctttggcctgaaacatcctccgcctcagatcctgatcaagaacacgcctgtacctgcggatcctccgaccaccttcaaccagtcaaagctgaactctttcatcacgcaatacagcaccggacaggtcagcgtggaaattgaatgggagctacagaaggaaaacagcaagcgctggaaccccgagatccagtacacctccaattactacaaatctacaagtgtggactttgctgttaatacagaaggcgtgtactctgaaccccgccccattggcacgcgtttcctcacccgtaatctgtaa

SEQ ID NO: 981 - DNA, 2214 bp, Artificial Sequence
  Description of Artificial Sequence: Synthetic polynucleotide
atggctgccgatggttatcttccagattggctcgaggacaacctctctgagggcattcgcgagtggtgggcgctgaaacctggagccccgaagcccaaagccaaccagcaaaagcaggacgacggccggggtctggtgcttcctggctacaagtacctcggacccttcaacggactcgacaagggggagcccgtcaacgcggcggacgcagcggccctcgagcacgacaaggcctacgaccagcagctcaaagcgggtgacaatccgtacctgcggtataaccacgccgacgccgagtttcaggagcgtctgcaagaagatacgtcttttgggggcaacctcgggcgagcagtcttccaggccaagaagcgggttctcgaacctctcggtctggttgaggaaggcgctaagacggctcctggaaagaaacgtccggtagagcagtcgccacaagagccagactcctcctcgggcatcggcaagacaggccagcagcccgctaaaaagaggctcaattttggccagactggcgactcagagtcagttccagaccctcaacctctcggagaacctccagcagcgccctctggtgtgggacctaatacaatggctgcaggcggtggcgcaccaatggcagacaataacgaaggcgccgacggagtgggtagttcctcgggaaattggcattgcgattccacatggctgggcgacagagtcatcaccaccagcacccgaacctgggccctgcccacctacaacaaccacctctacaagcaaatctccaacgggacatcgggaggagccaccaacgacaacacctacttcggctacagcaccccctgggggtattttgactttaacagattccactgccacttttcaccacgtgactggcagcgactcatcaacaacaactggggattccggcccaagagactcagcttcaagctcttcaacatccaggtcaaggaggtcacgcagaatgaaggcaccaagaccatcgccaataacctcaccagcaccatccaggtgtttacggactcggagtaccagctgccgtacgtactaggatccgctcaccagggatgtctgcctccgttcccggcggacgtgttcatgattccccagtacggctacctaacactcaacaacggtagtcaggccgtgggacgctcctccttctactgcctggaatattttccatctcagatgctgagaacgggcaataactttaccttcagctacaccttcgaggacgtgcctttccacagcagctatgcccacagccagagcttggaccggctgatgaatcctctgattgaccagtacctgtactacttgtctcggactcaaacaacaggaggcacggcaaatacgcagactctgggcttcagccaaggtgggcctaatacaatggccaatcaggcaaagaactggctgccaggaccctgttaccgccaacaacgcgtctcaacgacaaccgggcaaaacaacaatagcaactttgcctggactgctgggaccaaataccatctgaatggaagaaattcattggctaatcctggcatcgctatggcaacacacaaagacgacgaggagcgtttttttcccagtaacgggatcctgatttttggcaaacaaaatgctgccagagacaatgcggattacagcgatgtcatgctcaccagcgaggaagaaatcaaaaccactaaccctgtggctacagaggaatacggtatcgtggcagataacttgcagcagcaaaacacggctcctcaaattggaactgtcaacagccagggggccttacccggtatggtctggcagaaccgggacgtgtacctgcagggtcccatctgggccaagattcctcacacggacggcaacttccacccgtctccgctaatgggaggatttggactgaagcacccacctcctcagatcctgatcaagaacacgccggtacctgcggatcctccgaccaccttcaaccagtcaaagctgtactctttcatcacgcaatacagcaccggacaggtcagcgtggaaattgaatgggagctgcagaaggaaaacagcaagcgctggaaccccgagatccaatacacctccaactactacaaatctacaagtgtggactttgctgttaatacagaaggcgtgtactctgaaccccgccccattggcacccgttacctcacccgtaatctgtaa

SEQ ID NO: 982 - protein, 737 aa, Artificial Sequence
  Description of Artificial Sequence: Synthetic polypeptide
MAADGYLPDWLEDNLSEGIREWWDLKPGAPKPKANQQKQDDGRGLVLPGYKYLGPFNGLDKGEPVNAADAAALEHDKAYDQQLKAGDNPYLRYNHADVEFQERLQEDTSFGGNLGRAVFQAKKRVLEPFGLVEEGAKTAPGKKRPVEQSPQEPDSSSGIGKKGQQPARKRLNFGQTGDSESVPDPQPLGEPPAAPSGVGPNTMAAGGGAPMADNNEGADGVGNSSGNWHCDSTWMGDRVITTSTRTWALPTYNNHLYKQISNGTSGGSTNDNTYFGYSTPWGYFDFNRFHCHFSPRDWQRLINNNWGFRPKRLSFKLFNIQVKEVTQNEGTKTIANNLTSTIQVFTDSEYQLPYVLGSAHQGCLPPFPADVFMIPQYGYLTLNNGSQAVGRSSFYCLEYFPSQMLRTGNNFEFSYQFEDVPFHSSYAHSQSLDRLMNPLIDQYLYYLSRTQSTGGTARTQQLLFSQAGPNTMANQAKNWLPGPCYRQQRVSTTTGQNNNSNSAWTAGTKYHLNGRNSLANPGIAMATHKDDEERFFPSNGILIFGKQNAARDNADYSDVMLTSEEEIKTTNPVATEEYGIVADNLQQQNTAPQIGTVNSQGALPGMVWQNRDVYLQGPIWAKIPHTDGNFHPSPLMGGFGLKHPPPQILIKNTPVPADPPTTFNQSKLNSFITQYSTGQVSVEIEWELQKENSKRWNPEIQYTSNYYKSTSVDFAVNTEGVYSEPRPIGTRYLTRNL

SEQ ID NO: 983 - protein, 737 aa, Artificial Sequence
  Description of Artificial Sequence: Synthetic polypeptide
MAADGYLPDWLEDNLSEGIREWWALKPGAPKPKANQQKQDDGRGLVLPGYKYLGPFNGLDKGEPVNAADAAALEHDKAYDQQLKAGDNPYLRYNHADAEFQERLQEDTSFGGNLGRAVFQAKKRVLEPLGLVEDGAKTAPGKKRPVEQSPQEPDSSSGIGKKGQQPARKRLNFGQTGDSESVPDPQPLGEPPATPAAVGPTTMASGGGAPMADNNEGADGVGSSSGNWHCDSTWLGDRVITTSTRTWALPTYNNHLYKQISNGTSGGATNDNTYFGYSTPWGYFDFNRFHCHFSPRDWQRLINNNWGFRPKRLSFKLFNIQVKEVTQNEGTKTIANNLTSTIQVFTDSEYQLPYVLGSAHQGCLPPFPADVFMIPQYGYLTLNNGSQAVGRSSFYCLEYFPSQMLRTGNNFQFTYTFEDVPFHSSYAHSQSLDRLMNPLIDQYLYYLSRTQTTGGTANTQTLGFSQGGPNTMANQAKNWLPGPCYRQQRVSTTTGQNNNSNFAWTAGTKYHLNGRNSLANPGIAMATHKDDEERFFPSNGILIFGKQNAARDNADYSDVMLTSEEEIKTTNPVATEEYGIVADNLQQQNTAPQIGTVNSQGALPGMVWQNRDVYLQGPIWAKIPHTDGNFHPSPLMGGFGLKHPPPQILIKNTPVPADPPTTFNQSKLNSFITQYSTGQVSVEIEWELQKENSKRWNPEIQYTSNYYKSTNVDFAVNTEGVYSEPRPIGTRYLTRNL

SEQ ID NO: 984 - protein, 736 aa, Artificial Sequence
  Description of Artificial Sequence: Synthetic polypeptide
  MOD_RES (239)..(239): Any naturally occurring amino acid
MAADGYLPDWLEDNLSEGIREWWALKPGAPKPKANQQKQDDGRGLVLPGYKYLGPFNGLDKGEPVNAADAAALEHDKAYDQQLKAGDNPYLRYNHADAEFQERLQEDTSFGGNLGRAVFQAKKRVLEPLGLVEEGAKTAPGKKRPVEQSPQEPDSSSGIGKTGQQPAKKRLNFGQTGDSESVPDPQPLGEPPATPAAVGPTTMASGGGAPMADNNEGADGVGNASGNWHCDSTWLGDRXITTSTRTWALPTYNNHLYKQISSASTGASNDNHYFGYSTPWGYFDFNRFHCHFSPRDWQRLINNNWGFRPKRLNFKLFNIQVKEVTQNEGTKTIANNLTSTIQVFTDSEYQLPYVLGSAHQGCLPPFPADVFMIPQYGYLTLNNGSQAVGRSSFYCLEYFPSQMLRTGNNFEFSYTFEDVPFHSSYAHSQSLDRLMNPLIDQYLYYLSRTQTTGGTANTQTLGFSQGGPNTMANQAKNWLPGPCYRQQRVSTTTGQNNNSNFAWTAGTKYHLNGRNSLANPGIAMATHKDDEERFFPSNGILIFGKQNAARDNADYSDVMLTSEEEIKTTNPVATEEYGIVADNLQQQNTAPQIGTVNSQGTLPGMVWQNRDVYLQGPIWAKIPHTDGNFHPSPLMGGFGLKHPPPQILIKNTPVPADPPTTFNQSKLNSFITQYSTGQVSVEIEWELQKENSKRWNPEIQYTSNYYKSTSVDFAVNTEGVYSEPRPIGTRFLTRNL

SEQ ID NO: 985 - protein, 737 aa, Artificial Sequence
  Description of Artificial Sequence: Synthetic polypeptide
MAADGYLPDWLEDNLSEGIREWWALKPGAPKPKANQQKQDDGRGLVLPGYKYLGPFNGLDKGEPVNAADAAALEHDKAYDQQLKAGDNPYLRYNHADAEFQERLQEDTSFGGNLGRAVFQAKKRVLEPLGLVEEGAKTAPGKKRPVEQSPQEPDSSSGIGKTGQQPAKKRLNFGQTGDSESVPDPQPLGEPPAAPSGVGPNTMAAGGGAPMADNNEGADGVGSSSGNWHCDSTWLGDRVITTSTRTWALPTYNNHLYKQISNGTSGGATNDNTYFGYSTPWGYFDFNRFHCHFSPRDWQRLINNNWGFRPKRLSFKLFNIQVKEVTQNEGTKTIANNLTSTIQVFTDSEYQLPYVLGSAHQGCLPPFPADVFMIPQYGYLTLNNGSQAVGRSSFYCLEYFPSQMLRTGNNFTFSYTFEDVPFHSSYAHSQSLDRLMNPLIDQYLYYLSRTQTTGGTANTQTLGFSQGGPNTMANQAKNWLPGPCYRQQRVSTTTGQNNNSNFAWTAGTKYHLNGRNSLANPGIAMATHKDDEERFFPSNGILIFGKQNAARDNADYSDVMLTSEEEIKTTNPVATEEYGIVADNLQQQNTAPQIGTVNSQGALPGMVWQNRDVYLQGPIWAKIPHTDGNFHPSPLMGGFGLKHPPPQILIKNTPVPADPPTTFNQSKLYSFITQYSTGQVSVEIEWELQKENSKRWNPEIQYTSNYYKSTSVDFAVNTEGVYSEPRPIGTRYLTRNL

SEQ ID NO: 986 - DNA, 2208 bp, Artificial Sequence
  Description of Artificial Sequence: Synthetic polynucleotide
atggctgccgatggttatcttccagattggctcgaggacaacctctctgagggcattcgcgagtggtgggacttgaaacctggagccccgaaacccaaagccaaccagcaaaagcaggacgacggccggggtctggtgcttcctggctacaagtacctcggacccttcaacggactcgacaagggggagcccgtcaacgcggcggatgcagcggccctcgagcacgacaaagcctacgaccggcagctcgacagcggagacaacccgtacctcaagtacaaccacgccgacgcggagtttcaggagcgccttaaagaagatacgtcttttgggggcaacctcggacgagcagtcttccaggccaagaagagggttctcgaaccttttggtctggttgaggaaggtgctaagacggctcctggaaagaaacgtccggtagagcagtcgccacaagagccagactcctcctcgggcattggcaagacaggccagcagcccgctaaaaagagactcaattttggtcagactggcgactcagagtcagtccccgacccacaacctctcggagaacctccagcaacccccgctgctgtgggacctactacaatggcttcaggtggtggcgcaccagtggcagacaataacgaaggcgccgacggagtgggtagttcctcgggaaattggcattgcgattccacatggctgggcgacagagtcatcaccaccagcacccgaacatgggccttgcccacctataacaaccacctctacaagcaaatctccagtgcttcgacgggggccagcaacgacaaccactacttcggctacagcaccccctgggggtattttgatttcaacaggttccactgccatttctcaccacgtgactggcagcgactcatcaacaacaattggggattccggcccaaaagactcaacttcaagctgttcaacatccaggtcaaggaagtcacgacgaacgaaggcaccaagaccatcgccaataatctcaccagcaccgtgcaggtctttacggactcggagtaccagttaccgtacgtgctaggatccgctcaccagggatgtctgcctccgttcccggcggacgtcttcatggttcctcagtacggctatttaactttaaacaatggaagccaagccctgggacgttcctccttctactgtctggagtatttcccatcgcagatgctgagaacgggcaacaactttacctttagctacaccttcgaggacgtgcctttccacagcagctacgcgcacagccagagcctggacaggctgatgaatcccctcatcgaccagtacctgtactacctggtcagaacgcaaacgactggaactggagggacgcagactctggcattcagccaagcgggtcctagctcaatggccaaccaggctagaaattgggtgcccggaccttgctaccggcagcagcgcgtctccacgacaaccaaccagaacaacaacagcaactttgcctggacgggagctgccaagtttaagctgaacggccgagactctctaatgaatccgggcgtggcaatggcttcccacaaggatgacgacgaccgcttcttcccttcgagcggggtcctgatttttggcaagcaaggagccgggaacgatggagtggattacagccaagtgctgattacagatgaggaagaaatcaaggctaccaaccccgtggccacagaagaatatggagcagtggccatcaacaaccaggccgccaatacgcaggcgcagaccggactcgtgcacaaccagggggtgattcccggcatggtgtggcagaatagagacgtgtacctgcagggtcccatctgggccaaaattcctcacacggacggcaactttcacccgtctcccctgatgggcggctttggactgaagcacccgcctcctcaaattctcatcaagaacacaccggttccagcggacccgccgcttaccttcaaccaggccaagctgaactctttcatcacgcagtacagcaccggacaggtcagcgtggaaatcgagtgggagctgcagaaagaaaacagcaaacgctggaatccagagattcaatacacttccaactactacaaatctacaaatgtggactttgctgtcaacacggagggggtttatagcgagcctcgccccattggcacccgttacctcacccgcaacctgtaa

SEQ ID NO: 987 - DNA, 2211 bp, Artificial Sequence
  Description of Artificial Sequence: Synthetic polynucleotide
  modified_base (337)..(337): a, c, g, or t
atggctgccgatggttatcttccagattggctcgaggacactctctctgaaggaataagacagtggtggaagctcaaacctggcccaccaccaccaaagcccgcagagcggcataaggacgacagcaggggtcttgtgcttcctggctacaagtacctcggacccttcaacggactcgacaagggggagcccgtcaacgcggcggacgcagcgaccctcgagcacgacaaggcctacgaccagcagctcaaagcgggtgacaatccgtacctgcggtataaccacgccgacgccgagtttcaggagcgtctgcaagaagatacgtcttttgggggcnacctcgggcgagcagtcttccaggccaagaagcgggttctcgaacctctcggtctggttgaggaagctgctaagacggctcctggaaagaagagaccagtagagccatcaccccagcgttctccagactcctctacgggcatcggcaagaaaggccaacagcccgccagaaaaagactcaattttggtcagactggcgactcagagtcagttccagaccctcaacctctcggagaacctccagcagcgccctctggtgtgggacctaatacaatggctgcaggcggtggcgcaccaatggcagacaataacgaaggcgccgacggagtgggtagttcctcgggaaattggcattgcgattccacatggctgggcgacagagtcatcaccaccagcacccgaacctgggccctgcccacctacaacaaccacctctacaagcaaatctccagtgcttcaacgggggccagcaacgacaaccactacttcggctacagcaccccctgggggtattttgatttcaacagattccactgccatttctcaccacgtgactggcagcgactcatcaacaacaattggggattccggcccaagagactcaacttcaagctcttcaacatccaagtcaaggaggtcacgacgaatgatggcgtcacgaccatcgctaataaccttaccagcacggttcaagtcttctcggactcagactatcagctcccgtacgtgctcgggtcggctcacgagggctgcctcccgccgttcccagcggacgttttcatgattcctcagtacggctatttaactttaaacaatggaagccaagccctgggacgttcctccttctactgtctggagtatttcccatcgcagatgctgagaaccggcaacaactttcagttcagctacaccttcgaggacgtgcctttccacagcagctacgcgcacagccagagcctggacaggctgatgaatcccctcatcgaccagtacctgtactacctggtcagaacgcaaacgactggaactggagggacgcagactctggcattcagccaagcgggtcctagctcaatggccaaccaggctagaaattgggtgcccggaccttgctaccggcagcagcgcgtctccacgacaaccaaccagaacaacaacagcaactttgcctggacgggagctgccaagtttaagctgaacggccgagactctctaatgaatccgggcgtggcaatggcttcccacaaggatgacgacgaccgcttcttcccttcgagcggggtcctgatttttggcaagcaaggagccgggaacgatggagtggattacagccaagtgctgattacagatgaggaagaaatcaaggctaccaaccccgtagccacagaagaatatggagcagtggccatcaacaaccaggccgccaatacgcaggcgcagaccggactcgtgcacaaccagggggtgattcccggaatggtgtggcaagacagagacgtatacctgcagggtcctatttgggccaaaattcctcacacggatggacactttcacccgtctcctctcatgggcggctttggacttaagcacccgcctcctcagatcctcatcaaaaacacgcctgttcctgcgaatcctccggcagagttttcggctacaaagtttgcttcattcatcacccagtattccacaggacaagtgagcgtggagattgaatgggagctgcagaaagaaaacagcaaacgctggaatcccgaagtgcagtatacatctaactatgcaaaatctgccaacgttgatttcactgtggacaacaatggactttatactgagcctcgccccattggcacccgttacctcacccgtcccctgtaa

SEQ ID NO: 988 - DNA, 2214 bp, Artificial Sequence
  Description of Artificial Sequence: Synthetic polynucleotide
  modified_base (335)..(335): a, c, g, or t
atgactgacggttaccttccagattggctagaggacaacctctctgaaggcgttcgagagtggtgggcgctgcaacctggagccccgaagcccaaagccaaccagcaaaagcaggacgacggccggggtctggtgcttcctggctacaagtacctcggacccttcaacggactcgacaagggggagcccgtcaacgcggcggacgcagcggccctcgagcacgacaaggcctacgaccagcagctcaaagcgggtgacaatccgtacctgcggtataaccacgccgacgccgagtttcaggagcgtctgcaagaagatacgtcttttgggggcancctcgggcgagcagtcttccaggccaagaagcgggttctcgaacctctcggtctggttgaggaaggcgctaagacggctcctggaaagaaacgtccggtagagccatcaccccagcgttctccagactcctctacgggcatcggcaagaaaggccaacagcccgccagaaaaagactcaattttggtcagactggcgactcagagtcagttccagaccctcaacctctcggagaacctccagcagcgccctcaggtgtgggatctcttacaatggcttcaggtggtggcgcaccagtggcagacaataacgaaggtgccgatggagtgggtagttcctcgggaaattggcattgcgattcccaatggctgggggacagagtcatcaccaccagcacccgaacctgggccctgcccacctacaacaatcacctctacaagcaaatctccaacagcacatctggaggatcttcaaatgacaacgcctacttcggctacagcaccccctgggggtattttgacttcaacagattccactgccacttctcaccacgtgactggcagcgactcatcaacaacaactggggattccggcccaagagactcagcttcaagctcttcaacatccaggtcaaggaggtcacgcagaatgaaggcaccaagaccatcgccaataacctcaccagcaccatccaggtgtttacggactcggagtaccagctgccgtacgttctcggctctgcccaccagggctgcctgcctccgttcccggcggacgtgttcatgattccccagtacggctacctaacactcaacaacggtagtcaggccgtgggacgctcctccttctactgcctggaatactttccttcgcagatgctgagaaccggcaacaacttccagtttacttacaccttcgaggacgtgcctttccacagcagctacgcccacagccagagcttggaccggctgatgaatcctctgattgaccagtacctgtactacttgtctcggactcaaacaacaggaggcacggcaaatacgcagactctgggcttcagccaaggtgggcctaatacaatggccaatcaggcaaagaactggctgccaggaccctgttaccgccaacaacgcgtctcaacgacaaccgggcaaaacaacaatagcaactttgcctggactgctgggaccaaataccatctgaatggaagaaattcattggctaatcctggcatcgctatggcaacacacaaagacgacgaggagcgtttttttcccagtaacgggatcctgatttttggcaaacaaaatgctgccagagacaatgcggattacagcgatgtcatgctcaccagcgaggaagaaatcaaaaccactaaccctgtggctacagaggaatacggtatcgtggcagataacttgcagcagcaaaacacggctcctcaaattggaactgtcaacagccagggggccttacccggtatggtctggcagaaccgggacgtgtacctgcagggtcccatctgggccaagattcctcacacggacggcaacttccacccgtctccgctgatgggcggctttggcctgaaacatcctccgcctcagatcctgatcaagaacacgcctgtacctgcggatcctccgaccaccttaaaccaggccaagctgaactctttcatcacgcaatacagcaccggacaggtcagcgtggaaattgaatgggagctgcagaaggaaaacagcaagcgctggaacccagagattcagtacacttcaaactactacaaatctacaaatgtggactttgctgtcaatacagagggaacttatagtgaaccccgccccattggcaccagatttctgactcgtaatctgtaa

SEQ ID NO: 989 - DNA, 2211 bp, Artificial Sequence
  Description of Artificial Sequence: Synthetic polynucleotide
  modified_base (338)..(338): a, c, g, or t
atggctgccgatggttatcttccagattggctcgaggacactctctctgaaggaataagacagtggtggaagctcaaacctggcccaccaccaccaaagcccgcagagcggcataaggacgacagcaggggtcttgtgcttcctgggtacaagtacctcggccccttcaacggactcgacaagggggagcccgtcaacgcggcggacgcagcggccctcgagcacgacaaggcctacgaccagcagctcgaagcgggtgacaatccgtacctgcggtataaccacgccgacgccgagtttcaggagcgtctgcaagaagatacgtcttttgggggcancctcgggcgagcagtcttccaggccaagaagcgggttctcgaacctctcggtctggttgaggaaggcgctaagacggctcctggaaagaagagaccagtagagcagtcaccccaagaaccagactcctcctcgggcatcggcaggaaaggccaacagcccgccagaaaaagactcaattttggccagactggcgactcagagtcagttccagaccctcaacctctcggagaacctccagcagcgccctctggtgtgggacctaatacaatggcttcaggcggtggcgctccaatggcagacaataacgaaggcgccgacggagtgggtaatgcctcaggaaattggcattgcgattccacatggctgggcgacagagtcatcaccaccagcacccgcacctgggccttgcccacctacaataaccacctctacaagcaaatctccagtgcttcaacgggggccagcaacgacaaccactacttcggctacagcaccccctgggggtattttgatttcaacagattccactgccacttttcaccacgtgactggcagcgactcatcaacaacaattggggattccggcccaagagactcaacttcaaactcttcaacatccaggtcaaggaggtcacgcagaatgaaggcactaagaccatcgccaataaccttaccagcacgattcaggtatttacggactcggaataccagctgccgtacgtcctcggctccgcgcaccagggctgcctgcctccgttcccggcggacgtcttcatgattccccagtacggctaccttacactgaacaatggaagtcaagccgtaggccgttcctccttctactgcctggaatattttccatctcaaatgctgcgaactggcaacaacttccagtttacctacaccttcgaggacgtgcctttccacagcagctacgcccacagccagagcttggaccggctgatgaatcctctgattgaccagtacctgtactacttgtctcggactcagtccacaggaggaactcaaggtacccagcaattgttattttctcaagctgggcctgcaaacatgtcggctcaggctaagaactggctacctggaccttgctaccggcagcagcgagtctctacgacactgtcgcaaaacaacaacagcaactttgcttggactggtgccaccaaatatcacctgaacggaagagactctttggtaaatcccggtgtcgccatggcaacccacaaggacgacgaggaacgcttcttcccgtcgagtggagtcctgatgtttggaaaacagggtgctggaagagacaatgtggactacagcagcgttatgctaaccagcgaagaagaaattaaaaccactaaccctgtagccacagaacaatacggtgtggtggttgataacttgcagcaaaccaatacggggcctattgtgggaaatgtcaacagccaaggagccttacctggtatggtctggcagaaccgggacgtgtacctgcagggtcccatctgggccaagattcctcacacggacggcaacttccacccgtctccgctgatgggcggctttggcctgaaacatcctccgcctcagatcctcatcaaaaacacacctgtacctgcggatcctccaacggccttcaacaaggacaagctgaactctttcatcacccagtattctactggccaagtcagcgtggagatcgagtgggagctgcagaaggaaaacagcaagcgctggaacccggagatccagtacacttccaactattacaagtctaataatgttgaatttgctgttaatactgaaggtgtatatagtgaaccccgccccattggcaccagatacctgactcgtaatctgtaa

SEQ ID NO: 990 - protein, 735 aa, Artificial Sequence
  Description of Artificial Sequence: Synthetic polypeptide
MAADGYLPDWLEDNLSEGIREWWDLKPGAPKPKANQQKQDDGRGLVLPGYKYLGPFNGLDKGEPVNAADAAALEHDKAYDRQLDSGDNPYLKYNHADAEFQERLKEDTSFGGNLGRAVFQAKKRVLEPFGLVEEGAKTAPGKKRPVEQSPQEPDSSSGIGKTGQQPAKKRLNFGQTGDSESVPDPQPLGEPPATPAAVGPTTMASGGGAPVADNNEGADGVGSSSGNWHCDSTWLGDRVITTSTRTWALPTYNNHLYKQISSASTGASNDNHYFGYSTPWGYFDFNRFHCHFSPRDWQRLINNNWGFRPKRLNFKLFNIQVKEVTTNEGTKTIANNLTSTVQVFTDSEYQLPYVLGSAHQGCLPPFPADVFMVPQYGYLTLNNGSQALGRSSFYCLEYFPSQMLRTGNNFTFSYTFEDVPFHSSYAHSQSLDRLMNPLIDQYLYYLVRTQTTGTGGTQTLAFSQAGPSSMANQARNWVPGPCYRQQRVSTTTNQNNNSNFAWTGAAKFKLNGRDSLMNPGVAMASHKDDDDRFFPSSGVLIFGKQGAGNDGVDYSQVLITDEEEIKATNPVATEEYGAVAINNQAANTQAQTGLVHNQGVIPGMVWQNRDVYLQGPIWAKIPHTDGNFHPSPLMGGFGLKHPPPQILIKNTPVPADPPLTFNQAKLNSFITQYSTGQVSVEIEWELQKENSKRWNPEIQYTSNYYKSTNVDFAVNTEGVYSEPRPIGTRYLTRNL

SEQ ID NO: 991 - protein, 736 aa, Artificial Sequence
  Description of Artificial Sequence: Synthetic polypeptide
  MOD_RES (113)..(113): Any naturally occurring amino acid
MAADGYLPDWLEDTLSEGIRQWWKLKPGPPPPKPAERHKDDSRGLVLPGYKYLGPFNGLDKGEPVNAADAATLEHDKAYDQQLKAGDNPYLRYNHADAEFQERLQEDTSFGGXLGRAVFQAKKRVLEPLGLVEEAAKTAPGKKRPVEPSPQRSPDSSTGIGKKGQQPARKRLNFGQTGDSESVPDPQPLGEPPAAPSGVGPNTMAAGGGAPMADNNEGADGVGSSSGNWHCDSTWLGDRVITTSTRTWALPTYNNHLYKQISSASTGASNDNHYFGYSTPWGYFDFNRFHCHFSPRDWQRLINNNWGFRPKRLNFKLFNIQVKEVTTNDGVTTIANNLTSTVQVFSDSDYQLPYVLGSAHEGCLPPFPADVFMIPQYGYLTLNNGSQALGRSSFYCLEYFPSQMLRTGNNFQFSYTFEDVPFHSSYAHSQSLDRLMNPLIDQYLYYLVRTQTTGTGGTQTLAFSQAGPSSMANQARNWVPGPCYRQQRVSTTTNQNNNSNFAWTGAAKFKLNGRDSLMNPGVAMASHKDDDDRFFPSSGVLIFGKQGAGNDGVDYSQVLITDEEEIKATNPVATEEYGAVAINNQAANTQAQTGLVHNQGVIPGMVWQDRDVYLQGPIWAKIPHTDGHFHPSPLMGGFGLKHPPPQILIKNTPVPANPPAEFSATKFASFITQYSTGQVSVEIEWELQKENSKRWNPEVQYTSNYAKSANVDFTVDNNGLYTEPRPIGTRYLTRPL

SEQ ID NO: 992 - protein, 737 aa, Artificial Sequence
  Description of Artificial Sequence: Synthetic polypeptide
  MOD_RES (112)..(112): Any naturally occurring amino acid
MTDGYLPDWLEDNLSEGVREWWALQPGAPKPKANQQKQDDGRGLVLPGYKYLGPFNGLDKGEPVNAADAAALEHDKAYDQQLKAGDNPYLRYNHADAEFQERLQEDTSFGGXLGRAVFQAKKRVLEPLGLVEEGAKTAPGKKRPVEPSPQRSPDSSTGIGKKGQQPARKRLNFGQTGDSESVPDPQPLGEPPAAPSGVGSLTMASGGGAPVADNNEGADGVGSSSGNWHCDSQWLGDRVITTSTRTWALPTYNNHLYKQISNSTSGGSSNDNAYFGYSTPWGYFDFNRFHCHFSPRDWQRLINNNWGFRPKRLSFKLFNIQVKEVTQNEGTKTIANNLTSTIQVFTDSEYQLPYVLGSAHQGCLPPFPADVFMIPQYGYLTLNNGSQAVGRSSFYCLEYFPSQMLRTGNNFQFTYTFEDVPFHSSYAHSQSLDRLMNPLIDQYLYYLSRTQTTGGTANTQTLGFSQGGPNTMANQAKNWLPGPCYRQQRVSTTTGQNNNSNFAWTAGTKYHLNGRNSLANPGIAMATHKDDEERFFPSNGILIFGKQNAARDNADYSDVMLTSEEEIKTTNPVATEEYGIVADNLQQQNTAPQIGTVNSQGALPGMVWQNRDVYLQGPIWAKIPHTDGNFHPSPLMGGFGLKHPPPQILIKNTPVPADPPTTLNQAKLNSFITQYSTGQVSVEIEWELQKENSKRWNPEIQYTSNYYKSTNVDFAVNTEGTYSEPRPIGTRFLTRNL

SEQ ID NO: 993 - protein, 736 aa, Artificial Sequence
  Description of Artificial Sequence: Synthetic polypeptide
  MOD_RES (113)..(113): Any naturally occurring amino acid
MAADGYLPDWLEDTLSEGIRQWWKLKPGPPPPKPAERHKDDSRGLVLPGYKYLGPFNGLDKGEPVNAADAAALEHDKAYDQQLEAGDNPYLRYNHADAEFQERLQEDTSFGGXLGRAVFQAKKRVLEPLGLVEEGAKTAPGKKRPVEQSPQEPDSSSGIGRKGQQPARKRLNFGQTGDSESVPDPQPLGEPPAAPSGVGPNTMASGGGAPMADNNEGADGVGNASGNWHCDSTWLGDRVITTSTRTWALPTYNNHLYKQISSASTGASNDNHYFGYSTPWGYFDFNRFHCHFSPRDWQRLINNNWGFRPKRLNFKLFNIQVKEVTQNEGTKTIANNLTSTIQVFTDSEYQLPYVLGSAHQGCLPPFPADVFMIPQYGYLTLNNGSQAVGRSSFYCLEYFPSQMLRTGNNFQFTYTFEDVPFHSSYAHSQSLDRLMNPLIDQYLYYLSRTQSTGGTQGTQQLLFSQAGPANMSAQAKNWLPGPCYRQQRVSTTLSQNNNSNFAWTGATKYHLNGRDSLVNPGVAMATHKDDEERFFPSSGVLMFGKQGAGRDNVDYSSVMLTSEEEIKTTNPVATEQYGVVVDNLQQTNTGPIVGNVNSQGALPGMVWQNRDVYLQGPIWAKIPHTDGNFHPSPLMGGFGLKHPPPQILIKNTPVPADPPTAFNKDKLNSFITQYSTGQVSVEIEWELQKENSKRWNPEIQYTSNYYKSNNVEFAVNTEGVYSEPRPIGTRYLTRNL

SEQ ID NO: 994 - DNA, 2211 bp, Artificial Sequence
  Description of Artificial Sequence: Synthetic polynucleotide
atggccgccgacggctacctgcccgactggctggaggacaacctgagcgagggcatccgcgagtggtgggccctgaagcccggcgccccccagcccaaggccaaccagcagcaccaggacaacgcccgcggcctggtgctgcccggctacaagtacctgggccccggcaacggcctggacaagggcgagcccgtgaacgccgccgacgccgccgccctggagcacgacaaggcctacgaccagcagctgaaggccggcgacaacccctacctgaagtacaaccacgccgacgccgagttccaggagcgcctgaaggaggacaccagcttcggcggcaacctgggccgcgccgtgttccaggccaagaagcgcctgctggagcccctgggcctggtggaggaggccgccaagaccgcccccggcaagaagcgccccgtggagcagagcccccaggagcccgacagcagcgccggcatcggcaagagcggcgcccagcccgccaagaagcgcctgaacttcggccagaccggcgacaccgagagcgtgcccgacccccagcccatcggcgagccccccgccgcccccagcggcgtgggcagcctgaccatggccagcggcggcggcgcccccgtggccgacaacaacgagggcgccgacggcgtgggcagcagcagcggcaactggcactgcgacagccagtggctgggcgaccgcgtgatcaccaccagcacccgcacctgggccctgcccacctacaacaaccacctgtacaagcagatcagcaacagcaccagcggcggcagcagcaacgacaacgcctacttcggctacagcaccccctggggctacttcgacttcaaccgcttccactgccacttcagcccccgcgactggcagcgcctgatcaacaacaactggggcttccgccccaagcgcctgaacttcaagctgttcaacatccaggtgaaggaggtgaccgacaacaacggcgtgaagaccatcgccaacaacctgaccagcaccgtgcaggtgttcaccgacagcgactaccagctgccctacgtgctgggcagcgcccacgagggctgcctgccccccttccccgccgacgtgttcatgatcccccagtacggctacctgaccctgaacgacggcagccaggccgtgggccgcagcagcttctactgcctggagtacttccccagccagatgctgcgcaccggcaacaacttccagttcagctacgagttcgagaacgtgcccttccacagcagctacgcccacagccagagcctggaccgcctgatgaaccccctgatcgaccagtacctgtactacctgagcaagaccatcaacggcagcggccagaaccagcagaccctgaagttcagcgtggccggccccagcaacatggccgtgcagggccgcaactacatccccggccccagctaccgccagcagcgcgtgagcaccaccgtgacccagaacaacaacagcgagttcgcctggcccggcgccagcagctgggccctgaacggccgcaacagcctgatgaaccccggccccgccatggccagccacaaggagggcgaggaccgcttcttccccctgagcggcagcctgatcttcggcaagcagggcaccggccgcgacaacgtggacgccgacaaggtgatgatcaccaacgaggaggagatcaagaccaccaaccccgtggccaccgagagctacggccaggtggccaccaaccaccagagcgcccaggcccaggcccagaccggctgggtgcagaaccagggcatcctgcccggcatggtgtggcaggaccgcgacgtgtacctgcagggccccatctgggccaagatcccccacaccgacggcaacttccaccccagccccctgatgggcggcttcggcatgaagcacccccccccccagatcctgatcaagaacacccccgtgcccgccgacccccccaccgccttcaacaaggacaagctgaacagcttcatcacccagtacagcaccggccaggtgagcgtggagatcgagtgggagctgcagaaggagaacagcaagcgctggaaccccgagatccagtacaccagcaactactacaagagcaacaacgtggagttcgccgtgaacaccgagggcgtgtacagcgagccccgccccatcggcacccgctacctgacccgcaacctgtaa

SEQ ID NO: 995 - DNA, 2211 bp, Artificial Sequence
  Description of Artificial Sequence: Synthetic polynucleotide
atggctgccgatggttatcttccagattggctcgaggacactctctctgaaggaataagacagtggtggaagctcaaacctggcccaccaccaccaaagcccgcagagcggcataaggacgacagcaggggtcttgtgcttcctgggtacaagtacctcggacccttcaacggactcgacaagggagagccggtcaacgaggcagacgccgcggccctcgagcacgacaaggcctacgaccagcagctcaaggccggagacaacccgtacctcaagtacaaccacgccgacgccgagttccaggagcggctcaaagaagatacgtcttttgggggcaacctcggacgagcagtcttccaggccaagaagcgggttctcgaacctctcggtctggttgaggaaggcgctaagacggctcctggaaagaaacgtccggtagagcagtcgccacaagagccagactcctcctcgggcattggcaagacaggccagcagcccgctaaaaagagactcaattttggtcagactggcgactcagagtcagtccccgacccacaacctctcggagaacctccagcaacccccgctgctgtgggacctactacaatggcttcaggcggtggcgcaccaatggcggacaataacgaaggcgccgatggagtgggtagttcctcgggaaattggcattgcgattcccaatggctgggggacagagtcatcaccaccagcacccgaacatgggccttgcccacctataacaaccacctctacaagcaaatctccagtgcttcaacgggggccagcaacgacaaccactacttcggctacagcaccccctgggggtattttgacttcaacagattccactgccacttctcaccacgtgactggcagcgactcatcaacaacaactggggattccgacccaagagactcaacttcaagctctttaacattcaagtcaaggaggtcacgcagaatgaaggcaccaagaccatcgccaataacctcaccagcaccatccaggtgtttacggactcggagtaccagctgccgtacgttctcggctccgcccaccagggctgcctgcctccgttcccggcggacgtgttcatgattccccagtacggctacctaacactcaacaacggtagtcaggccgtgggacgctcctccttctactgcctggaatactttccttcgcagatgctgagaaccggcaacaacttccagtttacttacaccttcgaggacgtgcctttccacagcagctacgcccacagccagagcttggaccggctgatgaatcctctgattgaccagtacctgtactacttgtctcggactcaaacaacaggaggcacggcaaatacgcagactctgggcttcagccaaggtgggcctaatacaatggccaatcaggcaaagaactggctgccaggaccctgttaccgccaacaacgcgtctcaacgacaaccgggcaaaacaacaatagcaactttgcctggactgctgggaccaaataccatctgaatggaagaaattcattggctaatcctggcatcgctatggcaacacacaaagacgacaaggagcgtttttttcccagtaacgggatcctgatttttggcaaacaaaatgctgccagagacaatgcggattacagcgatgtcatgctcaccagcgaggaagaaatcaaaaccactaaccctgtggctacagaggaatacggtatcgtggcagataacttgcagcagcaaaacacggctcctcaaattggaactgtcaacagccagggggccttacccggtatggtctggcagaaccgggacgtgtacctgcagggtcccatctgggccaagattcctcacacggacggcaacttccacccgtctccgctgatgggcggctttggcctgaaacatcctccgcctcagatcctgatcaagaacacgcctgtacctgcggatcctccgaccaccttcaaccagtcaaagctgaactctttcatcacgcaatacagcaccggacaggtcagcgtggaaattgaatgggagctgcagaaagaaaacagcaaacgctggaacccagagattcaatacacttccaactactacaaatctacaagtgtggactttgctgttaatacagaaggcgtgtactctgaaccccaccccattggcacccgttacctcacccgtcccctgtaa

SEQ ID NO: 996 - DNA, 2211 bp, Artificial Sequence
  Description of Artificial Sequence: Synthetic polynucleotide
atggctgccgatggttatcttccagattggctcgaggacaacctctctgagggcattcgcgagtggtgggcgctgaaacctggagccccgaagcccaaagccaaccagcaaaagcaggacgacggccggggtctggtgcttcctggctacaagtacctcggacccttcaacggactcgacaagggggagccggtcaacgcagcagacgcggcggccctcgagcacgacaaggcctacgaccagcagctcaaggccggagacaacccgtacctcaagtacaaccacgccgacgccgagttccaggagcggctcaaagaagatacgtcttttgggggcaacctcgggcgagcagtcttccaggccaaaaagaggcttcttgaacctcttggtctggttgaggaagcggctaagacggctcctggaaagaagaggcctgtagagcagtctcctcaggaaccggactcctccgcgggtattggcaaatcgggtgcacagcccgctaaaaagagactcaattttggtcagactggcgactcagagtcagtccccgacccacaacctctcggagaacctccagcaacccccgctgctgtgggacctactacaatggcttcaggcggtggcgcaccaatggcagacaataacgaaggcgccgacggagtgggtaatgcctcaggaaattggcattgcgattccacatggctgggcgacagagtcatcaccaccagcacccgaacctgggccctgcccacctacaataaccacctctacaagcaaatctccagtgcttcaacgggggccagcaacgacaaccactacttcggctacagcaccccctgggggtattttgatttcaacagattccactgccacttttcaccacgtgactggcagcgactcatcaacaacaattggggattccggcccaagagactcaacttcaaactcttcaacatccaagtcaaggaggtcacgcagaatgaaggcaccaagaccatcgccaataacctcaccagcaccatccaggtgtttacggactcggagtaccagctgccgtacgttctcggctctgcccaccagggctgcctgcctccgttcccggcggacgtgttcatgattccccagtacggctacctaacactcaacaacggtagtcaggccgtgggacgctcctccttctactgcctggaatactttccttcgcagatgctgagaaccggcaacaacttccagtttacttacaccttcgaggacgtgcctttccacagcagctacgcccacagccagagcttggaccggctgatgaatcctctgattgaccagtacctgtactacttgtctcggactcaaacaacaggaggcacggcaaatacgcagactctgggcttcagccaaggtgggcctaatacaatggccaatcaggcaaagaactggctgccaggaccctgttaccgccaacaacgcgtctcaacgacaaccgggcaaaacaacaatagcaactttgcctggactgctgggaccaaataccatctgaatggaagaaattcattggctaatcctggcatcgctatggcaacacacaaagacgacaaggagcgtttttttcccagtaacgggatcctgatttttggcaaacaaaatgctgccagagacaatgcggattacagcgatgtcatgctcaccagcgaggaagaaatcaaagccactaaccctgtggctacagaggaatacggtatcgtggcagataacttgcagcagcaaaacacggctcctcaaattggaactgtcaacagccagggggccttacccggtatggtttggcagaaccgggacgtgtacctgcagggtcccatctgggccaagattcctcacacggacggcaacttccacccgtctccgctgatgggcggctttggcctgaaacatcctccgcctcagatcctgatcaagaacacgcctgtacctgcggatcctccgaccaccttcaaccagtcaaagctgaactctttcatcacgcaatacagcaccggacaggtcagcgtggaaattgaatgggagctgcagaaggaaaacagcaagcgctggaaccccgagatccagtacacctccaactactacaaatctacaagtgtggactttgctgttaatacagaaggcgtgtactctgaaccccaccccattggcacccgttacctcacccgtcccctgtaa

SEQ ID NO: 997 - DNA, 2214 bp, Artificial Sequence
  Description of Artificial Sequence: Synthetic polynucleotide
atggctgccgatggttatcttccagattggctcgaggacaacctctctgagggcattcgcgagtggtgggacttgaaacctggagccccgaagcccaaagccaaccagcaaaagcaggacgacggccggggtctggtgcttcctggctacaagtacctcggacccttcaacggactcgacaagggggagcccgtcaacgcggcggacgcagcggccctcgagcacgacaaggcctacgaccagcagctcaaagcgggtgacaatccgtacctgcggtataaccacgccgacgccgagtttcaggagcgtctgcaagaagatacgtcttttgggggcaacctcgggcgagcagtcttccaggccaagaagcgggttctcgaacctctcggtctggttgaggaaggcgctaatacggctcctggaaagaaacgtccggtagagcagtcgccacaagagccagactcctccgcgggtattggcaaatcgggtgcacagcccgctaaaaagagactcaatttcggtcagactggcgacacagagtcagtcccagaccctcaaccaatcggagaacctcccgcagccccctcaggtgtgggatctcttacaatggcttcaggtggtggcgcaccagtggcagacaataacgaaggtgccgatggagtgggtagttcctcgggaaattggcattgcgattcccaatggctgggggacagagtcatcaccaccagcacccgaacctgggccctgcccacctacaacaatcacctctacaagcaaatctccaacagcacatctggaggatcttcaaatgacaacgcctacttcggctacagcaccccctgggggtattttgacttcaacagattccactgccacttctcaccacgtgactggcagcgactcatcaacaacaactggggattccggcctaagcgactcaacttcaagctcttcaacattcaggtcaaagaggttacggacaacaatggagtcaagaccatcgccaataacctcaccagcaccatccaggtgtttacggactcggagtaccagctgccgtacgttctcggctccgcccaccagggctgcctgcctccgttcccggcggacgtgttcatgattccccagtacggctacctaacactcaacaacggtagtcaggccgtgggacgctcctccttctactgcctggaatactttccttcgcagatgctgagaaccggcaacaacttccagtttacttacaccttcgaggacgtgcctttccacagcagctacgcccacagccagagcttggaccggctgatgaatcctctgattgaccagtacctgtactacttgtctcggactcaaacaacaggaggcacggcaaatacgcagactctgggcttcagccaaggtgggcctaatacaatggccaatcaggcaaagaactggctgccaggaccctgttaccgccaacaacgcgtctcaacgacaaccgggcaaaacaacaatagcaactttgcctggactgctgggaccaaataccatctgaatggaagaaattcattggctaatcctggcatcgctatggcctcacacaaagacgacaaggagcgtttttttcccagtaacgggatcctgatttttggcaaacaaaatgctgccagagacaatgcggattacagcgatgtcatgctcaccagcgaggaagaaatcaaaaccactaaccctgtggctacagaggaatacggtatcgtggcagataacttgcagcagcaaaacacggctcctcaaattggaactgtcaacagtcaaggagccttacctggcatggtctggcagaaccgggacgtgtacctgcagggtcccatctgggccaagattcctcacacggacggcaacttccacccgtctccgctgatgggcggctttggcctgaaacatcctccgcctcagatcctgatcaagaacacgcctgtacctgcggatcctccgaccaccttcaaccagtcaaagctgaactctttcatcacgcaatacagcaccggacaggtcagcgtggaaattgaatgggagctgcagaaggaaaacagcaagcgctggaaccccgagatccagtacaccaccaactactacaaatctacaagtgtggactttgctgttaatacagaaggcgtgtactctgaaccccaccccattggcacccgttacctcacccgtcccctgtaa

SEQ ID NO: 998 - DNA, 2211 bp, Artificial Sequence
  Description of Artificial Sequence: Synthetic polynucleotide
atggctgccgatggttatcttccagattggctcgaggacaacctctctgagggcattcgcgagtggtgggcgctgaaacctggagccccgaagcccaaagccaaccagcaaaagcaggacgacggccggggtctggtgcttcctggctacaagtacctcggacccttcaacggactcgacaaaggagagccggtcaacgaggcggacgcggcagccctcgaacacgacaaagcttacgaccagcagctcaaggccggtgacaatccgtacctgcggtataaccacgccgacgccgagtttcaggagcgtcttcaagaagatacgtcttttgggggcaacctcgggcgagcagtcttccaggccaagaagcgggttctcgaacctctcggtctggttgaggaaggcgctaagacggctcctggaaagaaacgtccggtagagcagtcgccacaagagccagactcctcctcgggcatcggcaagacaggccagcagcccgctaaaaagagactcaattttggtcagactggcgactcagagtcagtccccgacccacaacctctcggagaacctccagcaacccccgctgctgtgggacctactacaatggcttcaggcggtggcgcaccaatggcagacaataacgaaggcgccgacggagtgggtaatgcctcaggaaattggcattgcgattccacatggctgggcgacagagtcatcaccaccagcacccgcacctgggccttgcccacctacaataaccacctctacaagcaaatctccagtgcttcaacgggggccagcaacgacaaccactacttcggctacagcaccccctgggggtattttgactttaacagattccactgccacttttcaccacgtgactggcaaagactcatcaacaacaactggggattccggcccaagagactcaacttcaagctcttcaacatccaggtcaaggaggtcacgcagaatgaaggcaccaagaccatcgccaataaccttaccagcacgattcaggtctttacggactcggaataccagctcccgtacgtcctcggctctgcgcaccagggctgcctccctccgttcccggcggacgtgttcatgattccgcagtacggctacctaacactcaacaacggtagtcaggccgtgggacgctcctccttctactgcctggaatactttccttcgcagatgctgagaaccggcaacaacttccagtttacttacaccttcgaggacgtgcctttccacagcagctacgcccacagccagagcttggaccggctgatgaatcctctgattgaccagtacctgtactacttgtctcggactcaaacaacaggaggcacggcaaatacgcagactctgggcttcagccaaggtgggcctaatacaatggccaatcaggcaaagaactggctgccaggaccctgttaccgccaacaacgcgtctcaacgacaaccgggcaaaacaacaatagcaactttgcctggactgctgggaccaaataccatctgaatggaagaaattcattggctaatcctggcatcgctatggcaacacacaaagacgacaaggagcgtttttttcccagtaacgggatcctgatttttggcaaacaaaatgctgccagagacaatgcggattacagcgatgtcatgctcaccagcgaggaagaaatcaaaaccactaaccctgtggctacagaggaatacggtatcgtggcagataacttgcagcagcaaaacacggctcctcaaattggaactgtcaacagccagggggccttacccggtatggtctggcagaaccgggacgtgtacctgcagggtcccatctgggccaagattcctcacacggacggcaacttccacccgtctccgctgatgggcggctttggcctgaaacatcctccgcctcagatcctgatcaagaacacgcctgtacctgcggatcctccgaccaccttcaaccagtcaaagctgaactctttcatcacgcaatacagcaccggacaggtcagcgtggaaattgaatgggagctgcagaaggaaaacagcaagcgctggaaccccgagatccagtacacctccaactactacaaatctacaagtgtggactttgctgttaatacagaaggcgtgtactctgaaccccaccccattggcacccgttacctcacccgtcccctgtaa

SEQ ID NO: 999 - DNA, 2211 bp, Artificial Sequence
  Description of Artificial Sequence: Synthetic polynucleotide
atggctgccgatggttatcttccagattggctcgaggacaacctctctgagggcattcgcgagtggtgggcgctgaaacctggagccccgaagcccaaagccaaccagcaaaagcaggacgacggccggggtctggtgcttcctggctacaagtacctcggacccttcaacggactcgacaaaggagagccggtcaacgaggcggacgcggcagccctcgaacacgacaaagcttacgaccagcagctcaaagcgggtgacaatccgtacctgcggtataaccacgccgacgccgagtttcaggagcgtctgcaagaagatacgtcttttgggggcaacctcgggcgagcagtcttccaggccaagaagagggttctcgaaccttttggtctggttgaggaaggtgctaagacggctcctggaaagaaacgtccggtagagcagtcgccacaagagccagactcctcctcgggcattggcaagacaggccagcagcccgctaaaaagagactcaattttggtcagactggcgactcagagtcagtccccgacccacaacctctcggagaacctccagcaacccccgctgctgtgggacctactacaatggcttcaggcggtggcgcaccaatggcagacaataacgaaggcgccgacggagtgggtaatgcctcaggaaattggcattgcgattcccaatggctgggcgacagagtcatcaccaccagcaccagaacctgggccttgcccacctataacaaccacctctacaagcaaatctccagtgcttcaacgggggccagcaacgacaaccactacttcggctacagcaccccctgggggtattttgatttcaacagattccactgccacttctcaccacgtgactggcagcgactcatcaacaacaactggggattccggcctaagcgactcaacttcaagctcttcaacattcaggtcaaagaggttacggacaacaatggagtcaagaccatcgccaataaccttaccagcacggttcaagtcttctcggactcggagtaccagttgccgtacgtcctcggctctgcgcaccagggctgcctccctccgttcccggcggacgtgttcatgattccccagtacggctacctaacactcaacaacggtagtcaggccgtgggacgctcctccttctactgcctggaatactttccttcgcagatgctgagaaccggcaacaacttccagtttacttacaccttcgaggacgtgcctttccacagcagctacgcgcacagccagagcttggaccggctgatgaatcctctgattgaccagtacctgtactacttgtctcggactcaaacaacaggaggcacggcaaatacgcagactctgggcttcagccaaggtgggcctaatacaatggccaatcaggcaaagaactggctgccaggaccctgttaccgccaacaacgcgtctcaacgacaaccgggcaaaacaacaatagcaactttgcctggactgctgggaccaaataccatctgaatggaagaaattcattggctaatcctggcatcgctatggcaacacacaaagacgacaaggagcgtttttttcccagtaacgggatcctgatttttggcaaacaaaatgctgccagagacaatgcggattacagcgatgtcatgctcaccagcgaggaagaaatcaaaaccactaaccctgtggctacagaggaatacggtatcgtggcagataacttgcagcagcaaaacacggctcctcaaattggaactgtcaacagccagggggccttacccggtatggtctggcagaaccgggacgtgtacctgcagggtcccatctgggccaagattcctcacacggacggcaacttccacccgtctccgctgatgggcggctttggcctgaaacatcctccgcctcagatcctgatcaagaacacgcctgtacctgcggatcctccgaccaccttcaaccagtcaaagctgaactctttcatcacgcaatacagcaccggacaggtcagcgtggaaattgaatgggagctgcagaaggaaaacagcaagcgctggaaccccgagatccagtacacctccaactactacaaatctacaagtgtggactttgctgttaatacagaaggcgtgtactctgaaccccaccccattggcacccgttacctcacccgtcccctgtaa

SEQ ID NO: 1000 - DNA, 2244 bp, Artificial Sequence
  Description of Artificial Sequence: Synthetic polynucleotide
  modified_base (2241)..(2241): a, c, g, or t
atggctgccgatggttatcttccagattggctcgaggacactctctctgaaggaataagacagtggtggaagctcaaacctggcccaccaccaccaaagcccgcagagcggcataaggacgacagcaggggtcttgtgcttcctgggtacaagtacctcggacccttcaacggactcgacaagggagagccggtcaacgaggcagacgccgcggccctcgagcacgacaaagcctacgaccggcagctcgacagcggagacaacccgtacctcaagtacaaccacgccgacgcggagtttcaggagcgccttaaagaagatacgtcttttgggggcaacctcgggcgagcagtcttccaggccaagaagagggttctcgaaccttttggtctggttgaggaaggtgctaagacggctcctggaaagaaacgtccggtagagcagtcgccacaagagccagactcctcctcgggcattggcaagacaggccagcagcccgctaaaaagagactcaattttggtcagactggcgactcagagtcagtccccgacccacaacctctcggagaacctccagcaacccccgctgctgtgggacctactacaatggcttcaggcggtggcgcaccaatggcagacaataacgaaggcgccgacggagtgggtaatgcctcaggaaattggcattgcgattccacatggctgggcgacagagtcatcaccaccagcacccgaacatgggccttgcccacctataacaaccacctctacaagcaaatctccagtgcttcaacgggggccagcaacgacaaccactacttcggctacagcaccccctgggggtattttgacttcaacagattccactgccacttctcaccacgtgactggcagcgactcatcaacaacaactggggattccggcctaagcgactcaacttcaagctcttcaacattcaggtcaaagaggttacggacaacaatggagtcaagaccatcgccaataaccttaccagcacggtccaggtcttcacggactcagactatcagctcccgtacgtgctcgggtcggctcacgagggctgcctcccgccgttcccagcggacgttttcatgattcctcagtacggctacctaacactcaacaacggtagtcaggccgtgggacgctcctccttctactgcctggaatactttccttcgcagatgctgagaaccggcaacaacttccagtttacttacaccttcgaggacgtgcctttccacagcagctacgcgcacagccagagcttggaccggctgatgaatcctctgattgaccagtacctgtactacttgtctcggactcaaacaacaggaggcacggcaaatacgcagactctgggcttcagccaaggtgggcctaatacaatggccaatcaggcaaagaactggctgccaggaccctgttaccgccaacaacgcgtctcaacgacaaccgggcaaaacaacaatagcaactttgcctggactgctgggaccaaataccatctgaatggaagaaattcattggctaatcctggcatcgctatggcaacacacaaagacgacaaggagcgtttttttcccagtaacgggatcctgatttttggcaaacaaaatgctgccagagacaatgcggattacagcgatgtcatgctcaccagcgaggaagaaatcaaaaccactaaccctgtggctacagaggaatacggtatcgtggcagataacttgcagcagcaaaacacggctcctcaaattggaactgtcaacagccagggggccttacccggtatggtctggcagaaccgggacgtgtacctgcagggtcccatctgggccaagattcctcacacggacggcaacttccacccgtctccgctgatgggcggctttggcctgaaacatcctccgcctcagatcctgatcaagaacacgcctgtacctgcggatcctccgaccaccttcaaccagtcaaagctgaactctttcatcacgcaatacagcaccggacaggtcagcgtggaaattgaatgggagctgcagaaggaaaacagcaagcgctggaaccccgagatccagtacacctccaactactacaaatctacaagtgtggactttgctgttaatacagaaggcgtgtactctgaaccccaccccattggcaccagatacctgactcgtaatctgtaattgcttgttaatcaataaaccgtttaattnttt

SEQ ID NO: 1001 - DNA, 2217 bp, Artificial Sequence
  Description of Artificial Sequence: Synthetic polynucleotide
atggctgccgatggttatcttccagattggctcgaggacaacctctctgagggcattcgcgagtggtgggacttgaaacctggagccccgaaacccaaagccaaccagcaaaagcaggacgacggccggggtctggtgcttcctggctacaagtacctcggacccttcaacggactcgacaagggggagcccgtcaacgcggcggacgcagcggccctcgagcacgacaaggcctacgaccagcagctccaagcgggtgacaatccgtacctgcggtataaccacgccgacgccgagtttcaggagcgtctgcaagaagatacgtcttttgggggcaacctcggacgagcagtcttccaggcgaaaaagagggttctcgaacctctcggtctggttgaggaaggcgctaagacggctcctggaaagaagagaccggtagagccatcaccccagcgttctccagactcctctacgggcatcggcaagaaaggccaacagcccgccagaaaaagactcaattttggtcagactggcgactcagagtcagttccagaccctcaacctctcggagaacctccagcagcgccctctggtgtgggacctaatacaatggctgcaggcggtggcgcaccaatggcagacaataacgaaggcgccgacggagtgggtagttcctcgggaaattggcattgcgattcccaatggctgggggacagagtcatcaccaccagcacccgaacctgggccctgcccacctacaacaatcacctctacaagcaaatctccaacagcacatctggaggatcttcaaatgacaacgcctacttcggctacagcaccccctgggggtattttgacttcaaccgcttccactgccacttctcaccacgtgactggcagcgactcatcaacaacaactggggattccggcccaagagactcagcttcaaactcttcaacatccaggtcaaggaggtcacgcagaatgaaggcaccaagaccatcgccaataacctcaccagcaccatccaggtgtttacggactcggagtaccagctgccgtacgttctcggctctgcccaccagggctgcctgcctccgttcccggcggacgtgttcatgattcctcagtacggctacctaacgctcaacaatggcagccaggcagtgggacggtcatccttttactgcctggaatatttcccatcgcagatgctgagaacgggcaacaactttaccttcagctacacctttgaggacgttcctttccacagcagctacgctcacagccagagtctggaccgtctcatgaatcctctgattgaccagtacctgtactacttgtctcggactcaaacaacaggaggcacggcaaatacgcagactctgggcttcagccaaggtgggcctaatacaatggccaatcaggcaaagaactggctgccaggaccctgttaccgccaacaacgcgtctcaacgacaaccgggcaaaacaacaatagcaactttgcctggactgctgggaccaaataccatctgaatggaagaaattcattggctaatcctggcatcgctatggcaacacacaaagacgacaaggagcgtttttttcccagtaacgggatcctgatttttggcaaacaaaatgctgccagagacaatgcggattacagcgatgtcatgctcaccagcgaggaagaaatcaaaaccactaaccctgtggctacagaggaatacggtatcgtggcagataacttgcagcagcaaaacacggctcctcaaattggaactgtcaacagccagggggccttacccggtatggtctggcagaaccgggacgtgtacctgcagggtcccatctgggccaagattcctcacacggacggcaacttccacccgtctccgctgatgggcggctttggacttaagcacccgcctcctcagatcctcatcaaaaacacgcctgttcctgcggatcctccgaccaccttcaaccagtcaaagctgaactctttcatcacgcaatacagcaccggacaggtcagcgtggaaattgaatgggagctgcagaaggaaaacagcaagcgctggaaccccgagatccagtacacctccaactactacaaatctacaagtgtggactttgctgttaatacagaaggcgtgtactctgaaccccaccccattggcacccgttacctcacccgtcccctgtaa

SEQ ID NO: 1002 - DNA, 2214 bp, Artificial Sequence
  Description of Artificial Sequence: Synthetic polynucleotide
atggctgccgatggttatcttccagattggctcgaggacaacctctctgagggcattcgcgagtggtgggacttgaaacctggagccccgaagcccaaagccaaccagcaaaagcaggacgacggccggggtctggtgcttcctggctacaagtacctcggacccttcaacggactcgacaagggggagcccgtcaacgcggcggatgcagcggccctcgagcacgacaaagcctacgaccagcagctcaaagcgggtgacaatccgtacctgcggtataaccacgccgacgccgagtttcaggagcgtctgcaagaagatacgtcttttgggggcaacctcgggcgagcagtcttccaggccaagaagagggttctcgaaccttttggtctggttgaggaaggtgctaagacggctcctggaaagaaacgtccggtagagcagtcgccacaagagccagactcctcctcgggcattggcaagacaggccagcagcccgctaaaaagagactcaattttggtcagactggcgactcagagtcagtccccgacccacaacctctcggagaacctccagcaacccccgctgctgtgggacctactacaatggcttcaggcggtggcgcacccatgcaagacaataacgaaggcgccgacggagtgggtagttcctcgggaaattggcattgcgattccacatggctgggcgacagagtcatcaccaccagcacccgaacctgggccctgcccacctacaacaaccacctctacaagcaaatctccaacgggacatcgggaggagccaccaacgacaacacctacttcggctacagcaccccctgggggtattttgactttaacagattccactgccacttttcaccacgtgactggcagcgactcatcaacaacaactggggattccggcccaagagactcaacttcaagctcttcaacatccaggtcaaggaggtcacgcagaatgaaggcaccaagaccatcgccaataaccttaccagcacgattcaggtctttacggattcggaataccagctcccgtacgtcctcggctctgcgcaccagggctgcctccctccgttcccggcggacgtgttcatgattccgcagtacggctacctaacgctcaacaatggtagccaggcagtgggacggtcatccttttactgcctggaatatttcccatcgcagatgctgagaacgggcaacaactttaccttcagctacacctttgaggacgttcctttccacagcagctacgctcacagccagagtctggaccgtctcatgaatcctctgattgaccagtacctgtactacttgtctcggactcaaacaacaggaggcacggcaaatacgcagactctgggcttcagccaaggtgggcctaatacaatggccaatcaggcaaagaactggctgccaggaccctgttaccgccaacaacgcgtctcaacgacaaccgggcaaaacaacaatagcaactttgcctggactgctgggaccaaataccatctgaatggaagaaattcattggctaatcctggcatcgctatggcaacacacaaagacgacaaggagcgtttttttcccagtaacgggatcctgatttttggcaaacaaaatgctgccagagacaatgcggattacagcgatgtcatgctcaccagcgaggaagaaatcaaaaccactaaccctgtggctacagaggaatacggtatcgtggcagataacttgcagcagcaaaacacggctcctcaaattggaactgtcaacagccagggggccttacccggtatggtctggcagaaccgggacgtgtacctgcagggtcccatctgggccaagattcctcacacggacggcaacttccacccgtctccgctgatgggcggctttggcctgaaacatcctccgcctcagatcctgatcaagaacacgcctgtacctgcggatcctccgaccaccttcaaccagtcaaagctgaactctttcatcacgcaatacagcaccggacaggtcagcgtggaaattgaatgggagctgcagaaggaaaacagcaagcgctggaaccccgagatccagtacacctccaactactacaaatctacaagtgtggactttgctgttaatacagaaggcgtgtactctgaaccccaccccattggcacccgttacctcacccgtcccctgtaa

SEQ ID NO: 1003 - DNA, 2211 bp, Artificial Sequence
  Description of Artificial Sequence: Synthetic polynucleotide
atggctgccgatggttatcttccagattggctcgaggacaacctctctgagggcattcgcgagtggtgggcgctgaaacctggagccccgaagcccaaagccaaccagcaaaagcaggacgacggccggggtctggtgcttcctggctacaagtacctcggacccttcaacggactcgacaagggggagcccgtcaacgcggcggacgcagcggccctcgagcacgacaaggcctacgaccagcagctcaaagcgggtgacaatccgtacctgcggtataaccacgccgacgccgagtttcaggagcgtctgcaagaagatacgtcttttgggggcaacctcgggcgagcagtcttccaggccaagaagcgggttctcgaacctctcggtctggttgaggaaggcgctaagacggctcctggaaagaaacgtccggtagagcagtcgccacaagagccagactcctcctcgggcatcggcaagacaggccagcagcccgctaaaaagagactcaattttggtcagactggcgactcagagtcagtccccgacccacaacctctcggagaacctccagcaacccccgctgctgtgggacctactacaatggcttcaggcggtggcgcaccaatggcagacaataacgaaggcgccgacggagtgggtagttcctcgggaaattggcattgcgattccacatggctgggcgacagagtcatcaccaccagcacccgcacctgggccttgcccacctacaataaccacctctacaagcaaatctccagtgcttcaacgggggccagcaacgacaaccactacttcggctacagcaccccctgggggtattttgacttcaacagattccactgccacttctcaccacgtgactggcagcgactcatcaacaacaactggggattccggcctaagcgactcaacttcaagctcttcaacattcaggtcaaagaggttacggacaacaatggagtcaagaccatcgccaataaccttaccagcacggtccaggtcttcacggactcagactatcagctcccgtacgtgctcgggtcggctcacgagggctgcctcccgccgttcccagcggacgttttcatgattcctcagtacgggtatctgacgctcaacaatggcagccaggcagtgggacggtcatccttttactgcctggaatatttcccatcgcagatgctgagaacgggcaataactttaccttcagctacaccttcgaggacgtgcctttccacagcagctacgcgcacagccagagcctggaccggctgatgaatcctctgattgaccagtacctgtactacttgtctcggactcaaacaacaggaggcacggcaaatacgcagactctgggcttcagccaaggtgggcctaatacaatggccaatcaggcaaagaactggctgccaggaccctgttaccgccaacaacgcgtctcaacgacaaccgggcaaaacaacaatagcaactttgcctggactgctgggaccaaataccatctgaatggaagaaattcattggctaatcctggcatcgctatggcaacacacaaagacgacaaggagcgtttttttcccagtaacgggatcctgatttttggcaaacaaaatgctgccagagacaatgcggattacagcgatgtcatgctcaccagcgaggaagaaatcaaaaccactaaccctgtggctacagaggaatacggtatcgtggcagataacttgcagcagcaaaacacggctcctcaaattggaactgtcaacagccagggggccttacccggtatggtctggcagaaccgggacgtgtacctgcagggtcccatctgggccaagattcctcacacggacggcaacttccacccgtctccgctgatgggcggctttggcctgaaacatcctccgcctcagatcctgatcaagaacacgcctgtacctgcggatcctccgaccaccttcaaccagtcaaagctgaactctttcatcacgcaatacagcaccggacaggtcagcgtggaaattgaatgggagctgcagaaggaaaacagcaagcgctggaaccccgagatccagtacacctccaactactacaaatctacaagtgtggactttgctgttaatacagaaggcgtgtactctgaaccccaccccattggcacccgttacctcacccgtcccctgtaa

SEQ ID NO: 1004 - DNA, 2214 bp, Artificial Sequence
  Description of Artificial Sequence: Synthetic polynucleotide
atggctgccgatggttatcttccagattggctcgaggacaacctctctgagggcattcgcgagtggtgggacttgaaacctggagccccgaaacccaaagccaaccagcaaaagcaggacgacggccggggtctggtgcttcctggctacaagtacctcggacccttcaacggactcgacaagggggagcccgtcaacgcggcggatgcagcggccctcgagcacgacaaggcctacgaccagcagctcaaagcgggtgacaatccgtacctgcggtataaccacgccgacgccgagtttcaggagcgtctgcaagaagatacgtcttttgggggcaacctcgggcgagcagtcttccaggccaagaagcgggttctcgaacctctcggtctggttgaggaaggcgctaagacggctcctggaaagaagagaccggtagagccatcaccccagcgttctccagactcctctacgggcatcggcaagaaaggccaacagcccgccagaaaaagactcaattttggtcagactggcgactcagagtcagtccccgacccacaacctctcggagaacctccagcaacccccgctgctgtgggacctactacaatggcttcaggcggtggcgcaccaatggcagacaataacgaaggcgccgacggagtgggtaatgcctcaggaaattggcattgcgattccacatggctgggcgacagagtcatcaccaccagcacccgaacatgggccttgcccacctataacaaccacctctacaagcaaatctccagtgcttcaacgggggccagcaacgacaaccactacttcggctacagcaccccctgggggtattttgatttcaacagattccactgccatttctcaccacgtgactggcagcgactcatcaacaacaatttgggatcccggcccaagagactcaacttcaagctcttcatcatccaagtcaaggaggtcacgacgaatgatggcgtcacgaccatcgctaataaccttaccagcacggttcaagtcttctcggactcggagtaccagttgccgtacgtcctcggctctgcgcaccagggctgcctccctccgttcccggcggacgtgttcatgattccgcagtacggctacctaacgctcaacaatggcagccaggcagtgggacggtcatccttttactgcctggaatatttcccatcgcagatgctgagaacgggcaataactttaccttcagctacaccttcgaggacgtgcctttccacagcagctacgcgcacagccagagcctggaccggctgatgaatcctctcatcgaccagtacctgtattacctgaacagaactcagaatcagtccggaagtgcccaaaacaaggacttgctgtttagccgggggtctccagctggcatgtctgttcagcccaaaaactggctacctggaccctgttaccggcagcagcgcgtttctaaaacaaaaacagacaacaacaacagcaactttacctggactggtgcttcaaaatataaccttaatgggcgtgaatctataatcaaccctggcactgctatggcctcacacaaagacgacaaagacaagttctttcccatgagcggtgtcatgatttttggaaaggagagcgccggagcttcaaacactgcattggacaatgtcatgatcacagacgaagaggaaatcaaagccactaaccccgtggccaccgaaagatttgggactgtggcagtcaatctccagagcagcagcacagaccctgcgaccggagatgtgcatgttatgggagccttacctggaatggtgtggcaagacagagacgtatacctgcagggtcctatttgggccaaaattcctcacacggatggacactttcacccgtctcctctcatgggcggctttggacttaagcacccgcctcctcagatcctcatcaaaaacacgcctgttcctgcgaatcctccggcagagttttcggctacaaagtttgcttcattcatcacccagtattccacaggacaagtgagcgtggagattgaatgggagctgcagaaagaaaacagcaaacgctggaatcccgaagtgcagtatacatctaactatgcaaaatctgccaacgttgatttcactgtggacaacaatggactttatactgagcctcgccccattggcacccgttacctcacccgtcccctgtaa

SEQ ID NO: 1005 - DNA, 2211 bp, Artificial Sequence
  Description of Artificial Sequence: Synthetic polynucleotide
atggctgccgatggttatcttccagattggctcgaggacaacctctctgagggcattcgcgagtggtgggcgctgaaacctggagccccgaaacccaaagccaaccagcaaaagcaggacgacggccggggtctggtgcttcctggctacaagtacctcggacccttcaacggactcgacaagggggagcccgtcaacgcggcggacgcagcggccctcgagcacgacaaggcctacgaccagcagctcaaggcgggtgacaatccgtacctgcggtataaccacgccgacgccgagtttcaggagcgtctgcaagaagatacgtcttttgggggcaacctcgggcgagcagtcttccaggccaaaaagaggcttcttgaacctcttggtctggttgaggaagcggctaagacggctcctggaaagaaacgtccggtagagcagtcgccacaagagccagactcctcctcgggcattggcaagacaggccagcagcccgctaaaaagagactcaactttgggcagactggcgactcagagtcagtgcccgaccctcaaccaatcggagaacctccagcaacccccgctgctgtgggacctactacaatggcttcaggcggtggcgcaccaatggcggacaataacgaaggcgccgatggagtgggtaattcctcgggaaattggcattgcgattccacatggctgggcgacagagtcatcaccaccagcacccgaacctgggccctgcccacctacaacaatcacctctacaagcaaatctccagtgcttcaacgggggccagcaacgacaaccactacttcggctacagcaccccctgggggtattttgatttcaacagattccactgccacttttcaccacgtgactggcagcgactcatcaacaacaactggggattccggcccaagagactcaacttcaagctcttcaacatccaggtcaaggaggtcacgcagaatgaaggcaccaagaccatcgccaataacctcaccagcaccatccaggtgtttacggactcggagtaccagctgccgtacgttctcggctccgcccaccagggctgcctgcctccgttcccggcggacgtgttcatgattccgcagtacggctacctaacgctcaacaatggcagccaggcagtgggacggtcatccttttactgcctggaatatttcccatcgcagatgctgagaacgggcaacaactttaccttcagctacacctttgaggacgttcctttccacagcagctacgctcacagccagagtctggaccgtctcatgaatcctctgattgaccagtacctgtactacttgtctcggactcaaacaacaggaggcacggcaaatacgcagactctgggcttcagccaaggtgggcctaatacaatggccaatcaggcaaagaactggctgccaggaccctgttaccgccaacaacgcgtctcaacgacaaccgggcaaaacaacaatagcaactttgcctggactgctgggaccaaataccatctgaatggaagaaattcattggctaatcctggcatcgctatggcaacacacaaagacgacaaggagcgtttttttcccagtaacgggatcctgatttttggcaaacaaaatgctgccagagacaatgcggattacagcgatgtcatgctcaccagcgaggaagaaatcaaaaccactaaccctgtggctacagaggaatacggtatcgtggcagataacttgcagcagcaaaacacggctcctcaaattggaactgtcaacagccagggggccttacccggtatggtctggcagaaccgggacgtgtacctgcagggtcccatctgggccaagattcctcacacggacggcaacttccacccgtctccgctgatgggcggctttggcctgaaacatcctccgcctcagatcctgatcaagaacacgcctgtacctgcggatcctccgaccaccttcaaccagtcaaagctgaactctttcatcacgcaatacagcaccggacaggtcagcgtggaaattgaatgggagctgcagaaggaaaacagcaagcgctggaaccccgagatccagtacacctccaactactacaaatctacaagtgtggactttgctgttaatacagaaggcgtgtactctgatccccaccccattggcacccgttacctcacccgtcccctgtaa

SEQ ID NO: 1006 - DNA, 2211 bp, Artificial Sequence
  Description of Artificial Sequence: Synthetic polynucleotide
atggctgccgatggttatcttccagattggctcgaggacaacctctctgagggcattcgcgagtggtgggcgctgaaacctggagccccgaagcccaaagccaaccagcaagagcaggacgacggccggggtctggtgcttcctggctacaagtacctcggacccttcaacggactcgacaagggagagcccgtcaacgcggcggatgcagcggccctcgagcacgacaaagcctacgaccagcagctcaaagcgggtgacaatccgtacctgcggtataaccacgccgacgccgagtttcaggagcgtctgcaagaagatacgtcttttgggggcaacctcgggcgagcagtcttccaggccaagaagagggttctcgaaccttttggtctggttgaggaaggtgctaagacggctcctggaaagaaacgtccggtagagcagtcgccacaagagccagactcctcctcgggcattggcaagacaggccagcagcccgctaaaaagagactcaattttggtcagactggcgactcagagtcagttccagaccctcaacctctcggagaacctccagcagcgccctctggtgtgggacctaatacaatggctgcaggcggtggcgcaccaatggcagacaataacgaaggcgccgacggagtgggtagttcctcgggaaattggcattgcgattccacatggctgggcgacagagtcatcaccaccagcacccgaacctgggccctgcccacctacaacaaccacctctacaagcaaatctccagtgcttcaacgggggccagcaacgacaaccactacttcggctacagcaccccctgggggtattttgactttaacagattccactgccacttttcaccacgtgactggcagcgactcatcaacaacaactggggattccggcccaagagactcaacttcaagctcttcaacatccaggtcaaggaggtcacgcagaatgaaggcaccaagaccatcgccaataaccttaccagcacgattcaggtctttacggattcggaataccagctcccgtacgtcctcggctctgcgcaccagggctgcctccctccgttcccggcggacgtgttcatgattccgcagtacggctacctaacgctcaacaatggtagccaggcagtgggacggtcatcctttttctgcctggaatatttcccatcgcagatgctgagaacgggcaacaactttaccttcagctacacctttgaggacgttcctttccacagcagctacgctcacagccagagtctggaccgtctcatgaatcctctgattgaccagtacctgtactacttgtctcggactcaaacaacaggaggcacggcaaatacgcagactctgggcttcagccaaggtgggcctaatacaatggccaatcaggcaaagaactggctgccaggaccctgttaccgccaacaacgcgtctcaacgacaaccgggcaaaacaacaatagcaactttgcctggactgctgggaccaaataccatctgaatggaagaaattcattggctaatcctggcatcgctatggcaacacacaaagacgacaaggagcgtttttttcccagtaacgggatcctgatttttggcaaacaaaatgctgccagagacaatgcggattacagcgatgtcatgctcaccagcgaggaagaaatcaaaaccactaaccctgtggctacagaggaatacggtatcgtggcagataacttgcagcagcaaaacacggctcctcaaattggaactgtcaacagccagggggccttacccggtatggtctggcagaaccgagacgtgtacctgcagggtcccatctgggccaagattcctcacacggacggcaacttccacccgtctccgctgatgggcggctttggcctgaaacatcctccgcctcagatcctgatcaagaacacgcctgtacctgcggatcctccgaccaccttcaaccagtcaaagctgaactctttcatcacgcaatacagcaccggacaggtcagcgtggaaattgaatgggagctgcagaaggaaaacagcaagcgctggaaccccgagatccagtacacctccaactactacaaatctacaagtgtggactttgctgttaatacagaaggcgtgtactctgaaccccaccccattggcacccgttacctcacccgtcccctgtaa

SEQ ID NO: 1007 - DNA, 2211 bp, Artificial Sequence
  Description of Artificial Sequence: Synthetic polynucleotide
atggctgccgatggttatcttccagattggctcgaggacaacctctctgagggcattcgcgagtggtgggacttgaaacctggagccccgaagcccaaagccaaccagcaaaagcaggacgacggccggggtctggtgcttcctggctacaagtacctcggacccttcaacggactcgacaagggggagcccgtcaacgcggcggacgcagcggccctcgagcacgacaaggcctacgaccagcagctcaaagcgggtgacaatccgtacctgcggtataaccacgccgacgccgagtttcaggagcgtctgcaagaagatacgtcttttgggggcaacctcgggcgagcagtcttccaggccaagaagcgggttctcgaacctctcggtctggttgaggaaggcgctaagacggctcctggaaagaaacgtccggtagagcagtcaccacaagagccagactcctcctcgggcatcggcaagacaggccagcagcccgctaaaaagagactcaattttggtcagactggcgactcagagtcagtccccgacccacaacctctcggagaacctccagcaacccccgctgctgtgggacctactacaatggcttcaggcggtggcgcaccaatggcggacaataacgaaggcgccgacggagtgggtaatgcctcaggaaattggcattgcgattccacatggctgggcgacagagtcatcaccaccagcacccgaacatgggccttgcccacctataacaaccacctctacaagcaaatctccagtgcttcaacgggggccagcaacgacaaccactacttcggctacagcaccccctgggggtattttgatttcaacagattccactgccatttctcaccacgtgactggcagcgactcatcaacaacaattggggattccggcccaagagactcaacttcaagctcttcaacatccaagtcaaggaggtcacgacgaatgatggcgtcacgaccatcgctaataaccttaccagcacggttcaagtcttctcggactcggagtaccagttgccgtacgtcctcggctctgcgcaccagggctgcctccctccgttcccggcggacgtgttcatgattccgcagtacggctacctaacgctcaacaatggcagccaggcagtgggacggtcatccttttactgcctggaatatttcccatcgcagatgctgagaacgggcaataactttaccttcagctacaccttcgaggacgtgcctttccacagcagctacgcgcacagccagagcctggaccggctgatgaatcctctcatcgaccagtacctgtattacctgaacagaactcagaatcagtccggaagtgcccaaaacaaggacttgctgtttagccgggggtctccagctggcatgtctgttcagcccaaaaactggctacctggaccctgttaccggcagcagcgcgtttctaaaacaaaaacagacaacaacaacagcaactttacctggacaggtgcttcaaaatataaccttaatgggcgtgaatctataatcaaccctggcactgctatggcctcacacaaagacgacaaagacaagttctttcccatgagcggtgtcatgatttttggaaaggagagcgccggagcttcaaacactgcattggacaatgtcatgatcacagacgaagaggaaatcaaagccactaaccccgtggccaccgaaagatttgggactgtggcagtcaatctccagaacagcagcacagaccctgcgaccggagatgtgcatgttatgggagccttacctggaatggtgtggcaagacagagacgtatacctgcagggtcctatttgggccaaaattcctcacacggatggacactttcacccgtctcctctcatgggcggctttggacttaagcacccgcctcctcagatcctcatcaaaaacacgcctgttcctgcgaatcctccggcagagttttcggctacaaagtttgcttcattcatcacccagtattccacaggacaagtgagcgtggagattgaatgggagctgcagaaagaaaacagcaaacgctggaatcccgaagtgcagtatacatctaactatgcaaaatctgccaacgttgatttcactgtagacaacaatggactttatactgtgcctcgccccattggcacccgttacctcacccgtcccctgtaa

SEQ ID NO: 1008 - DNA, 2211 bp, Artificial Sequence
  Description of Artificial Sequence: Synthetic polynucleotide
atggctgccgatggttatcttccagattggctcgaggacaacctctctgagggcattcgcgagtggtgggcgctgaaacctggagccccgaagcccaaagccaaccagcaaaagcaggacgacggccggggtctggtgcttcctggctacaagtacctcggacccttcaacggactcgacaaaggagagccggtcaacgcggcggacgcggcggccctcgaacacgacaaggcttacgaccagcagctcaaggcgggtgacaacccctacctgcggtataaccacgccgacgccgagttccaggagcggctgcaagaagatacgtcttttgggggcaacctcgggcgagcagtcttccaggccaaaaagaggcttcttgaacctcttggtctggttgaggaaggcgctaagacggctcctggaaagaagaggcctgtagagcagtctcctcaagaaccggactcctcctcgggtattggcaaaacaggtgagcagcccgctaaaaagagactcaattttggtcagactggcgactcagagtcagtccccgacccacaacctctcggagaacctccagcaacccccgctgctgtgggacctactacaatggcttcaggcggtggcgcaccaatggcagacaataacgaaggcgccgacggagtgggtagtgcctcaggaaattggcattgcgattccacatggctgggcgacagagtcatcaccaccagcacccgaacctgggccctgcccacctataacaaccatctctacaagcaaatctccagtgcttcaacgggggccagcaacgacaaccactacttcggctacagcaccccctgggggtattttgacttcaacagattccactgccacttctcaccacgtgactggcagcgactcatcaacaacaactggggattccggcctaagcgactcaacttcaagctcttcaacattcaggtcaaagaggttacggacaacaatggagtcaagaccatcgccaataacctcaccagcaccatccaggtgttcacggactcagagtatcagctgccgtacgtgctcgggtcggctcaccagggctgcctccctccgttcccagcggacgtgttcatgattcctcagtacgggtatctgacactcaacaacggcagtcaggcagtgggacggtcatccttctactgcctggaatattttccatcgcagatgctgagaaccggcaacaactttccgttcagttacaccttcgaggacgtgcctttccacagcagctacgcgcacagccagagcctggaccggctgatgaatcctctgattgaccagtacctgtactacttgtctcggactcaaacaacaggaggcacggcaaatacgcagactctgggcttcagccaaggtgggcctaatacaatggccaatcaggcaaagaactggctgccaggaccctgttaccgccaacaacgcgtctcaacgacaaccgggcaaaacaacaatagcaactttgcctggactgctgggaccaaataccatctgaatggaagaaattcattggctaatcctggcatcgctatggcaacacacaaagacgacaaggagcgtttttttcccagtaacgggatcctgatttttggcaaacaaaatgctgccagagacaatgcggattacagcgatgtcatgctcaccagcgaggaagaaatcaaaaccactaaccctgtggctacagaggaatacggtatcgtggcagataacttgcagcagcaaaacacggctcctcaaattggaactgtcaacagccagggggccttacccggtatggtctggcagaaccgggacgtgtacctgcagggtcccatctgggccaagattcctcacacggacggcaacttccacccgtctccgctgatgggcggctttggcctgaaacatcctccgcctcagatcctgatcaagaacacgcctgtacctgcggatcctccgaccaccttcaaccagtcaaagctgaactctttcatcacgcaatacagcaccggacaggtcagcgtggaaattgaatgggagctgcagaaggaaaacagcaagcgctggaaccccgagatccagtacacctccaactactacaaatctacaagtgtggactttgctgttaatacagaaggcgtgtactctgaaccccaccccattggcacccgttacctcacccgtcccctgtaa

SEQ ID NO: 1009 - DNA, 2211 bp, Artificial Sequence
  Description of Artificial Sequence: Synthetic polynucleotide
atggctgccgatggttatcttccagattggctcgaggacaacctctctgagggcattcgcgagtggtgggcgctgaaacctggagccccgaagcccaaagccaaccagcaaaagcaggacgacggccggggtctggtgcttcctggctacaagtacctcggacccttcaacggactcgacaagggggagcccgtcaacgcggcggacgcagcggccctcgagcacgacaaggcctacgaccagcagctcaaagcgggtgacaatccgtacctgcggtataaccacgccgacgccgagtttcaggagcgtctgcaagaagatacgtcttttgggggcaacctcgggcgagcagtcttccaggccaagaagcgggttctcgaacctctcggtctggttgaggaaggcgctaagacggctcctggaaagaaacgtccggtagaacagtcgccacaagagccagactcctcctcgggcatcggcaagacaggccagcagcccgctaaaaagagactcaattttggtcagactggcgactcagagtcagtccccgatccacaacctctcggagaacctccagcaacccccgctgctgtgggacctactacaatggcttcaggcggtggcgcaccaatggcagacaataacgaaggcgccgacggagtgggtagttcctcgggaaattggcattgcgattcccaatggctgggggacagagtcatcaccaccagcacccgaacctgggccctgcccacctacaacaaccacctctacaagcaaatctccagtgcttcaacgggggccagcaacgacaaccactacttcggctacagcaccccctgggggtattttgatttcaacagattccactgccatttctcaccacgtgactggcagcgactcatcaacaacaactggggattccggcctaagcgactcaacttcaagctcttcaacattcaggtcaaagaggttacggacaacaatggagtcaagaccatcgccaataaccttaccagcacggtccaggtcttcacggactcggagtaccagttgccgtacgtcctcggctctgcgcaccaggactgcctccctccgttcccggcggacgtgttcatgattccgcagtacggctacctaacgctcaacaatggcagccaggcagtgggacggtcatccttttactgcctggaatatttcccatcgcagatgctgagaacgggcaacaactttaccttcagctacacctttgaggacgttcctttccacagcagctacgctcacagccagagtctggaccgtctcatgaatcctctgattgaccagtacctgtactacttgtctcggactcaaacaacaggaggcacggcaaatacgcagactctgggcttcagccaaggtgggcctaatacaatggccaatcaggcaaagaactggctgccaggaccctgttaccgccaacaacgcgtctcaacgacaaccggacaaaacaacaatagcaactttgcctggactgctgggaccaaataccatctgaatggaagaaattcattggctaatcctggcatcgctatggcaacacacaaagacgacaaggagcgtttttttcccagtaacgggatcctgatttttggcaaacaaaatgctgccagagacaatgcggattacagcgatgtcatgctcaccagcgaggaagaaatcaaaaccactaaccctgtggctacagaggaatacggtatcgtggcagataacttgcagcagcaaaacacggctcctcaaattggaactgtcaacagccagggggccttacccggtatggtctggcagaaccgggacgtgtacctgcagggtcccatctgggccaagattcctcacacggacggcaacttccacccgtctccgctgatgggcggctttggcctgaaacatcctccgcctcagatcctgatcaagaacacgcctgtacctgcggatcctccgaccaccttcaaccagtcaaagctgaactctttcatcacgcaatacagcaccggacaggtcagcgtggaaattgaatgggagctgcagaaggaaaacagcaagcgctggaaccccgagatccagtacacctccaactactacaaatctacaagtgtggactttgctgttaatacagaaggcgtgtactctgaaccccaccccattggcacccgttacctcacccgtcccctgtaa

SEQ ID NO: 1010 - DNA, 2211 bp, Artificial Sequence
  Description of Artificial Sequence: Synthetic polynucleotide
atggctgccgatggttatcttccagattggctcgaggacaacctctctgagggcattcgcgagtggtgggacttgaaacctggagccccgaagcccaaagccaaccagcaaaagcaggacgacggccggggtctggtgcttcctggctacaagtacctcggacccttcaacggactcgacaagggggagcccgtcaacgcggcggacgcagcggccctcgagcacgacaaggcctacgaccagcagctcaaagcgggtgacaatccgtacctgcggtataaccacgccgacgccgagtttcaggagcgtctgcaagaagatacgtcttttgggggcaacctcgggcgagcagtcttccaggccaagaagcgggttctcgaacctctcggtctggttgaggaaggcgctaagacggctcctggaaagaaacgtccggtagagcagtcaccacaagagccagactcctcctcgggcatcggcaagacaggccagcagcccgctaaaaagagactcaattttggtcagactggcgactcagagtcagtccccgacccacaacctctcggagaacctccagcaacccccgctgctgtgggacctactacaatggcttcaggcggtggcgcaccaatggcagacaataacgaaggtgccgacggagtgggtaatgcctcaggaaattggcattgcgattccacatggctgggcgactgagtcatcaccaccagcacccgcacctgggccttgcccacctacaataaccacctctacaagcaaatctccagtgcttcaacgggggccagcaacgacaaccactacttcggctacagcaccccctgggggtattttgatttcaacagattccactgccacttttcaccacgtgactggcagcgactcatcaacaacaattggggattccggcccaagagactcaacttcaaactcttcaacatccaagtcaaggaggtcacgcagaatgaaggcaccaagaccatcgccaataacctcaccagcaccatccaggtgtttacggactcggagtaccagctgccgtacgttctcggctctgcccaccagggctgcctgcctccgttcccggcggacgtgttcatgattccccagtacggctacctaacgctcaacaatggcagccaggcagtgggacggtcatccttttactgcctggaatactttccttcgcagatgctgagaaccggcaacaacttccagtttacttacaccttcgaggacgtgcctttccacagcagctacgcccacagccagagcttggaccggctgatgaatcctctgattgaccagtacctgtactacttgtctcggactcaaacaacaggaggcacggcaaatacgcagactctgggcttcagccaaggtgggcctaatacaatggccaatcaggcaaagaactggctgccaggaccctgttaccgccaacaacgcgtctcaacgacaaccgggcaaaacaacaatagcaactttgcctggactgctgggaccaaataccatctgaatggaagaaattcattggctaatcctggcatcgctatggcaacacacaaagacgacaaggagcgtttttttcccagtaacgggatcctgatttttggcaaacaaaatgctgccagagacaatgcggattacagcgatgtcatactcaccagcgaggaagaaatcaaaaccactaaccctgtggctacagaggaatacggtatcgtggcagataacttgcagcagcaaaacacggctcctcaaattggaactgtcaacagccagggggccttacccggtatggtctggcagaaccgggacgtgtacctgcagggtcccatctgggccaagattcctcacacggacggcaacttccacccgtctccgctgatgggcggctttggcctgaaacatcctccgcctcagatcctgatcaagaacacgcctgtacctgcggatcctccgaccaccttcaaccagtcaaagctgaactctttcatcacgcaatacagcaccggacaggtcagcgtggaaattgaatgggagctgcagaaggaaaacagcaagcgctggaaccccgagatccagtacacctccaactactacaaatctacaagtgtggactttgctgttaatacagaaggcgtgtactctgaaccccaccccattggcacccgttacctcacccgtcccctgtaa

SEQ ID NO: 1011 - DNA, 2211 bp, Artificial Sequence
  Description of Artificial Sequence: Synthetic polynucleotide
atggctgccgatggttatcttccagattggctcgaggacactctctctgaaggaataagacagtggtggaagctcaaacctggcccaccaccaccaaagcccgcagagcggcataaggacgacagcaggggtcttgtgcttcctgggtacaagtacctcggacccttcaacggactcgacaagggagagccggtcaacgaggcagacgccgcggccctcgagcacgacaaagcctacgaccggcagctcgacagcggagacaacccgtacctcaagtacaaccacgccgacgcggagtttcaggagcgccttaaagaagatacgtcttttgggggcaacctcgggcgagcagtcttccaggccaagaagagggttctcgaaccttttggtctggttgaggaaggtgctaagacggctcctggaaagaaacgtccggtagagcagtcgccacaagagccagactcctcctcgggcattggcaagacaggccagcagcccgctaaaaagagactcaattttggtcagactggcgactcagagtcagtccccgacccacaacctctcggagaacctccagcaacccccgctgctgtgggacctactacaatggcttcaggcggtggcgcaccaatggcagacaataacgaaggcgccgacggagtgggtaatgcctcaggaaattggcattgcgattccacatggctgggcgacagagtcatcaccaccagcacccgaacatgggccttgcccacctataacaaccacctctacaagcaaatctccagtacttcaacgggggccagtaacgacaaccactacttcggctacagcaccccctgggggtattttgacttcaacagattccactgccacttctcaccacgtgactggcagcgactcatcaacaacaactggggattccggcctaagcgactcaacttcaagctcttcaacattcaggtcaaagaggttacggacaacaatggagtcaagaccatcgccaataaccttaccagcacggtccaggtcttcacggactcggagtaccagttgccgtacgtcctcggctctgcgcaccagggctgcctgcctccgttcccggcggacgtgttcatgattccgcagtacggctacctaacgctcaacaatggcagccaggcagtgggacggtcatccttttactgcctggaatatttcccatcgcagatgctgagaacgggcaacaactttaccttcagctacacttttgaggacgttcctttccacagcagctacgctcacagccagagtctggaccgtctcatgaatcctctgattgaccagtacctgtactacttgtctcggactcaaacaacaggaggcacggcaaatacgcagactctgggcttcagccaaggtgggcctaatacaatggccaatcaggcaaagaactggctgccaggaccctgttaccgccaacaacgcgtctcaacgacaaccggacaaaacaacaatagcaactttgcctggactgctgggaccaaataccatctgaatggaagaaattcattggctaatcctggcatcgctatggcaacacacaaagacgacaaggagcgtttttttcccagtaacgggatcctgatttttggcaaacaaaatgctgccagagacaatgcggattacagcgatgtcatgctcaccagcgaggaagaaatcaaaaccactaaccctgtggctacagaggaatacggtatcgtggcagataacttgcagcagcaaaacacggctcctcaaattggaactgtcaacagccagggggccttacccggtatggtctggcagaaccgggacgtgtacctgcagggtcccatctgggccaagattcctcacacggacggcaacttccacccgtctccgctgatgggcggctttggcctgaaacatcctccgcctcagatcctgatcaagaacacgcctgtacctgcggatcctccgaccaccttcaaccagtcaaagctgaactctttcatcacgcaatacagcaccggacaggtcagcgtggaaattgaatgggagctgcagaaggaaaacagcaagcgctggaaccccgagatccagtacacctccaactactacaaatctacaagtgtggactttgctgttaatacagaaggcgtgtactctgaaccccaccccattggcacccgttacctcacccgtcccctgtaa

SEQ ID NO: 1012 - DNA, 2208 bp, Artificial Sequence
  Description of Artificial Sequence: Synthetic polynucleotide
atggctgccgatggttatcttccagattggctcgaggacaacctctctgagggcattcgcgagtggtgggacttgaaacctggagccccgaagcccaaagccaaccagcaaaagcaggacgacggccggggtctggtgcttcctggctacaagtacctcggacccttcaacggactcgacaagggggagcccgtcaacgcggcggatgcagcggccctcgagcacgacaaggcctacgaccggcagctcgacagcggagacaacccgtacctgcggtataaccacgccgacgcggagtttcaggagcgccttaaagaagatacgtcttttgggggcaacctcgggcgagcagtcttccaggccaagaagagggttctcgaaccttttggtctggttgaggaaggtgctaagacggctcctggaaagaaacgtccggtagagcagtcgccacaagagccagactcctcctcgggcattggcaagacaggccagcagcccgctaaaaagagactcaattttggtcagactggcgactcagagtcagtccccgacccacaacctctcggagaacctccagcaacccccgctgctgtgggacctactacaatggcttcaggcggtggcgcaccaatggcagacaataacgaaggcgccgacggagtgggtaatgcctcaggaaattggcattgcgattccacatggctgggcgacagagtcatcaccaccagcacccgcacctgggccttgcccacctacaataaccacctctacaagcaaatctccagtgcttcaacgggggccagcaacgacaaccactacttcggctacagcaccccctgggggtattttgactttaacagattccactgccacttttcaccacgtgactggcaaagactcatcaacaacaactggggattccggcccaagagactcaacttcaagctcttcaacatccaggtcaaggaggtcacgcagaatgaaggcaccaagaccatcgccaataaccttaccagcacgattcaggtctttacggactcggaataccagctcccgtacgtcctcggctctgcgcaccagggctgcctccctccgttcccggcggacgtgttcatgattccgcagtacggctacctaacactcaacaacggtagtcaggccgtgggacgctcctccttctactgcctggaatactttccttcgcagatgctgagaaccggcaacaacttccagtttacttacaccttcgaggacgtgcctttccacagcagctacgcccacagccagagcttggaccggctgatgaatcctctgattgaccagtacctgtactacttgtctcggactcaaacaacaggaggcacggcaaatacgcagactctgggcttcagccaaggtgggcctaatacaatggccaatcaggcaaagaactggctgccaggaccctgttaccgccaacaacgcgtctcaacgacaaccgggcaaaacaacaatagcaactttgcctggactgctgggaccaaataccatctgaatggaagaaattcactggctaatcctggcatcgctatggcaacacacaaagacgacaggagcgtttttttccagtaccgggatcctgattttggcaaacaaaatgctgccagagacaatgcggattacagcgatgtcatgctcaccagcgaggaagaaatcaaaaccactaaccctgtggctacagaggaatacggtatcgtggcagataacttgcagcagcaaaacacggctcctcaaattggaactgtcaacagccagggggccttacccggtatggtctggcagaaccgggacgtgtacctgcagggtcccatctgggccaagattcctcacacggacggcaacttccacccgtctccgctgatgggcggctttggcctgaaacatcctccgcctcagatcctgatcaagaacacgcctgtacctgcggatcctccgaccaccttcaaccagtcaaagctgaactctttcatcacgcaatacagcaccggacaggtcagcgtggaaattgaatgggagctgcagaaggaaaacagcaagcgctggaaccccgagatccagtacacctccaactactacaaatctacaagtgtggactttgctgttaatacagaaggcgtgtactctgaaccccaccccattggcacccgttacctcacccgtcccctgtaa

SEQ ID NO: 1013 - DNA, 2211 bp, Artificial Sequence
  Description of Artificial Sequence: Synthetic polynucleotide
atggctgccgatggttatcttccagattggctcgaggacaacctctctgagggcattcgcgagtggtgggcgctgaaacctggagccccgaagcccaaagccaaccagcaaaagcaggacgacggccggggtctggtgcttcctggctacaagtacctcggacccttcaacggactcgacaagggggagcccgtcaacgcggcggatgcagcagccctcgaacacgacaaagcttacgaccagcagctcaaggccggtgacaacccctacctcaagtataaccacgccgacgccgagtttcaggagcgtcttcaaggagatacgtcttttgggggcaacctcggacgagcagtcttccaggccaagaagcgggttctcgaacctcttggtctggttgaggaagcggctaagacggctcctggaaagaagaggcctgtagagcagtctcctcaggaaccggactcctccgcgggtattggcaaatcgggtgcacagcccgctaaaaagagactcaatttcggtcagactggcgacacagagtcagtcccagaccctcaacctctcggagaacctccagcagcgccctctggtgtgggacctaatacaatggctgcaggcggtggcgcaccaatggcagacaataacgaaggtgccgatggagtgggtagttcctcgggaaattggcattgcgattcccaatggctgggggacagagtcatcaccaccagcacccgaacctgggccctgcccacctacaacaaccacctctacaagcaaatctccagtgcttcaacgggggccagcaacgacaaccactacttcggctacagcaccccttgggggtattttgacttcaacagattccactgccacttttcaccacgtgactggcagcgactcatcaacaacaactggggattccggcctaagcgactcaacttcaagctcttcaacattcaggtcaaagaggttacggacaacaatggagtcaagaccatcgccaataaccttaccagcacggtccaggtcttcacggactcagactatcagctcccgtacgtgctcgggtcggctcacgagggctgcctccctccgttcccggcggacgtgttcatgattccgcagtacggctacctaacgctcaacaatggcagccaggcagtgggacggtcatccttttactgcctggaatactttccttcgcagatgctgagaaccggcaacaacttccagtttacttacaccttcgaggacgtgcctttccacagcagctacgctcacagccagagtctggaccgtctcatgaatcctctgattgaccagtacctgtactacttgtctcggactcaaacaacaggaggcacggcaaatacgcagactctgggcttcagccaaggtgggcctaatacaatggccaatcaggcaaagaactggctgccaggaccctgttaccgccaacaacgcgtctcaacgacaaccgggcaaaacaacaatagcaactttgcctggactgctgggaccaaataccatctgaatggaagaaattcattggctaatcctggcatcgctatggcaacacacaaagacgacaaggagcgtttttttcccagtaacgggatcctgatttttggcaaacaaaatgctgccagagacaatgcggattacagcgatgtcatgctcaccagcgaggaagaaatcaaaaccactaaccctgtggctacagaggaatacggtatcgtagcagataacttgcagcagcaaaacacggctcctcaaattggaactgtcaacagccagggggccttacccggtatggtctggcagaaccgggacgtgtacctgcagggtcccatctgggccaagattcctcacacggacggcaacttccacccgtctccgctgatgggcggctttggcctgaaacatcctccgcctcagatcctgatcaagaacacgcctgtacctgcggatcctccgaccaccttcaaccagtcaaagctgaactctttcatcacgcaatacagcaccggacaggtcagcgtggaaattgaatgggagctgcagaaggaaaacagcaagcgctggaaccccgagatccagtacacctccaactactacaaatctacaagtgtggactttgctgttaatacagaaggcgtgtactctgaaccccaccccattggcacccgttacctcacccgtcccctgtaa

SEQ ID NO: 1014 - DNA, 2211 bp, Artificial Sequence
  Description of Artificial Sequence: Synthetic polynucleotide
atggctgccgatggttatcttccagattggctcgaggacactctctctgaaggaataagacagtggtggaagctcaaacctggcccaccaccaccaaagcccgcagagcggcataaggacgacagcaggggtcttgtgcttcctgggtacaagtacctcggacccttcaacggactcgacaagggagagccggtcaacgaggcagacgccgcggccctcgagcacgacaaagcctacgaccggcagctcgacagcggagacaacccgtacctcaagtacaaccacgccgacgcggagtttcaggagcgccttaaagaagatacgtcttttgggggcaacctcgggcgagcagtcttccaggccaagaagagggttctcgaaccttttggtctggttgaggaagcggctaagacggctcctggaaagaaacgtccggtagagcagtcgccacaagagccagactcctcctcgggcattggcaagacaggccagcagcccgctaaaaagagactcaattttggtcagactggcgactcagagtcagtccccgacccacaacctctcggagaacctccagcaacccccgctgctgtgggacctactacaatggcttcaggcggtggcgcaccaatggcagacaataacgaaggcgccgacggagtgggtaatgcctcaggaaattggcattgcgattccacatggctgggcgacagagtcatcaccaccagcacccgaacatgggccttgcccacctataacaaccacctctacaagcaaatctccagtgcttcaacgggggccagcaacgacaaccactacttcggctacagcaccccctgggggtattttgacttcaacagattccactgccacttctcaccacgtgactggcagcgactcatcaacaacaactggggattccggcctaagcgactcaacttcaagctcttcaacattcaggtcaaagaggttacggacaacaatggagtcaagaccatcgccaataaccttaccagcacggtccaggtcttcacggactcagactatcagctcccgtacgtgctcgggtcggctcacgagggctgcctcccgccgttcccagcggacgttttcatgattcctcagtacggctacctaacactcaacaacggtagtcaggccgtgggacgctcctccttctactgcctggaatactttccttcgcagatgctgagaacgggcaacaactttaccttcagctacacctttgaggacgttcctttccacagcagctacgctcacagccagagtctggaccgtctcatgaatcctctgattgaccagtacctgtactacttgtctcggactcaaacaacaggaggcacggcaaatacgcagactctgggcttcagccaaggtgggcctaatacaatggccaatcaggcaaagaactggctgccaggaccctgttaccgccaacaacgcgtctcaacgacaaccgggcaaaacaacaatagcaactttgcctggactgctgggacaaaataccatctgaatggaagaaattcattggctaatcctggcatcgctatggcaacacacaaagacgacaaggagcgtttttttcccagtaacgggattctgatttttggcaaacaaaatgctgccagagacaatgcggattacagcgatgtcatgctcaccagcgaggaagaaatcaaaaccactaaccctgtggctacagaggaatacggtatcgtggcagataacttgcagcagcaaaacacggctcctcaaattggaactgtcaacagccagggggccttacccggtatggtctggcagaaccgggacgtgtacctgcagggtcccatctgggccaagattcctcacacggacggcaacttccacccgtctccgctgatgggcggctttggacttaagcacccgcctcctcagatcctcatcaaaaacacgcctgttcctgcggatcctccgaccaccttcaaccagtcaaagctgaactctttcatcacgcaatacagcaccggacaggtcagcgtggaaattgaatgggagctgcagaaggaaaacagcaagcgctggaaccccgagatccagtacacctccaactactacaaatctacaagtgtggactttgctgttaatacagaaggcgtgtactctgaaccccaccccattggcacccgttacctcacccgtcccctgtaa

SEQ ID NO: 1015 - DNA, 2211 bp, Artificial Sequence
  Description of Artificial Sequence: Synthetic polynucleotide
atggctgccgatggttatcttccagattggctcgaggacaacctctctgagggcattcgcgagtggtgggcgctgaaacctggagccccgaagcccaaagccaaccagcaaaagcaggacgacggccggggtctggtgcttcctggctacaagtacctcggacccttcaacggactcgacaaaggagagccggtcaacgcggcggacgcagcggccctcgagcacgacaaggcctacgaccagcagctcaaagcgggtgacaatccgtacctgcggtataaccacgccgacgccgagtttcaggagcgtctgcaagaagatacgtcttttgggggcaacctcgggcgagcagtcttccaggccaagaagcgggttctcgaacctctcggtctggttgaggaaggcgctaagacggctcctggaaagaaacgtccggtagagcagtcgccacaagagccagactcctcctcgggcatcggcaagacaggccagcagcccgctaaaaagagactcaattttggtcagactggcgactcagagtcagtccccgacccacaacctctcggagaacctccagcaacccccgctgctgtgggacctactacaatggcttcaggcggtggcgcaccaatggcagacaataacgaaggcgccgacggagtgggtagttcctcgggaaattggcattgcgattccacatggctgggcgacagagtcatcaccaccagcacccgcacctgggccttgcccacctacaataaccacctctacaagcaaatctccagtgcttcaacgggggccagcaacgacaaccactacttcggctacagcaccccctgggggtattttgacttcaacagattccactgccacttctcaccacgtgactggcagcgactcatcaacaacaactggggattccggcctaagcgactcaacttcaagctcttcaacattcaggtcaaagaggttacggacaacaatggagtcaagaccatcgccaataaccttaccagcacggtccaggtcttcacggactcggagtaccagttgccgtacgtcctcggctctgcgcaccagggctgcctccctccgttcccggcggacgtgttcatgattccgcagtacggctacctaacgctcaacaatggcagccaggcagtgggacggtcatccttttactgcctggaatatttcccatcgcagatgctgagaacgggcaacaactttaccttcagctacacctttgaggacgttcctttccacagcagctacgctcacagccagagtctggaccgtctcatgaatcctctgattgaccagtacctgtactacttgtctcggactcaaacaacaggaggcacggcaaatacgcagactctgggcttcagccaaggtgggcctaatacaatggccaatcaggcaaagaactggctgccaggaccctgttaccgccaacaacgcgtctcaacgacaaccgggcaaaacaacaatagcaactttgcctggactgctgggaccaaataccatctgaatggaagaaattcattggctaatcctggcatcgctatggcaacacacaaagacgacaaggagcgtttttttcccagtaacgggatcctgatttttggcaaacaaaatgctgccagagacaatgcggattacagcgatgtcatgctcaccagcgaggaagaaatcaaaaccactaaccctgtggctacagaggaatacggtatcgtggcagataacttgcagcagcaaaacacggctcctcaaattggaactgtcaacagccagggggccttacccggtatggtctggcagaaccgggatgtgtacctgcagggtcccatctgggccaagattcctcacacggacggcaacttccacccgtctccgctgatgggcggctttggcctgaaacatcctccgcctcagatcctgatcaagaacacgcctgtacctgcggatcctccgaccaccttcaaccagtcaaagctgaactctttcatcacgcaatacagcaccggacaggtcagcgtggaaattgaatgggagctgcagaaggaaaacagcaagcgctggaaccccgagatccagtacacctccaactactacaaatctacaagtgtggactttgctgttaatacagaaggcgtgtactctgaaccccaccccattggcacccgttacctcacccgtcccctgtaa

SEQ ID NO: 1016 - DNA, 2214 bp, Artificial Sequence
  Description of Artificial Sequence: Synthetic polynucleotide
atggctgccgatggttatcttccagattggctcgaggacaaccttagtgaaggaattcgcgagtggtgggcgctgaaacctggagccccgaagcccaaagccaaccagcaaaagcaggacgacggccggggtctggtgcttcctggctacaagtacctcggacccttcaacggactcgacaagggggagcccgtcaacgcggcggacgcagcggccctcgagcacgacaaggcctacgaccagcagctcaaagcgggtgacaatccgtacctgcggtataaccacgccgacgccgagtttcaggagcgtctgcaagaagatacgtcttttgggggcaacctcgggcgagcagtcttccaggccaagaagcgggttctcgaacctctcggtctggttgaggaaggcgctaagacggctcctggaaagaaacgtccggtagagcagtcgccacaagagccagactcctcctcgggcatcggcaagacaggccagcagcccgctaaaaagagactcaatttcggtcagactggcgacacagagtcagtcccagaccctcaaccaatcggagaacctcccgcagccccctcaggtgtgggatctcttacaatggcttcaggtggtggcgcaccagtggcagacaataacgaaggtgccgatggagtgggtagttcctcgggaaattggcattgcgattcccaatggctgggggacagagtcatcaccaccagcaccagaacctgggccttgcccacctacaataaccacctctacaagcaaatctccaacagcacatctggaggatcttcaaatgacaacgcctacttcggctacagcaccccctgggggtattttgactttaacagattccactgccacttttcaccacgtgactggcagcgactcatcaacaacaactggggattccgacccaagagactcaacttcaagctcttcaacatccaggtcaaggaggtcacgcagaacgaaggcaccaagaccatcgccaataacctcaccagcaccatccaggtgtttacggactcggagtaccagctgccgtacgttctcggctccgcccaccagggctgcctgcctccgttcccggcggacgtgttcatgattccccagtacggctacctaacgctcaacaacggtagtcaggccgtgggacgctcctccttctactgcctggaatactttccttcgcagatgctgagaaccggcaacaacttccagtttacttacaccttcgaggacgtgcctttccacagcagctacgcgcacagccagagcttggaccggctgatgaatcctctgattgaccagtacctgtactacttgtctcggactcaaacaacaggaggcacggcaaatacgcagactctgggcttcagccaaggtgggcctaatacaatggccaatcaggcaaagaactggctgccaggaccctgttaccgccaacaacgcgtctcaacgacaaccgggcaaaacaacaatagcaactttgcctggactgctgggaccaaataccatctgaatggaagaaattcattggctaatcctggcatcgctatggcaacacacaaagacgacaaggagcgtttttttcccagtaacgggatcctgatttttggcaaacaaaatgctgccagagacaatgcggattacagcgatgtcatgctcaccagcgaggaagaaatcaaaaccactaaccctgtggctacagaggaatacggtatcgtggcagataacttgcagcagcaaaacacggctcctcaaattggaactgtcaacagccagggggccttacccggtatggtctggcagaaccgggacgtgtacctgcagggtcccatctgggccaagattcctcacacggacggcaacttccacccgtctccgctgatgggcggctttggcctgaaacatcctccgcctcagatcctgatcaagaacacgcctgtacctgcggatcctccgaccaccttcaaccagtcaaagctgaactctttcatcacgcaatacagcaccggacaggtcagcgtggaaattgaatgggagctgcagaaggaaaacagcaagcgctggaaccccgagatccagtacacctccaactactacaaatctacaagtgtggactttgctgttaatacagaaggcgtgtactctgaaccccaccccattggcactcgttacctcacccgtcccctgtaa

SEQ ID NO: 1017 - DNA, 2211 bp, Artificial Sequence
  Description of Artificial Sequence: Synthetic polynucleotide
atggctgccgatggttatcttccagattggctcgaggacaacctctctgagggcattcgcgagtggtgggcgctgaaacctggagccccgaagcccaaagccaaccagcaaaagcaggacgacggccggggtctggtgcttcctggctacaagtacctcggacccttcaacggactcgacaagggggagcccgtcaacgcggcggatgcagcagccctcgaacacgacaaagcttacgaccagcagctcaaggccggtgacaacccctacctcaagtataaccacgccgacgccgagtttcaggagcgtcttcaaggagatacgtcttttgggggcaacctcggacgagcagtcttccaggccaagaagcgggttctcgaacctcttggtctggttgaggaagcggctaagacggctcctggaaagaagaggcctgtagagcagtctcctcaggaaccggactcctccgcgggtattggcaaatcgggtgcacagcccgctaaaaagagactcaatttcggtcagactggcgacacagagtcagtcccagaccctcaacctctcggagaacctccagcagcgccctctggtgtgggacctaatacaatggctgcaggcggtggcgcaccaatggcagacaataacgaaggtgccgatggagtgggtagttcctcgggaaattggcattgcgattcccaatggctgggggacagagtcatcaccaccagcacccgaacctgggccctgcccacctacaacaaccacctctacaagcaaatctccagtgcttcaacgggggccagcaacgacaaccactacttcggctacagcaccccttgggggtattttgacttcaacagattccactgccacttctcaccacgtgactggcagcgactcatcaacaacaactggggattccggcctaagcgactcaacttcaagctcttcaacattcaggtcaaagaggttacggacaacaatggagtcaagaccatcgccaataaccttaccagcacggtccaggtcttcacggactcggagtaccagttgccgtacgtcctcggctctgcgcaccagggctgcctccctccgttcccggcggacgtgttcatgattccgcagtacggctacctaacgctcaacaatggcagccaggcagtgggacggtcatccttttactgcctggaatatttcccatcgcagatgctgagaacgggcaacaactttaccttcagctacacctttgaggacgttcctttccacagcagctacgctcacagccagagtctggaccgtctcatgaatcctctgattgaccagtacctgtactacttgtctcggactcaaacaacaggaggcacggcaaatacgcagactctgggcttcagccaaggtgggcctaatacaatggccaatcaggcaaagaactggctgccaggaccctgttaccgccaacaacgcgtctcaacgacaaccgggcaaaacaacaatagcaactttgcctggactgctgggaccaaataccatctgaatggaagaaattcattggctaatcctggcatcgctatggcaacacacaaagacgacaaggagcgtttttttcccagtaacgggatcctgatttttgacaaacaaaatgctgccagagacaatgcggattacagcgatgtcatgctcaccagcgaggaagaaatcaaaaccactaaccctgtggctacagaggaatacggtatcgtggcagataacttgcagcagcaaaacacggctcctcaaattggaactgtcaacagccagggggccttacccggtatggtctggcagaaccgggatgtgtacctgcagggtcccatctgggccaagattcctcacacggacggcaacttccacccgtctccgctgatgggcggctttggcctgaaacatcctccgcctcagatcctgatcaagaacacgcctgtacctgcggatcctccgaccaccttcaaccagtcaaagctgaactctttcatcacgcaatacagcaccggacaggtcagcgtggaaattgaatgggagctgcagaaggaaaacagcaagcgctggaaccccgagatccagtacacctccaactactacaaatctacaagtgtggactttgctgttaatacagaaggcgtgtactctgaaccccaccccattggcacccgttacctcacccgtcccctgtaa

SEQ ID NO: 1018 - DNA, 2211 bp, Artificial Sequence
  Description of Artificial Sequence: Synthetic polynucleotide
atggctgccgatggttatcttccagattggctcgaggacactctctctgaaggaataagacagtggtggaagctcaaacctggcccaccaccaccaaagcccgcagagcggcataaggacgacagcaggggtcttgtgcttcctgggtacaagtacctcggacccttcaacggactcgacaagggagagccggtcaacgaggcagacgccgcggccctcgagcacgacaaagcctacgaccggcagctcgacagcggagacaacccgtacctcaagtacaaccacgccgacgcggagtttcaggagcgccttaaagaagatacgtcttttgggggcaacctcggacgagcagtcttccaggcgaaaaagagggttcttgaacctctgggcctggttgaggaacctgttaagacggctccgggaaaaaagaggccggtagagcactctcctgtggagccagactcctcctcgggaaccggaaaggcgggccagcagcctgcaagaaaaagattgaattttggtcagactggcgactcagagtcagtccccgacccacaacctctcggagaacctccagcaacccccgctgctgtgggacctaatacgatggctacaggcagtggcgcaccaatggcagacaataacgagggcgccgacggagtgggtaattcctcgggaaattggcattgcgattccacatggatgggcgacagagtcatcaccaccagcaccagaacctgggccctgcccacttacaacaaccatctctacaagcaaatctccagtgcttcaacgggggccagcaacgacaaccactacttcggctacagcaccccctgggggtattttgacttcaacagattccactgccacttctcaccacgtgactggcagcgactcatcaacaacaactggggattccggcctaagcgactcaacttcaagctcttcaacattcaggtcaaagaggttacggacaacaatggagtcaagaccatcgccaataaccttaccagcaccatccaggtctttacggactcggaataccagctgccgtacgttctcggctctgcccaccagggctgcctgcctccgttcccggcggacgtgttcatgattccccagtacggctacctaacactcaacaacggtagtcaggccgtgggacgctcctccttctactgcctggaatatttcccatcgcagatgctgagaacgggcaacaactttaccttcagctacacctttgaggacgttcctttccacagcagctacgctcacagccagagtctggaccgtctcatgaatcctctgattgaccagtacctgtactacttgtctcggactcaaacaacaggaggcaaggcaaatacgcagactctgggcttcagccaaggtgggcctaatacaatggccaatcaggcaaagaactggctgccaggaccctgttaccgccaacaacgcgtctcaacgacaaccgggcaaaacaacaatagcaactttgcctggactgctgggaccaaataccatctgaatggaagaaattcattggctaatcctggcatcgctatggcaacacacaaagacgacaaggagcgtttttttcccagtaacgggatcctgatttttggcaaacaaaatgctgccagagacaatgcggattacagcgatgtcatgctcaccagcgaggaagaaatcaaaaccactaaccctgtggctacagaggaatacggtatcgtggcagataacttgcagcagcaaaacacggctcctcaaattggaactgtcaacagccagggggccttacccggtatggtctggcagaaccgggacgtgtacctgcagggtcccatctgggccaagattcctcacacggacggcaacttccacccgtctccgctgatgggcggctttggcctgaaacatcctccgcctcagatcctgatcaagaacacgcctgtacctgcggatcctccgaccaccttcaaccagtcaaagctgaactctttcatcacgcaatacagcaccggacaggtcagcgtggaaattgaatgggagctgcagaaggaaaacagcaagcgctggaaccccgagatccagtacacctccaactactacaaatctacaagtgtggactttgctgttaatacagaaggcgtgtactctgaaccccaccccattggcacccgttacctcacccgtcccctgtaa

SEQ ID NO: 1019 - DNA, 2211 bp, Artificial Sequence
  Description of Artificial Sequence: Synthetic polynucleotide
atggctgccgatggttatcttccagattggctcgaggacaacctctctgagggcattcgcgagtggtgggcgctgaaacctggagccccgaagcccaaagccaaccagcaaaagcaggacgacggccggggtctggtgcttcctggctacaagtacctcggacccttcaacggactcgacaagggggagcccgtcaacgcggcggacgcagcggccctcgagcacgacaaggcctacgaccagcagctcaaagcgggtgacaatccgtacctgcggtataaccacgccgacgccgagtttcaggagcgtctgcaagaagatacgtcttttgggggcaacctcgggcgagcagtcttccaggccaagaagcgggttctcgaaccttttggtctggttgaggaaggtgctaagacggctcctggaaagaaacgtccggtagagcagtcgccacaagagccagactcctcctcgggcatcggcaagacaggccagcagcccgctaaaaagagactcaattttggtcagactggcgactcagagtcagtccccgacccacaacctctcggagaacctccagcaacccccgctgctgtgggacctactacaatggcttcaggcggtggcgcaccaatggcggacaataacgaaggcgccgacggagtgggtaatgcctcaggaaattggcattgcgattccacatggctgggcgacagagtcatcaccaccagcacccgcacctgggccttgcccacctacaataaccacctctacaagcaaatctccagtgcttcaacgggggccagcaacgacaaccactacttcggctacagcaccccctgggggtattttgacttcaacagattccactgccacttttcaccacgtgactggcaaagactcatcaacaacaactggggattccggcctaagcgactcaacttcaagctcttcaacattcaggtcaaagaggttacggacaacaatggagtcaagaccatcgccaataaccttaccagcacggtccaggtcttcacggactcggagtaccagttgccgtacgtcctcggctctgcgcaccagggctgcctccctccgttcccggcggacgtgttcatgattccgcagtacggctacctaacgctcaacaatggcagccaggcagtgggacggtcatccttttactgcctggaatatttcccatcgcagatgctgagaacgggcaacaactttaccttcagctacacctttgaggacgttcctttccacagcagctacgctcacagccagagtctggaccgtctcatgaatcctctgattgaccagtacctgtactacttgtctcggactcaaacaacaggaggcacgggaaatacgcagactctgggcttcagccaaggtgggcctaatacaatggccaatcaggcaaagaactggctgccaggaccctgttaccgccaacaacgcgtctcaacgacaaccgggcaaaacaacaatagcaactttgcctggactgctgggaccaaataccatctgaatggaagaaattcattggctaatcctggcatcgctatggcaacacacaaagacgacaaggagcgtttttttcccagtaacgggatcctgatttttggcaaacaaaatgctgccagagacaatgcggattacagcgatgtcatgctcaccagcgaggaagaaatcaaaaccactaaccctgtggctacagaggaatacggtatcgtggcagataacttgcagcagcaaaacacggctcctcaaattggaactgtcaacagccagggggccttacccggtatggtctggcagaaccgggacgtgtacctgcagggtcccatctgggccaagattcctcacacggacggcaacttccacccgtctccgctgatgggcggctttggcctgaaacatcctccgcctcagatcctgatcaagaacacgcctgtacctgcggatcctccgaccaccttcaaccagtcaaagctgaactctttcatcacgcaatacagcaccggacaggtcagcgtggaaattgaatgggagctgcagaaggaaaacagcaagcgctggaaccccgagatccagtacacctccaactactacaaatctacaagtgtggactttgctgttaatacagaaggcgtgtactctgaaccccaccccattggcacccgttacctcacccgtcccctgtaa

SEQ ID NO: 1020 - DNA, 2211 bp, Artificial Sequence
  Description of Artificial Sequence: Synthetic polynucleotide
atggctgccgatggttatcttccagattggctcgaggacaacctctctgagggcattcgcgagtggtgggacttgaaacctggagccccgaaacccaaagccaaccagcaaaagcaggacgacggccggggtctggtgcttcctggctacaagtacctcggacccttcaacggactcgacaagggggagcccgtcaacgcggcggacgcagcggccctcgagcacgacaaggcctacgaccagcagctcaaagcgggtgacaatccgtacctgcggtataaccacgccgacgccgagtttcaggagcgtctgcaagaagatacgtcttttgggggcaacctcgggcgagcagtcttccaggccaagaagcgggttctcgaacctctcggtctggttgaggaaggcgctaagacggctcctggaaagaagaggcctgtagagcagtcgccacaagagccagactcctcctcgggcatcggcaagacaggccagcagcccgctaaaaagagactcaattttggtcagactggcgactcagagtcagtccccgatccacaacctctcggagaacctccagcaacccccgctgctgtgggacctactacaatggcttcaggcggtggcgcaccaatggcagacaataacgaaggcgccgacggagtgggtagttcctcgggaaattggcattgcgattccacatggctgggcgacagagtcatcaccaccagcacccgaacatgggccttgcccacctataacaaccacctctacaagcaaatctccagtgcttcaacgggggccagcaacgacaaccactacttcggctacagcaccccctgggggtattttgacttcaacagattccactgccacttctcaccacgtgactggcagcgactcatcaacaacaactggggattccggcctaagcgactcaacttcaagctcttcaacatccaggtcaaggaggtcacgcagaatgaaggcaccaagaccatcgccaataacctcaccagcaccatccaggtgtttacggactcggagtaccagcttccgtacgtcctcggctctgcgcaccagggctgcctccctccgttcccggcggacgtgttcatgattccgcagtacggctacctaacgctcaacaatggcagccaggcagtgggacggtcatccttttactgcctggaatatttcccatcgcagatgctgagaacgggcaacaactttaccttcagctacacctttgaggacgttcctttccacagcagctacgcgcacagccagagcttggaccggctgatgaatcctctgattgaccagtacctgtactacttgtctcggactcaaacaacaggaggcacggcaaatacgcagactctgggcttcagccaaggtgggcctaatacaatggccaatcaggcaaagaactggctgccaggaccctgttaccgccaacaacgcgtctcaacgacaaccgggcaaaacaacaatagcaactttgcctggactgctgggaccaaataccatctgaatggaagaaattcattggctaatcctggcatcgctatggcaacacacaaagacgacaaggagcgtttttttcccagtaacgggatcctgatttttggcaaacaaaatgctgccagagacaatgcggattacagcgatgtcatgctcaccagcgaggaagaaatcaaaaccactaaccctgtggctacagaggaatacggtatcgtggcagataacttgcagcagcaaaacacggctcctcaaattggaactgtcaacagccagggggccttacccggtatggtctggcagaaccgggacgtgtacctgcagggtcccatctgggccaagattcctcacacggacggcaacttccacccgtctccgctgatgggcggctttggcctgaaacatcctccgcctcagatcctgatcaagaacacgcctgtacctgcggatcctccgaccaccttcaaccagtcaaagctgaactctttcatcacgcaatacagcaccggacaggtcagcgtggaaattgaatgggagctgcagaaggaaaacagcaagcgctggaaccccgagatccagtacacctccaactactacaaatctacaagtgtggactttgctgttaatacagaaggcgtgtactctgaaccccaccccattggcacccgttacctcacccgtcccctgtaa

SEQ ID NO: 1021 - DNA, 2211 bp, Artificial Sequence
  Description of Artificial Sequence: Synthetic polynucleotide
atggctgccgatggttatcttccagattggctcgaggacaacctctctgagggcattcgcgagtggtgggcgctgaaacctggagccccgaagcccaaagccaaccagcaaaagcaggacgacggccggggtctggtgcttcctggctacaagtacctcggacccttcaacggactcgacaagggggagcccgtcaacgcggcggatgcagcggccctcgagcacgacaaggcctacgaccagcagctcaaagcgggtgacaatccgtacctgcggtataaccacgccgacgccgagtttcaggagcgtctgcaagaagatacgtcttttgggggcaacctcgggcgagcagtcttccaggccaagaagcgggttctcgaacctctcggtctggttgaggaaggcgctaagacggctcctggaaagaaacgtccggtagagcagtcgccacaagagccagactcctcctcgggcatcggcaagacaggccagcagcccgctaaaaagagactcaattttggtcagactggcgactcagagtcagtccccgacccacaacctctcggagaacctccagcaacccccgctgctgtgggacctactacaatggctgcaggcggtggcgcaccaatggcagacaataacgaaggcgccgacggagtgggtagttcctcgggaaattggcattgcgattccacatggatgggcgacagagtcatcaccaccagcacccgaacctgggccttgcccacctataacaaccatctctacaagcaaatctccagtgcttcaacgggggccagcaacgacaaccactacttcggctacagcaccccctgggggtattttgacttcaacagattccactgccacttctcaccacgtgactggcagcgactcatcaacaacaactggggattccggcccaagagactcagcttcaagctcttcaacatccaggtcaaggaggtcacgcagaatgaaggcaccaagaccatcgccaataacctcaccagcaccatccaggtgtttacggactcggagtaccagctgccgtacgtcctcggctctgcgcaccagggctgcctccctccgttcccggcggacgtgttcatgattccgcagtacggctacctaacgctcaacaatggcagccaggcagtgggacggtcatccttttactgcctggaatatttcccatcgcagatgctgagaacgggcaacaactttaccttcagctacacctttgaggacgttcctttccacagcagctacgctcacagccagagcttggaccggctgatgaatcctctgattgaccagtacctgtactacttgtctcggactcaaacaacaggaggcacggcaaatacgcagactctgggtttcagccaaggtgggcctaatacaatggccaatcaggcaaagaactggctgcaaggaccctgttaccgccaacaacgcgtctcaacgacaaccgggcaaaacaacaatagcaactttgcctggactgctgggaccaaataccatctgaatggaagaaattcattggctaatcctggcatcgctatggcaacacacaaagacgacaaggagcgtttttttcccagtaacgggatcctgatttttggcaaacaaaatgctgccagagacaatgcggattacagcgatgtcatgctcaccagcgaggaagaaatcaaaaccactaaccctgtggctacagaggaatacggtatcgtggcagataacttgcagcagcaaaacacggctcctcaaattggaactgtcaacagccagggggccttacccggtatggtctggcagaacctggacgtgtacctgcagggtcccatctgggccaagattcctcacacggacggcaacttccacccgtctccgctgatgggcggctttggcctgaaacatcctccgcctcagatcctgatcaagaacacgcctgtacctgcggatcctccgaccaccttcaaccagtcaaagctgaactctttcatcacgcaatacagcaccggacaggtcagcgtggaaattgaatgggagctgcagaaggaaaacagcaagcgctggaaccccgagatccagtacacctccaactactacaaatctacaagtgtggactttgctgttaatacagaaggcgtgtactctgaaccccaccccattggcacccgttacctcacccgtcccctgtaa

SEQ ID NO: 1022 - DNA, 2214 bp, Artificial Sequence
  Description of Artificial Sequence: Synthetic polynucleotide
atggctgccgatggttatcttccagattggctcgaggacaacctctctgagggcattcgcgagtggtgggcgctgaaacctggagccccgaagcccaaagccaaccagcaaaagcaggacgacggccggggtctggtgcttcctggctacaagtacctcggacccttcaacggactcgacaagggagagcccgtcaacgcggcggacgcagcggccctcgagcacgacaaggcctacgaccagcagctcaaagcgggtgacaatccgtacctgcggtataaccacgccgacgccgagtttcaggagcgtctgcaagaagatacgtcttttgggggcaacctcgggcgagcagtcttccaggccaagaagcgggttctcgaacctctcggtctggttgaggaaggcgctaagacggctcctggaaagaagagaccggtagagccatcaccccagcgttctccagactcctcctcgggcatcggcaagacaggccagcagcccgctaaaaagagactcaattttggtcagactggcgactcagagtcagtccccgacccacaacctctcggagaacctccagcaacccccgctgctgtgggacctactacaatggcttcaggtggtggcgcaccaatggcagacaataacgaaggcgccgacggagtgggtaatgcctcaggaaattggcattgcgattcccaatggctgggcgacagagtcatcaccaccagcacccgaacatgggccttgcccacctataacaaccacctctacaagcaaatctccagtgcttcaacgggggccagcaacgacaaccactacttcggctacagcaccccctgggggtattttgacttcaacagattccactgccacttttcaccacgtgactggcagcgactcatcaacaacaactggggattccggcctaagcgactcaacttcaagctcttcaacattcaggtcaaagaggttacggacaacaatggagtcaagaccatcgccaataaccttaccagcacggtccaggtcttcacggactcagactatcagctcccgtacgtgctcgggtcggctcacgagggctgcctcccgccgttcccagcggacgttttcatgattccccagtacggctacctaacactcaacaacggtagtcaggccgtgggacgctcctccttctactgcctggaatactttccttcgcagatgctgagaaccggcaacaacttccagtttacttacaccttcgaggacgtgcctttccacagcagctacgctcacagccagagcttggaccggctgatgaatcctctgattgaccagtacctgtactacttgtctcggactcaaacaacaggaggcacggcaaatacgcagactttgggcttcagccaaggtgggcctaatacaatggccaatcaggcaaagaactgggtgccaggaccctgttaccgccaacaacgggtttcaacggcaaccgggcaaaacaacaatagcaactttgcctggactgctgggaccaaataccatctgaaaggaagaaattcattggctaatcctggcatcgctatggcaacacacaaagacgacaaggagcgtttttttcccagtaacgggatcctgatttttggcaaacaaaatgctgccagagacaatgcggattacagcgatgtcatgctcaccagcgaggaagaaatcaaaaccactaaccctgtggctacagaggaatacggtatcgtggcagataacttgcagcagcaaaacacggctcctcaaattggaactgtcaacagccagggggccttacccggtatggtctggcagaaccgggacgtgtacctgcagggtcccatctgggccaagattcctcacacggacggcaacttccacccgtctccgctgatgggcggctttggcctgaaacatcctccgcctcagatcctgatcaagaacacgcctgtacctgcggatcctccgaccaccttcaaccagtcaaagctgaactctttcatcacgcaatacagcaccggacaggtcagcgtggaaattgaatgggagctgcagaaggaaaacagcaaacgctggaacccagagattcaatacacttccaactactacaaatctacaagtgtggactttgctgttaatacagaaggcgtgtactctgaaccccaccccattggcacccgttacctcacccgtcccctgtaa

SEQ ID NO: 1023 - DNA, 2214 bp, Artificial Sequence
  Description of Artificial Sequence: Synthetic polynucleotide
  modified_base (676)..(676): a, c, g, or t
  modified_base (697)..(697): a, c, g, or t
  modified_base (715)..(715): a, c, g, or t
  modified_base (748)..(748): a, c, g, or t
  modified_base (750)..(750): a, c, g, or t
  modified_base (757)..(757): a, c, g, or t
  modified_base (763)..(763): a, c, g, or t
atggctgccgatggttatcttccagattggctcgaggacactctctctgaaggaataagacagtggtggaagctcaaacctggcccaccaccaccaaagcccgcagagcggcataaggacgacagcaggggtcttgtgcttcctgggtacaagtacctcggacccttcaacggactcgacaagggagagccggtcaacgaggcagacgccgcggccctcgagcacgacaaagcctacgaccggcagctcgacagcggagacaacccgtacctcaagtacaaccacgccgacgcggagtttcaggagcgccttaaagaagatacgtcttttgggggcaacctcggacgagcagtcttccaggcgaaaaagagggttcttgaacctctcggtctggttgaggaaggcgctaagacggctcctggaaagaaacgtccggtagagcagtcgccacaagagccagactcctcctcgggcatcggcaagacaggccagcagcccgctaaaaagagactcaattttggtcagactggcgactcagagtcagtccccgacccacaacctctcggagaacctccagcaacgccctctggtgtgggacctaatacaatggctgcaggcggtggcgctccaatggcagacaataacgaaggcgccgacggagtgggtagttcctcangaaattggcattgcgattccncatggctgggcgacagantcatcaccaccagcacccgaacctgggccctgncnacctacnacaacnacctctacaagcaaatctccaacagcacatctggaggagccaccaacgacaacacctacttcggctacagcaccccctgggggtattttgactttaacagattccactgccacttttcaccacgtgactggcagcgactcatcaacaacaactggggattccggcctaagcgactcaacttcaagctcttcaacatccaggtcaaggaggtcacgcagaatgaaggcaccaagaccatcgccaataacctcaccagcaccatccaggtgtttacggactcggagtaccagctgccgtacgttctcggctctgcccaccagggctgcctgcctccgttcccggcggacgtgttcatgattccccagtacggctacctaacactcaacaacggtagtcaggccgtgggacgctcctccttctactgcctggaatactttccttcgcagatgctgagaaccggcaacaacttccagtttacttacaccttcgaggacgtgcctttccacagcagctacgcccacagccagagcttggaccggctgatgaatcctctgattgaccagtacctgtactacttgtctcggactcaaacaacaggaggcacggcaaatacgcagactctgggcttcagccaaggtgggcctaatacaatggccaatcaggcaaagaactggctgccaggaccctgttaccgccaacaacgcgtctcaacgacaaccgggcaaaacaacaatagcaactttgcctggactgctgggaccaaataccatctgaatggaagaaattcattggctaatcctggcatcgctatggcaacacacaaagacgacaaggagcgtttttttcccagtaacgggatcctgatttttggcaaacaaaatgctgccagagacaatgcggattacagcgatgtcatgctcaccagcgaggaagaaatcaaaaccactaaccctgtggctacagaggaatacggtatcgtggcagataacttgcagcagcaaaacacggctcctcaaattggaactgtcaacagccagggggccttacccggtatggtttggcagaaccgggacgtgtacctgcagggtcctatctgggccaagattcctcacacggacggaaactttcatccctcgccgctgatgggaggctttggactgaaacacccgcctcctcagatcctgattaagaatacacctgttcccgcggatcctccaactaccttcagtcaagctaagctggcgtcgttcatcacgcaatacagcacaggacaagtgagtgtggaaattgaatgggagctgcagaaagaaaacagcaagcgctggaatcccgaagtgcagtacacatccaattatgcaaaatctgccaacgttgattttactgtggacaacaatggactttatactgagcctcgccccattggcacccgttaccttacccgtcccctgtaa

SEQ ID NO: 1024 - DNA, 2214 bp, Artificial Sequence
  Description of Artificial Sequence: Synthetic polynucleotide
atggctgccgatggttatcttccagattggctcgaggacaacctctctgagggcattcgcgagtggtgggacttgaaacctggagccccgaagcccaaagccaaccagcaaaagcaggacgacggccggggtctggtgcttcctggctacaagtacctcggacccttcaacggactcgacaagggggagcccgtcaacgcggcggacgcagcggccctcgagcacgacaaggcctacgaccagcagctcaaagcgggtgacaatccgtacctgcggtataaccacgccgacgccgagtttcaggagcgtctgcaagaagatacgtcttttgggggcaacctcgggcgagcagtcttccaggccaagaagcgggttctcgaacctctcggtctggttgaggaaggcgctaagacggctcctggaaagaagagaccggtagagccatcaccccagcgttctccagactcctctacgggcatcggcaagaaaggccagcagcccgcgaaaaagagactcaactttgggcagactggcgactcagagtcagtgcccgaccctcaaccaatcggagaaccccccgcaggcccctctggtgtgggatctcttacaatggcttcaggtggtggcgcaccagtggcagacaataacgaaggtgccgatggagtgggtagttcctcgggaaattggcattgcgattcccaatggctgggggacagagtcatcaccaccagcacccgaacatgggccttgcccacctataacaaccacctctacaagcaaatctccagtgcttcaacgggggccagcaacgacaaccactacttcggctacagcaccccctgggggtattttgactttaacagattccactgccacttctcaccacgtgactggcagcgactcatcaacaacaactggggattccggcccaagagactcaacttcaagctcttcaacatccaggtcaaggaggtcacggacaatgatggagtcaagaccatcgccaataaccttaccagcacgattcaggtctttacggactcggaataccagttgccgtacgtcctcggctctgcgcaccagggctgcctgcctccgttcccggcggacgtgttcatgattccgcagtacggctacctaacgctcaacaatggcagccaggcagtgggacggtcatccttttactgcctggaatatttcccatcgcagatgctgagaacgggcaacaactttaccttcagctacacttttgaggacgttcctttccacagcagctacgctcacagccagagtctggaccgtctcatgaatcctctgattgaccagtacctgtactacttgtctcggactcaaacaacaggaggcacggcaaatacgcagactctgggcttcagccaaggtgggcctaatacaatggccaatcacgcaaagaactggctgccaggaccctgttaccgccaacaacgcgtctcaacgacaaccggacaaaacaacaatagcaactttgcctggactgctgggaccaaataccatctgaatggaagaaattcattggctaatcctggcatcgctatggcaacacacaaagacgacaaggagcgtttttttcccagtaacgggatcctgatttttggcaaacaaaatgctgccagagacaatgcggattacagcgatgtcatgctcaccagcgaggaagaaatcaaaaccactaaccctgtggctacagaggaatacggtatcgtggcagataacttgcagcagcaaaacacggctcctcaaattggaactgtcaacagccagggggccttacccggtatggtctggcagaaccgggacgtgtacctgcagggtcccatctgggccaagattcctcacacggacggcaacttccacccgtctccgctgatgggcggctttggcctgaaacatcctccgcctcagatcctgatcaagaacacgcctgtacctgcggatcctccgaccaccttcaaccagtcaaagctgaactctttcatcacgcaatacagcaccggacaggtcagcgtggaaattgaatgggagctgcagaaggaaaacagcaagcgctggaaccccgagatccagtacacctccaactactacaaatctacaagtgtggactttgctgttaatacagaaggcgtgtactctgaaccccaccccattggcacccgttacctcacccgtcccctgtaa

SEQ ID NO: 1025 - DNA, 2211 bp, Artificial Sequence
  Description of Artificial Sequence: Synthetic polynucleotide
atggctgccgatggttatcttccagattggctcgaggacactctctctgaaggaataagacagtggtggaagctcaaacctggcccaccaccaccaaagcccgcagagcggcacaaggacgacagcaggggtcttgtgcttcctgggtacaagtacctcggacccttcaacggactcgacaagggagagccggtcaacgaggcagacgccgcggccctcgagcacgacaaagcctacgaccggcagctcgacagcggagacaacccgtacctcaagtacaaccacgccgacgcggagtttcaggagcgccttaaagaagatacgtcttttgggggcaacctcggacgagcagtcttccaggcgaaaaagagggttcttgaacctctgggcctggttgaggaacctgttaagacggctccgggaaaaaagaggccggtagagcactctcctgtggagccagactcctcctcgggaaccggaaaggcgggccagcagcctgctaaaaagagactcaattttggtcagactggcgactcagagtcagtccccgacccacaacctctcggagaacctccagcaacccccgctgctgtgggacctactacaatggcttcaggtggtggcgcaccaatggcagacaataacgaaggcgccgacggagtgggtaatgcctcaggaaattggcattgcgattccacatggctgggcgacagagtcatcaccaccagcacccgcacctgggccttgcccacctacaataaccacctctacaagcaaatctccagtgcttcaacgggggccagcaacgacaaccactacttcggctacagcaccccctgggggtattttgacttcaacagattccactgccacttctcaccacgtgactggcagcgactcatcaacaacaactggggattccggcccaagagactcaacttcaaactcttcaacatccaagtcaaggaggtcacgcagaatgaaggcaccaagaccatcgccaataacctcaccagcaccatccaggtgtttacggactcggagtaccagctgccgtacgttctcggctctgcccaccagggctgcctgcctccgttcccggcggacgtgttcatgattccccagtacggctacctaacactcaacaacggtagtcaggccgtgggacgctcctccttctactgcctggaatactttccttcgcagatgctgagaaccggcaacaacttccagtttacttacaccttcgaggacgtgcctttccacagcagctacgcgcacagccagagcttggaccggctgatgaatcctctgattgaccagtacctgtactacttgtctcggactcaaacaacaggaggcacggcaaatacgcagactctgggcttcagccaaggtgggcctaatacaatggccaatcaggcaaagaactggctgccaggaccctgttaccgccaacaacgcgtctcaacgacaaccgggcaaaacaacaatagcaactttgcctggactgctgggaccaaataccatctgaatggaagaaattcattggctaatcctggcatcgctatggcaacacacaaagacgacaaggagcgtttttttcccagtaacgggatcctgatttttggcaaacaaaatgctgccagagacaatgcggattacagcgatgtcatgctcaccagcgaggaagaaatcaaaaccactaaccctgtggctacagaggaatacggtatcgtggcagataacttgcagcagcaaaacacggctcctcaaattggaactgtcaacagccagggggccttacccggtatggtctggcagaaccgggacgtgtacctgcagggtcccatctgggccaagattcctcacacggacggcaacttccacccgtctccgctgatgggcggctttggcctgaaacatcctccgcctcagatcctgatcaagaacacgcctgtacctgcggatcctccgaccaccttcaaccagtcaaagctgaactctttcatcacgcaatacagcaccggacaggtcagcgtggaaattgaatgggagctgcagaaggaaaacagcaagcgctggaaccccgagatccagtacacctccaactactacaaatctacaagtgtggactttgctgttaatacagaaggcgtgtactctgaaccccaccccattggcacccgttacctcacccgtcccctgtaa

SEQ ID NO: 1026 - DNA, 2211 bp, Artificial Sequence
  Description of Artificial Sequence: Synthetic polynucleotide
atggctgccgatggttatcttccagattggctcgaggacaacctctctgagggcattcgcgagtggtgggcgctgaaacctggagccccgaagcccaaagccaaccagcaaaagcaggacgacggccggggtctggtgcttcctggctacaagtacctcggacccttcaacggactcgacaagggggagcccgtcaacgcggcggatgcagcggccctcgagcacgacaaggcctacgaccagcagctccaagcgggtgacaatccgtacctgcggtataaccacgccgacgccgagtttcaggagcgtcttcaaggagatacgtcttttgggggcaacctcggacgagcagtcttccaggccaagaagcgggttctcgaacctctcggtctggttgaggaaggcgctaagacggctcctggaaagaaacgtccggtagagcagtcgccacaagagccagactcctcctcgggcatcggcaagacaggccagcagcccgctaaaaagagactcaattttggtcagactggcgactcagagtcagtccccgacccacaacctctcggagaacctccagcaacccccgctgctgtgggacctactacaatggcttcaggcggtggcgcaccaatggcggacaataacgaaggcgccgatggagtgggtaatgcctcaggaaattggcattgcgattccacatggctgggcgacagagtcatcaccaccagcacccgcacctgggccttgcccacctacaataaccacctctacaagcaaatctccagtgcttcaacgggggccagcaacgacaaccactacttcggctacagcaccccctgggggtattttgacttcaacagattccactgccacttctcaccacgtgactggcagcgactcatcaacaacaactggggattccggcctaagcgactcaacttcaagctcttcaacattcaggtcaaagaggttacggacaacaatggagtcaagaccatcgccaataacctcaccagcaccatccaggtgtttacggactcggagtaccagctgccgtacgttctcggctctgcccaccagggctgcctgcctccgttcccggcggacgtgttcatgattccccagtacggctacctaacactcaacaacggtagtcaggccgtgggacgctcctccttctactgcctggaatactttccttcgcagatgctgagaaccggcaacaacttccagtttacttacaccttcgaggacgtgcctttccacagcagctacgcccacagccagagcttggaccggctgatgaatcctctgattgaccagtacctgtactacttgtctcggactcaaacaacaggaggcacggcaaatacgcagactctgggcttcagccaaggtgggcctaatacaatggccaatcaggcaaagaactggctgccaggaccctgttaccgccaacaacgcgtctcaacgacaaccgggcaaaacaacaatagcaactttgcctggactgctgggaccaaataccatctgaatggaagaaattcattggctaatcctggcatcgctatggcaacacacaaagacgacaaggagcgtttttttcccagtaacgggatcctgatttttggcaaacaaaatgctgccagagacaatgcggattacagcgatgtcatgctcaccagcgaggaagaaatcaaaaccactaaccctgtggctacagaggaatacggtatcgtggcagataacttgcagcagcaaaacacggctcctcaaattggaactgtcaacagccagggggccttacccggtatggtctggcagaaccgggacgtgtacctgcagggtcccatctgggccaagattcctcacacggacggcaacttccacccgtctccgctgatgggcggctttggcctgaaacatcctccgcctcagatcctgatcaagaacacgcctgtacctgcggatcctccgaccaccttcaaccagtcaaagctgaactctttcatcacgcaatacagcaccggacaggtcagcgtggaaattgaatgggagctgcagaaggaaaacagcaagcgctggaaccccgagatccagtacacctccaactactacaaatctacaagtgtggactttgctgttaatacagaaggcgtgtactctgaaccccaccccattggcacccgttacctcacccgtcccctgtaa

SEQ ID NO: 1027 - DNA, 2217 bp, Artificial Sequence
  Description of Artificial Sequence: Synthetic polynucleotide
atggctgccgatggttatcttccagattggctcgaggacactctctctgaaggaataagacagtggtggaagctcaaacctggcccaccaccaccaaagcccgcagagcggcataaggacgacagcaggggtcttgtgcttcctgggtacaagtacctcggacccttcaacggactcgacaagggggagcccgtcaacgcggcggatgcagcggccctcgagcacgacaaggcctacgaccagcagctcaaagcgggtgacaatccgtacctgcggtataaccacgccgacgcggagtttcaggagcgccttaaagaagatacgtcttttgggggcaacctcggacgagcagtcttccaggcgaaaaagagggttcttgaacctctcggtctggttgaggaaggcgctaagacggctcctggaaagaagagaccggtagagccatcaccccagcgttctccagactcctctacgggcatcggcaagaaaggccaacagcccgccagaaaaagactcaattttggtcagactggcgactcagagtcagttccagaccctcaacctctcggagaacctccagcagcgccctctggtgtgggacctaatacaatggctgcaggcggtggcgcaccaatggcagacaataacgaaggcgccgacggagtgggtagttcctcgggaaattggcattgcgattcccaatggctgggggacagagtcatcaccaccagcaccagaacctgggccctgcccacctacaacaatcacctctacaagcaaatctccaacagcacatctggaggatcttcaaatgacaacgcctacttcggctacagcaccccctgggggtattttgacttcaaccgcttccactgccacttctcaccacgtgactggcagcgactcatcaacaacaactggggattccggcccaagagactcaacttcaagctcttcaacattcaggtcaaagaggttacggacaacaatggagtcaagaccatcgccaataaccttaccagcacggtccaggtctttacggactcggagtaccagttgccgtacgtcctcggctctgcgcaccagggctgcctccctccgttcccggcggacgtgttcatgattccccagtacggctacctaacactcaacaacggtagtcaggccgtgggacgctcctccttctactgcctggaatatttcccttctcagatgctgagaacgggcaacaactttaccttcagctacacctttgaggacgttcctttccacagcagctacgctcacagccagagtctggaccgtctcatgaatcctctgattgaccagtacctgtactacttgtctcggactcaaacaacaggaggcacggcaaatacgcagactctgggcttcagccaaggtgggcctaatacaatggccaatcaggcaaagaactggctgccaggaccctgttaccgccaacaacgcgtctcaacgacaaccgggcaaaacaacaatagcaactttgcctggactgctgggaccaaataccatctgaatggaagaaattcattggctaatcctggcatcgctatggcaacacacaaagacgacaaggagcgtttttttcccagtaacgggatcctgatttttggcaaacaaaatgctgccagagacaatgcggattacagcgatgtcatgctcaccagcgaggaagaaatcaaaaccactaaccctgtggctacagaggaatacggtatcgtggcagataacttgcagcagcaaaacacggctcctcaaattggaactgtcaacagccagggggccttacccggtatggtctggcagaaccgggacgtgtacctgcagggtcccatctgggcaaagattccacacacggacggacattttcacccctctcccctcatgggtggattcggacttaaacaccctcctccacagattctcatcaagaacaccccggtacctgcgaatcctccgaccaccttcaaccagtcaaagctgaactctttcatcacgcaatacagcacaggacaagtgagtgtggaaattgaatgggagctgcagaaagaaaacagcaagcgctggaatcccgaagtgcagtacacatccaattatgcaaaatctgccaacgttgattttactgtggacaacaatggactttatactgagcctcgccccattggcacccgttaccttacccgtcccctgtaa

SEQ ID NO: 1028 - DNA, 2211 bp, Artificial Sequence
  Description of Artificial Sequence: Synthetic polynucleotide
atggctgccgatggttatcttccagattggctcgaggacaacctctctgagggcattcgcgagtggtgggcgctgaaacctggagccccgaaacccaaagccaaccagcaaaagcaggacgacggccggggtctggtgcttcctggctacaagtacctcggacccttcaacggactcgacaagggggagcccgtcaacgcggcggacgcagcggccctcgagcacgacaaggcctacgaccagcagctcaaggcgggtgacaatccgtacctgcggtataaccacgccgacgccgagtttcaggagcgtctgcaagaagatacgtcttttgggggcaacctcgggcgagcagtcttccaggccaaaaagaggcttcttgaacctcttggtctggttgaggaaggggctaagacggctcctggaaagaaacgtccggtagagcagtcgccacaagagccagactcctcctcgggcattggcaagacaggccagcagcccgctaaaaagagactcaactttgggcagactggcgactcagagtcagtgcccgatcctcaacctctcggagaacctccagcaacccccgctgctgtgggacctactacaatggcttcaggcggtggcgcaccaatggcggacaataacgaaggcgccgatggagtgggtaattcctcgggaaattggcattgcgattccacatggatgggcgacagagtcatcaccaccagcacccgaacctgggccctgcccacctacaacaatcacctctacaagcaaatctccagtgcttcaacgggggccagcaacgacaaccactacttcggctacagcaccccctgggggtattttgatttcaacagattccactgccatttttcaccacgtgactggcagcgactcatcaacaacaactggggattccggcccaagagactcaacttcaagctcttcaacatccaggtcaaggaggtcacgcagaatgaaggcaccaagaccatcgccaataaccttaccagcacgattcaggtctttacggattcggaataccagctcccgtacgtcctcggctctgcgcaccagggctgcctccctccgttcccggcggacgtgttcattattccgcagtacggctacctaacgctcaacaatggtagccaggcagtgggacggtcatccttttactgcctggaatatttcccatcgcagatgctgagaacgggcaacaactttaccttcagctacacctttgaggacgttcctttccacagcagctacgctcacagccagagtctggaccgtctcatgaatcctctgattgaccagtacctgtactacttgtctcggactcaaacaacaggaggcacggcaaatacgcagactctgggcttcagccaaggtgggcctaatacaatggccaatcaggcaaagaactggctgccaggaccctgttaccgccaacaacgcgtctcaacgacaaccgggcaaaacaacaatagcaactttgcctggactgctgggaccaaataccatctgaatggaagaaattcattggctaatcctggcatcgctatggcaacacacaaagacgacaaggagcgtttttttcccagtaacgggatcctgatttttggcaaacaaaatgctgccagagacaatgcggattacagcgatgtcatgctcaccagcgaggaagaaatcaaaaccactaaccctgtggctacagaggaatacggtatcgtggcagataacttgcagcagcaaaacacggctcctcaaattggaactgtcaacagccagggggccttacccggtatggtctggcagaaccgggacgtgtacctgcagggtcccatctgggccaagattcctcacacggacggcaacttccacccgtctccgctgatgggcggctttggcctgaaacatcctccgcctcagatcctgatcaagaacacgccagtacctgcggatcctccgaccaccttcaaccagtcaaagctgaactctttcatcacgcaatacagcaccggacaggtcagcgtggaaattgaatgggagctgcagaaggaaaacagcaagcgctggaaccccgagatccagtacacctccaactactacaaatctacaagtgtggactttgctgttaatacagaaggcgtgtactctgaaccccaccccattggcacccgttacctcacccgtcccctgtaa

SEQ ID NO: 1029 - DNA, 2211 bp, Artificial Sequence
  Description of Artificial Sequence: Synthetic polynucleotide
atggctgccgatggttatcttccagattggctcgaggacaacctctctgagggcattcgcgagtggtgggcgctgaaacctggagccccgaaacccaaagccaaccagcaaaagcaggacgacggccggggtctggtgcttcctggctacaagtacctcggacccttcaacggactcgacaagggggagcccgtcaacgcggcggatgcagcggccctcgagcacgacaaggcctacgaccagcagctcaaggcgggtgacaatccgtacctgcggtataaccacgccgacgccgagtttcaggagcgtctgcaagaagatacgtcttttgggggcaacctcgggcgagcagtcttccaggccaaaaagagggttcttgaaccttttggtctggttgaggaagctgctaagacggctcctggaaagaaacgtccggtagagcagtcgccacaagagccagactcctcctcgggcattggcaagacaggccagcagcccgctaaaaagagactcaattttggtcagactggcgactcagagtcagtgcccgaccctcaacctctcggagaacctccagcaacccccgctgctgtgggacctactacaatggcttcaggcggtggcgcaccaatggcagacaataacgaaggcgccgatggagtgggtaatgcctcaggaaattggcattgcgattccacatggctgggcgacagagtcatcaccaccagcacccgaacctgggccctgcccacctacaacaatcacctctacaagcaaatctccagtgcttcaacgggggccagcaacgacaaccactacttcggctacagcaccccctgggggtattttgactttaacagattccactgccacttttcaccacgtgactggcagcgactcatcaacaacaactggggattccggcccaagagactcaacttcaagctcttcaacatccaggtcaaggaggtcacgcagaatgaaggcaccaagaccatcgccaataacctcaccagcaccattcaggtctttacggattcggaataccagctcccgtacgtcctcggctctgcccaccagggctgcctccctccgttcccggcggacgtgttcatgattccgcagtacggctacctaacgctcaacaatggtagccaggcagtgggacggtcatccttttactgcctggaatatttcccatcgcagatgctgagaacgggcaacaactttaccttcagctacacctttgaggacgttcctttccacagcagctacgctcacagccagagtctggaccgtctcatgaatcctctgattgaccagtacctgtactacttgtctcggactcaaacaacaggaggcacggcaaatacgcagactctgggcttcagccaaggtgggcctaatacaatggccaatcacgcaaagaactggctgccaggaccctgttaccgccaacaacgcgtctcaacgacaaccgggcaaaacaacaatagcaactttgcctggactgctgggaccaaataccatctgaatggaagaaattcattggctaatcctggcatcgctatggcaacacacaaagacgacaaggagcgtttttttcccagtaacgggatcctgatttttggcaaacaaaatgctgccagagacaatgcggattacagcgatgtcatgctcaccagcgaggaagaaatcaaaaccactaaccctgtggctacagaggaatacggtatcgtggcagataacttgcagcagcaaaacacggctcctcaaattggaactgtcaacagccagggggccttacccggtatggtctggcagaaccgggacgtgtacctgcagggtcccatctgggccaagattcctcacacggacggcaacttccacccgtctccgctgatgggcggctttggcctgaaacatcctccgcctcagatcctgatcaagaacacgcctgtacctgcggatcctccgaccaccttcaaccagtcaaagctgaactctttcatcacgcaatacagcaccggacaggtcagcgtggaaattgaatgggagctgcagaaggaaaacagcaagcgctggaaccccgagatccagtacacctccaactactacaaatctacaagtgtggactttgctgttaatacagaaggcgtgtactctgaaccccaccccattggcacccgttacctcacccgtcccctgtaa

SEQ ID NO: 1030 - DNA, 2211 bp, Artificial Sequence
  Description of Artificial Sequence: Synthetic polynucleotide
atggctgccgatggttatcttccagattggctcgaggacaacctctctgagggcattcgcgagtggtgggcgctgaaacctggagccccgaagcccaaagccaaccagcaaaagcaggacgacggccggggtctggtgcttcctggctacaagtacctcggacccttcaacggactcgacaaaggagagcccgtcaacgaggcggacgcggcggccctcgaacacgacaaggcttacgaccagcagctcaaggccggtgacaacccctacctgcggtacaaccacgccgacgccgagttccaggagcggctgcaagaagatacgtcttttgggggcaacctcgggcgagcagtcttccaggccaagaagaggcttcttgaacctcttggtctggttgaggaagcggctaagacggctcctggaaagaagaggcctgtagagcagtctcctcaggaaccggactcctccgcgggtattggcaaatcaggtgcacagcccgctaaaaagagactcaattttggtcagactggcgactcagagtcagtccccgacccacaacctctcggagaacctccagcaacccccgctgctgtgggacctactacaatggcttcaggcggtggcgcaccaatggcagacaataacgaaggcgccgatggagtgggtaatgcctcaggaaattggcattgcgattccacatggctgggcgacagagtcatcaccaccagcacccgaacctgggccctgcccacctataacaaccatctctacaagcaaatctccagtgcttcaacgggggccagtaacgacaaccactacttcggctacagcaccccctgggggtattttgactttaacagattccactgccacttctcaccacgtgactggcagcgactcatcaacaacaactggggattccggcccaagcgactcaacttcaagctcttcaacattcaggtcaaagaggttacggacaacgatggagtcaagaccatcgccaataaccttaccagcaccattcaggtgtttacggactcggaataccagctgccgtacgttctcggctccgcccaccagggctgcctgcctccgttcccggcggacgtgttcatgattccccagtacggctacctaacactcaacaacggtagtcaggccgtgggacgctcctccttctactgcctggaatactttccttcgcagatgctgagaactggcaacaacttccagtttacttacaccttcgaggacgtgcctttccacagcagctacgcccacagccagagcttggaccggctgatgaatcctctgattgaccagtacctgtactacttgtctcggactcaaacaacaggaggcacggcaaatacgcagactctgggcttcagccaaggtgggcctaatacaatggccaatcaggcaaagaactggctgccaggaccctgttaccgccaacaacgcgtctcaacgacaaccgggcaaaacaacaatagcaactttgcctggactgctgggaccaaataccatctgaatggaagaaattcattggctaatcctggcatcgctatggcaacacacaaagacgacaaggagcgtttttttcccagtaacgggatcctgatttttggcaaacaaaatgctgccagagacaatgcggattacagcgatgtcatgctcaccagcgaggaagaaatcaaaaccactaaccctgtggctacagaggaatacggtatcgtggcagataacttgcagcagcaaaacacggctcctcaaattggaactgtcaacagccagggggccttacccggtatggtctggcagaaccgggacgtgtacctgcagggtcccatctgggccaagattcctcacacggacggcaacttccacccgtctccgctgatgggcggctttggcctgaaacatcctccgcctcagatcctgatcaagaacacgcctgtacctgcggatcctccgaccaccttcaaccagtcaaagctgaactctttcatcacgcaatacagcaccggacaggtcagcgtggaaattgaatgggagctgcagaaggaaaacagcaagcgctggaaccccgagatccagtacacctccaactactacaaatctacaagtgtggactttgctgttaatacagaaggcgtgtactctgaaccccaccccattggcacccgttacctcacccgtcccctgtaa

SEQ ID NO: 1031 - DNA, 2211 bp, Artificial Sequence
  Description of Artificial Sequence: Synthetic polynucleotide
atggctgccgatggttatcttccagattggctcgaggacaacctctctgagggcattcgcgagtggtgggcgctgaaacctggagccccgaagcccaaagccaaccagcaaaagcaggacgacggccggggtctggtgcttcctggctacaagtacctcggacccttcaacggactcgacaagggggagcccgtcaacgcggcggatgcagcggccctcgagcacgacaaagcctacgaccagcagctcaaagcgggtgacaatccgtacctgcggtataaccacgccgacgccgagtttcaggagcgtctgcaagaagatacgtcttttgggggcaacctcgggcgagcagtcttccaggccaagaagagggttctcgaacctttgggtctggttgaggaaggggctaagacggctcctggaaagaaaaggccggtagagcagtctcctcaggaaccggactcctccgcgggtattggcaagacaggtgcacagcccgctaaaaagagactcaattttggtcagactggcgactcagagtcagtccccgacccacaacctctcggagaacctccagcaacccccgctgctgtgggacctactacaatggcttcaggcggtggcgcaccaatggcagacaataacgaaggcgccgacggagtgggtagtgcctcgggaaattggcattgcgattccacatggctgggcgacagagtcatcaccaccagcacccgaacctgggccctgcccacctataacaaccatctctacaagcaaatctccagtgcttcaacgggggccagtaacgacaaccactacttcggctacagcaccccctgggggtattttgacttcaacagattccactgccacttctcaccacgtgactggcagcgactcatcaacaacaactggggattccggcccaagcgactcaacttcaagctcttcaacattcaggtcaaagaggttacggacaacaatggagtcaagaccatcgccaataaccttaccagcacgatccaggtctttacggactcggagtaccagctgccgtacgtcctcggctctgcgcaccagggctgcctgcctccgttcccggcggacgtgttcatgattccgcagtacggctacctaacgctcaacaatggtagccaggcagtgggacggtcatccttttactgcctggaatatttcccatcgcagatgctgagaacgggcaacaactttaccttcagctacacctttgaggacgttcctttccacagcagctacgctcacagccagagtctggaccgtctcatgaatcctctgattgaccagtacctgtactacttgtctcggactcaaacaacaggaggcacggcaaatacgcagactctgggcttcagccaaggtgggcctaatacaatggccaatcaggcaaagaactggctgccaggaccctgttaccgccaacaacgcgtctcaacgacaaccgggcaaaacaacaatagcaactttgcctggactgctgggaccaaataccatctgaatggaagaaattcattggctaatcctggcatcgctatggcaacacacaaagacgacaaggagcgtttttttcccagtaacgggatcctgatttttggcaaacaaaatgctgccagagacaatgcggattacagcgatgtcatgctcaccagcgaggaagaaatcaaaaccactaaccctgtggctacagaggaatacggtatcgtggcagataacttgcagcagcaaaacacggctcctcaaattggaactgtcaacagccagggggccttacccggtatggtctggcagaaccgggacgtgtacctgcagggtcccatctgggccaagattcctcacacggacggcaacttccacccgtctccgctgatgggcggctttggcctgaaacatcctccgcctcagatcctgatcaagaacacgcctgtacctgcggatcctccgaccaccttcaaccagtcaaagctgaactctttcatcacgcaatacagcaccggacaggtcagcgtggaaattgaatgggagctgcagaaggaaaacagcaagcgctggaaccccgagatccagtacacctccaactactacaaatctacaagtgtggactttgctgttaatacagaaggcgtgtactctgaaccccaccccattggcacccgttacctcacccgtcccctgtaa

SEQ ID NO: 1032 - DNA, 2211 bp, Artificial Sequence
  Description of Artificial Sequence: Synthetic polynucleotide
atggctgccgatggttatcttccagattggctcgaggacaacctctctgagggcattcgcgagtggtgggacttgaaacctggagccccgaagcccaaagccaaccagcaaaagcaggacgacggccggggtctggtgcttcctggctacaagtacctcggacccttcaacggactcgacaagggggagcccgtcaacgcggcggacgcagcggccctcgagcacgacaaggcctacgaccagcagctcaaagcgggtgacaatccgtacctgcggtataaccacgccgacgccgagtttcaggagcgtctgcaagaagatacgtcttttgggggcaacctcggacgagcagtcttccaggccaaaaagaggcttcttgaacctcttggtctggttgaggaagcggctaagacggctcctggaaagaagaggcctgtagagcagtctcctcaggaaccggactcctccgcgggtattggcaaatcgggtgcacagcccgctaaaaagagactcaatttcggtcagactggcgacacagagtcagtcccagaccctcaaccaatcggagaacctccagcagcgccctctggtgtgggacctaatacaatggctgcaggcggtggcgcaccaatggcagacaataacgaaggtgccgatggagtgggtagttcctcgggaaattggcattgcgattcccaatggctgggggacagagtcatcaccaccagcacccgaacctgggccctgcccacctataacaaccacctctacaagcaaatctccagtgcttcaacgggggccagcaacgacaaccactactttggctacagcaccccttgggggtattttgacttcaacagattccactgccacttttcaccacgtgactggcaaagactcatcaacaacaactggggattccgacccaagagactcaacttcaagctcttcaacatccaggtcaaggaggtcacgcagaatgaaggcaccaagaccatcgccaataacctcaccagcaccatccaggtgtttacggactcggagtaccagctgccgtacgttctcggctctgcccaccagggctgcctgcctccgttcccggcggacgtgttcatgattccccagtacggctacctaacactcaacaacggtagtcaggccgtgggacgctcctccttctactgcctggaatactttccttcgcagatgctgagaaccggcaacaacttccagtttacttacaccttcgaggacgtgcctttccacagcagctacgcgcacagccagagcttggaccggctgatgaatcctctgattgaccagtacctgtactacttgtctcggactcaaacaacaggaggcacggcaaatacgcagactctgggcttcagccaaggtgggcctaatacaatggccaatcacgcaaagaactggctgccaggaccctgttaccgccaacaacgcgtctcaacgacaaccgggcaaaacaacaatagcaactttgcctggactgctgggaccaaataccatctgaatggaagaaattcattggctaatcctggcatcgctatggcaacacacaaagacgacaaggagcgtttttttcccagtaacgggatcctgatttttggcaaacaaaatgctgccagagacaatgcggattacagcgatgtcatgctcaccagcgaggaagaaatcaaaaccactaaccctgtggctacagaggaatacggtatcgtggcagataacttgcagcagcaaaacacggctcctcaaattggaactgtcaacagccagggggccttacccggtatggtctggcagaaccgggacgtgtacctgcagggtcccatctgggccaagattcctcacacggacggcaacttccacccgtctccgctgatgggcggctttggcctgaaacatcctccgcctcagatcctgatcaagaacacgcctgtacctgcggatcctccgaccaccttcaaccagtcaaagctgaactctttcatcacgcaatacagcaccggacaggtcagcgtggaaattgaatgggagctgcagaaggaaaacagcaagcgctggaaccccgagatccagtacacctccaactactacaaatctacaagtgtggactttgctgttaatacagaaggcgtgtactctgaaccccaccccattggcacccgttacctcacccgtcccctgtaa

SEQ ID NO: 1033 - DNA, 2214 bp, Artificial Sequence
  Description of Artificial Sequence: Synthetic polynucleotide
atggctgccgatggttatcttccagattggctcgaggacaaccttagtgaaggaattcgcgagtggtgggcgctgaaacctggagccccgaagcccaaagccaaccagcaaaagcaggacgacggccggggtctggtgcttcctggctacaagtacctcggacccttcaacggactcgacaagggggagcccgtcaacgcggcggacgcagcggccctcgagcacgacaaggcctacgaccagcagctcaaagcgggtgacaatccgtacctgcggtataaccacgccgacgccgagtttcaggagcgtctgcaagaagatacgtcttttgggggcaacctcgggcgagcagtcttccaggccaagaagcgggttctcgaacctctcggtctggttgaggaaggcgctaagacggctcctggaaagaaacgtccggtagagcagtcgccacaagagccagactcctcctcgggcatcggcaagacaggccagcagcccgctaaaaagagactcaatttcggtcagactggcgacacagagtcagtcccagaccctcaaccaatcggagaacctcccgcagccccctcaggtgtgggatctcttacaatggcttcaggtggtggcgcaccagtggcagacaataacgaaggtgccgatggagtgggtagttcctcgggaaattggcattgcgattcccaatggctgggggacagagtcatcaccaccagcaccagaacctgggccttgcccacctacaataaccacctctacaagcaaatctccaacagcacatctggaggatcttcaaatgacaacgcctacttcggctacagcaccccctgggggtattttgactttaacagattccactgccacttttcaccacgtgactggcagcgactcatcaacaacaactggggattccgacccaagagactcaacttcaagctcttcaacatccaggtcaaggaggtcacgcagaacgaaggcaccaagaccatcgccaataacctcaccagcaccatccaggtgtttacggactcggagtaccagctgccgtacgttctcggctccgcccaccagggctgcctgcctccgttcccggcggacgtgttcatgattccccagtacggctacctaacgctcaacaacggtagtcaggccgtgggacgctcctccttctactgcctggaatactttccttcgcagatgctgagaaccggcaacaacttccagtttacttacaccttcgaggacgtgcctttccacagcagctacgcgcacagccagagcttggaccggctgatgaatcctctgattgaccagtacctgtactacttgtctcggactcaaacaacaggaggcacggcaaatacgcagactctgggcttcagccaaggtgggcctaatacaatggccaatcaggcaaagaactggctgccaggaccctgttaccgccaacaacgcgtctcaacgacaaccgggcaaaacaacaatagcaactttgcctggactgctgggaccaaataccatctgaatggaagaaattcattggctaatcctggcatcgctatggcaacacacaaagacgacaaggagcgtttttttcccagtaacgggatcctgatttttggcaaacaaaatgctgccagagacaatgcggattacagcgatgtcatgctcaccagcgaggaagaaatcaaaaccactaaccctgtggctacagaggaatacggtatcgtggcagataacttgcagcagcaaaacacggctcctcaaattggaactgtcaacagccagggggccttacccggtatggtctggcagaaccgggacgtgtacctgcagggtcccatctgggccaagattcctcacacggacggcaacttccacccgtctccgctgatgggcggctttggcctgaaacatcctccgcctcagatcctgatcaagaacacgcctgtacctgcggatcctccgaccaccttcaaccagtcaaagctgaactctttcatcacgcaatacagcaccggacaggtcagcgtggaaattgaatgggagctgcagaaggaaaacagcaagcgctggaaccccgagatccagtacacctccaactactacaaatctacaagtgtggactttgctgttaatacagaaggcgtgtactctgaaccccaccccattggcacccgttacctcacccgtcccctgtaa

SEQ ID NO: 1034 - DNA, 2214 bp, Artificial Sequence
  Description of Artificial Sequence: Synthetic polynucleotide
atggctgccgatggttatcttccagattggctcgaggacaaccttagtgaaggaattcgcgagtggtgggcgctgaaacctggagccccgaagcccaaagccaaccagcaaaagcaggacgacggccggggtctggtgcttcctggctacaagtacctcggacccttcaacggactcgacaagggggagcccgtcaacgcggcggacgcagcggccctcgagcacgacaaggcctacgaccagcagctcaaagcgggtgacaatccgtacctgcggtataaccacgccgacgcggagtttcaggagcgccttaaagaagatacgtcttttgggggcaacctcgggcgagcagtcttccaggccaagaagagggttctcgaaccttttggtctggttgaggaaggtgctaagacggctcctggaaagaaacgtccggtagagcagtcgccacaagagccagactcctcctcgggcatcggcaagacaggccagcagcccgctaaaaagagactcaattttggtcagactggcgactcagagtcagttccagaccctcaacctctcggagaacctccagcagcgccctctggtgtgggacctaatacaatggctgcaggcggtggcgcaccaatggcagacaataacgaaggtgccgatggagtgggtagttcctcgggaaattggcattgcgattcccaatggctggggaacagagtcatcaccaccagcacccgaacctgggccctgcccacctacaacaatcacctctacaagcaaatctccaacagcacatctggaggatcttcaaatgacaacgcctacttcggctacagcaccccctgggggtattttgacttcaacagattccactgccacttctcaccacgtgactggcagcgactcatcaacaacaactggggattccggcccaagagactcaacttcaagctcttcaacattcaggtcaaagaggttacggacaacaatggagtcaagaccatcgccaataaccttaccagcacggtccaggtcttcacggactcggagtaccagttgccgtacgtcctcggctctgcgcaccagggctgcctccctccgttcccggcggacgtgttcatgattccgcaatacggctacctgacgctcaacaacggtagccaagccgtgggacgttcatccttttactgcctggaatatttcccttctcagatgctgagaaccggcaacaacttccagtttacttacaccttcgaggacgtgcctttccacagcagctacgcgcacagccagagcttggaccggctgatgaatcctctgattgaccagtacctgtactacttgtctcggactcaaacaacaggaggcacggcaaatacgcagactctgggcttcagccaaggtgggcctaatacaatggccaatcaggcaaagaactggctgccaggaccctgttaccgccaacaacgcgtctcaacgacaaccgggcaaaacaacaatagcaactttgcctggactgctgggaccaaataccatctgaatggaagaaattcattggctaatcctggcatcgctatggcaacacacaaagacgacaaggagcgtttttttcccagtaacgggatcctgatttttggcaaacaaaatgctgccagagacaatgcggattacagcgatgtcatgctcaccagcgaggaagaaatcaaaaccactaaccctgtggctacagaggaatacggtatcgtggcagataacttgcagcagcaaaacacggctcctcaaattggaactgtcaacagccagggggccttacccggtatggtctggcagaaccgggacgtgtacctgcagggtcccatctgggccaagattcctcacacggacggcaacttccacccgtctccgctgatgggcggctttggcctgaaacatcctccgcctcagatcctgatcaagaacacgcctgtacctgcggatcctccgaccaccttcaaccagtcaaagctgaactctttcatcacgcaatacagcaccggacaggtcagcgtggaaattgaatgggagctgcagaaggaaaacagcaagcgctggaaccccgagatccagtacacctccaactactacaaatctacaagtgtggactttgctgttaatacagaaggcgtgtactctgaaccccaccccattggcacccgttacctcacccgtcccctgtaa

SEQ ID NO: 1035 - DNA, 2211 bp, Artificial Sequence
  Description of Artificial Sequence: Synthetic polynucleotide
atggctgccgatggttatcttccagattggctcgaggacaacctctctgagggcattcgcgagtggtgggacttgaaacctggagccccgaagcccaaagccaaccagcaaaagcaggacgacggccggggtctggtgcttcctggctacaagtacctcggacccttcaacggactcgacaggggggagcccgtcaacgcggcggacgcagcggccctcgagcacgacaaggcctacgaccagcagctcaaagcgggtgacaatccgtacctgcggtataaccacgccgacgccgagtttcaggagcgtctgcaagaagatacgtcttttgggggcaacctcgggcgagcagtcttccaggccaagaagcgggttctcgaacctctcggtctggttgaggaaggcgctaagacggctcctggaaagaaacgtccggtagagcagtcgccacaagagccagactcctcctcgggcatcggcaagacaggccagcagcccgctaaaaagagactcaattttggtcagactggcgactcagagtcagtccccgacccacaacctctcggagaacctccagcaacccccgctgctgtgggacctactacaatggcttcaggcggtggcgcaccaatggcagacaataacgaaggcgccgacggagtgggtaatgcctcaggaaattggcattgcgattccacatggctgggcgacagagtcatcaccaccagcacccgaacctgggccttgcccacctataacaaccacctctacaagcaaatctccagtgcttcaacgggggccagcaacgacaaccactacttcggctacagcaccccctgggggtattttgacttcaacagattccactgccacttctcaccacgtgactggcagcgactcatcaacaacaactggggattccggcctaagcgactcaacttcaagctcttcaacattcaggtcaaagaggttacggacaacaatggagtcaagaccatcgccaataacctcaccagcaccatccaggtgtttacggactcggagtaccagctgccgtacgttctcggctctgcccaccagggctgcctgcctccgttcccggcggacgtgttcatgattccccagtacggctacctaacactcaacaacggtagtcaggccgtgggacgctcctccttctactgcctggaatactttccttcgcagatgctgagaaccggcaacaacttccagtttacttacaccttcgaggacgtgcctttccacagcagctacgcccacagccagagcttggaccggctgatgaatcctctgattgaccagtacctgtactacttgtctcggactcaaacaacaggaggcacggcaaatacgcagactctgggcttcagccaaggtgggcctaatacaatggccaatcaggcaaagaactggctgccaggaccctgttaccgccaacaacgcgtctcaacgacaaccgggcaaaacaacaatagcaactttgcctggactgctgggaccaaataccatctgaatggaagaaattcattggctaatcctggcatcgctatggcaacacacaaagacgacaaggagcgtttttttcccagtaacgggatcctgatttttggcaaacaaaatgctgccagagacaatgcggattacagcgatgtcatgctcaccagcgaggaagaaatcaaaaccactaaccctgtggctacagaggaatacggtatcgtggcagataacttgcagcagcaaaacacggctcctcaaattggaactgtcaacagccagggggccttacccggtatggtctggcagaaccgggacgtgtacctgcagggtcccatctgggccaagattcctcacacggacggcaacttccacccgtctccgctgatgggcggctttggcctgaaacatcctccgcctcagatcctgatcaagaacacgcctgtacctgcggatcctccgaccaccttcaaccagtcaaagctgaactctttcatcacgcaatacagcaccggacaggtcagcgtggaaattgaatgggagctgcagaaggaaaacagcaagcgctggaaccccgagatccagtacacctccaactactacaaatctacaagtgtggactttgctgttaatacagaaggcgtgtactctgaaccccaccccattggcacccgttacctcacccgtcccctgtaa

SEQ ID NO: 1036 - DNA, 2211 bp, Artificial Sequence
  Description of Artificial Sequence: Synthetic polynucleotide
atggctgccgatggttatcttccagattggctcgaggacaacctctctgagggcattcgcgagtggtgggacttgaaacctggagccccgaagcccaaagccaaccagcaaaagcaggacgacggccggggtctggtgcttcctggctacaagtacctcggacccttcaacggactcgacaagggggagcccgtcaacgcggcggacgcagcggccctcgagcacgacaaggcctacgaccagcagctcaaagcgggtgacaatccgtacctgcggtataaccacgccgacgccgagtttcaggagcgtctgcaagaagatacgtcttttgggggcaacctcgggcgagcagtcttccaggccaagaagcgggttctcgaacctctcggtctggttgaggaaggcgctaagacggctcctggaaagaaacgtccggtagagcagtcgccacaagagccagactcctcctcgggcatcggcaagaaaggccaacagcccgccagaaaaagactcaattttggtcagactggcgactcagagtcagttccagaccctcaacctctcggagaacctcccgcagccccctcaggtgtgggatctcttacaatggcttcaggcggtggcgcaccaatggcagacaataacgaaggcgccgacggagtgggtaatgcctcaggaaattggcattgcgattccacatggctgggcgacagagtcatcaccaccagcacccgaacatgggccttgcccacttacaacaaccatctctacaagcaaatctccagtgcttcaacgggggccagcaacgacaaccactacttcggctacagcaccccctgggggtattttgatttcaacagattccactgccacttttcaccacgtgactggcaaagactcatcaacaacaactggggattccgacccaagagactcaacttcaagctctttaacattcaagtcaaagaggtcacgcagaatgaaggcaccaagaccatcgccaataaccttaccagcacggtccaggtcttcacggactcagactatcagctcccgtacgttctcggctccgcccaccagggctgcctgcctccgttcccggcggacgtgttcatgattccccagtacggctacctaacactcaacaacggtagtcaggccgtgggacgctcctccttctactgcctggaatactttccttcgcagatgctgagaaccggcaacaacttccagtttacttacacctttgaggacgttcctttccacagcagctacgctcacagccagagtctggaccgtctcatgaatcctctgattgaccagtacctgtactacttgtctcggactcaaacaacaggaggcacggcaaatacgcagactctgggcttcagccaaggtgggcctaatacaatggccaatcaggcaaagaactggctgccaggaccctgttaccgccaacaacgcgtctcaacgacaaccgggcaaaacaacaatagcaactttgcctggactgctggaaccaaataccatctgaatggaagaaattcattgtctaatcctggcatcgctatggcgacacacaaagacgacaaggagcgtttttttcccagtaacgggatcctgatttttggcaaacaaaatgctgccagagacaatgcggattacagcgatgtcatgctcaccagcgaggaagaaatcaaaaccactaaccctgtggctacagaggaatacggtatcgtggcagataacttgcagcagcaaaacacggctcctcaaattggaactgtcaacagccagggggccttacccggtatggtctggcagaaccgggacatgtacctgcagggtcccatctgggccaagattcctcacacggacggcaacttccacccgtctccgctgatgggcggctttggcctgaaacatcctccgcctcagatcctgatcaagaacacgcctgtacctgcggatcctccgaccaccttcaaccagtcaaagctgaactctttcatcacgcaatacagcaccggacaggtcagcgtggaaattgaatgggagctgcagaaggaaaacagcaagcgctggaaccccgagatccagtacacctccaactactacaaatctacaagtgtggactttgctgttaatacagaaggcgtgtactctgaaccccaccccattggcacccgttacctcacccgtcccctgtaa

SEQ ID NO: 1037 - DNA, 2211 bp, Artificial Sequence
  Description of Artificial Sequence: Synthetic polynucleotide
atggctgccgatggttatcttccagattggctcgaggacaacctctctgagggcattcgcgagtggtgggcgctgaaacctggagccccgaagcccaaagccaaccagcaaaagcaggacgacggccggggtctggtgcttcctggctacaagtacctcggacccttcaacggactcgacaagggggagcccgtcaacgcggcggatgcagcggccctcgagcacgacaaggcctacgaccagcagctcaaagcgggtgacaatccgtacctgcggtataaccacgccgacgccgagtttcaggagcgtctgcaggaagatacgtcttttgggggcaacctcgggcgagcagtcttccaggccaagaagagggttctcgaaccttttggtctggttgaggaaggcgctaagacggctcctggaaagaaacgtccggtagagcagtcgccacaagagccagactcctcctcgggcatcggcaagacaggccagcagcccgctaaaaagagactcaattttggtcagactggcggctcagagtcagtccccgacccacaacctctcggagaacctccagcaacccccgctgctgtgggacctactacaatggctgcaggcggtggcgcaccaatggcagacaataacgaaggcgccgacggagtgggtagttcctcgggaaattggcattgcgattccacatggctgggcgacagagtcatcaccaccagcaccagaacctgggccttgcccacctataacaaccacctctacaagcaaatctccagtgcttcaacgggggccagcaacgacaaccactacttcggctacagcaccccctgggggtattttgatttcaacagattccactgccatttctcaccacgtgactggcagcgactcatcaacaacaactggggattccggcccaagagactcaacttcaaactcttcaacattcaggtcaaagaggttacggacaacaatggagtcaagaccatcgccaataaccttaccagcacggtccaggtgtttacggactcggagtaccagctgccgtacgttctcggctctgcccaccagggctgcctccctccgttcccggcggacgtgttcatgattccgcagtacggctacctaacgctcaacaatggcagccaggcagtgggacggtcatccttttactgcctggaatatttcccttctcagatgctgagaacgggcaacaactttaccttcagctacacctttgaggaagtgcctttccacagcagctacgcgcacagccagagcctggaccggctgatgaatcctctgattgaccagtacctgtactacttgtctcggactcaaacaacaggaggcacggcaaatacgcagactctgggcttcagccaaggtgggcctaatacaatggccaatcaggcaaagaactggctgccaggaccctgttaccgccaacaacgcgtctcaacgacaaccgggcaaaacaacaatagcaactttgcctggactgctgggaccaaataccatctgaatggaagaaattcattggctaatcctggcatcgctatggcctcacacaaagacgacaaggagcgtttttttcccagtaacgggatcctgatttttggcaaacaaaatgctgccagagacaatgcggattacagcgatgtcatgctcaccagcgaggaagaaatcaaaaccactaaccctgtggctacagaggaatacggtatcgtggcagataacttgcagcagcaaaacacggctcctcaaattggaactgtcaacagccagggggccttacccggtatggtctggcagaaccgggacgtgtacctgcagggtcccatctgggccaagattcctcacacggacggcaacttccacccgtctccgctgatgggcggctttggcctgaaacatcctccgcctcagatcctgatcaagaacacgcctgtacctgcggatcctccgaccaccttcaaccagtcaaagctgaactctttcatcacgcaatacagcaccggacaggtcagcgtggaaattgaatgggagctgcagaaggaaaacagcaagcgctggaaccccgagatccagtacacctccaactactacaaatctacaagtgtggactttgctgttaatacagaaggcgtgtactctgaaccccaccccattggcacccgttacctcacccgtcccctgtaa

SEQ ID NO: 1038 - protein, 736 aa, Artificial Sequence
  Description of Artificial Sequence: Synthetic polypeptide
MAADGYLPDWLEDTLSEGIRQWWKLKPGPPPPKPAERHKDDSRGLVLPGYKYLGPFNGLDKGEPVNEADAAALEHDKAYDQQLKAGDNPYLKYNHADAEFQERLKEDTSFGGNLGRAVFQAKKRVLEPLGLVEEGAKTAPGKKRPVEQSPQEPDSSSGIGKTGQQPAKKRLNFGQTGDSESVPDPQPLGEPPATPAAVGPTTMASGGGAPMADNNEGADGVGSSSGNWHCDSQWLGDRVITTSTRTWALPTYNNHLYKQISSASTGASNDNHYFGYSTPWGYFDFNRFHCHFSPRDWQRLINNNWGFRPKRLNFKLFNIQVKEVTQNEGTKTIANNLTSTIQVFTDSEYQLPYVLGSAHQGCLPPFPADVFMIPQYGYLTLNNGSQAVGRSSFYCLEYFPSQMLRTGNNFQFTYTFEDVPFHSSYAHSQSLDRLMNPLIDQYLYYLSRTQTTGGTANTQTLGFSQGGPNTMANQAKNWLPGPCYRQQRVSTTTGQNNNSNFAWTAGTKYHLNGRNSLANPGIAMATHKDDKERFFPSNGILIFGKQNAARDNADYSDVMLTSEEEIKTTNPVATEEYGIVADNLQQQNTAPQIGTVNSQGALPGMVWQNRDVYLQGPIWAKIPHTDGNFHPSPLMGGFGLKHPPPQILIKNTPVPADPPTTFNQSKLNSFITQYSTGQVSVEIEWELQKENSKRWNPEIQYTSNYYKSTSVDFAVNTEGVYSEPHPIGTRYLTRPL

SEQ ID NO: 1039 - protein, 736 aa, Artificial Sequence
  Description of Artificial Sequence: Synthetic polypeptide
MAADGYLPDWLEDNLSEGIREWWALKPGAPKPKANQQKQDDGRGLVLPGYKYLGPFNGLDKGEPVNAADAAALEHDKAYDQQLKAGDNPYLKYNHADAEFQERLKEDTSFGGNLGRAVFQAKKRLLEPLGLVEEAAKTAPGKKRPVEQSPQEPDSSAGIGKSGAQPAKKRLNFGQTGDSESVPDPQPLGEPPATPAAVGPTTMASGGGAPMADNNEGADGVGNASGNWHCDSTWLGDRVITTSTRTWALPTYNNHLYKQISSASTGASNDNHYFGYSTPWGYFDFNRFHCHFSPRDWQRLINNNWGFRPKRLNFKLFNIQVKEVTQNEGTKTIANNLTSTIQVFTDSEYQLPYVLGSAHQGCLPPFPADVFMIPQYGYLTLNNGSQAVGRSSFYCLEYFPSQMLRTGNNFQFTYTFEDVPFHSSYAHSQSLDRLMNPLIDQYLYYLSRTQTTGGTANTQTLGFSQGGPNTMANQAKNWLPGPCYRQQRVSTTTGQNNNSNFAWTAGTKYHLNGRNSLANPGIAMATHKDDKERFFPSNGILIFGKQNAARDNADYSDVMLTSEEEIKATNPVATEEYGIVADNLQQQNTAPQIGTVNSQGALPGMVWQNRDVYLQGPIWAKIPHTDGNFHPSPLMGGFGLKHPPPQILIKNTPVPADPPTTFNQSKLNSFITQYSTGQVSVEIEWELQKENSKRWNPEIQYTSNYYKSTSVDFAVNTEGVYSEPHPIGTRYLTRPL

SEQ ID NO: 1040 - protein, 737 aa, Artificial Sequence
  Description of Artificial Sequence: Synthetic polypeptide
MAADGYLPDWLEDNLSEGIREWWDLKPGAPKPKANQQKQDDGRGLVLPGYKYLGPFNGLDKGEPVNAADAAALEHDKAYDQQLKAGDNPYLRYNHADAEFQERLQEDTSFGGNLGRAVFQAKKRVLEPLGLVEEGANTAPGKKRPVEQSPQEPDSSAGIGKSGAQPAKKRLNFGQTGDTESVPDPQPIGEPPAAPSGVGSLTMASGGGAPVADNNEGADGVGSSSGNWHCDSQWLGDRVITTSTRTWALPTYNNHLYKQISNSTSGGSSNDNAYFGYSTPWGYFDFNRFHCHFSPRDWQRLINNNWGFRPKRLNFKLFNIQVKEVTDNNGVKTIANNLTSTIQVFTDSEYQLPYVLGSAHQGCLPPFPADVFMIPQYGYLTLNNGSQAVGRSSFYCLEYFPSQMLRTGNNFQFTYTFEDVPFHSSYAHSQSLDRLMNPLIDQYLYYLSRTQTTGGTANTQTLGFSQGGPNTMANQAKNWLPGPCYRQQRVSTTTGQNNNSNFAWTAGTKYHLNGRNSLANPGIAMASHKDDKERFFPSNGILIFGKQNAARDNADYSDVMLTSEEEIKTTNPVATEEYGIVADNLQQQNTAPQIGTVNSQGALPGMVWQNRDVYLQGPIWAKIPHTDGNFHPSPLMGGFGLKHPPPQILIKNTPVPADPPTTFNQSKLNSFITQYSTGQVSVEIEWELQKENSKRWNPEIQYTTNYYKSTSVDFAVNTEGVYSEPHPIGTRYLTRPL

SEQ ID NO: 1041 - protein, 736 aa, Artificial Sequence
  Description of Artificial Sequence: Synthetic polypeptide
MAADGYLPDWLEDNLSEGIREWWALKPGAPKPKANQQKQDDGRGLVLPGYKYLGPFNGLDKGEPVNEADAAALEHDKAYDQQLKAGDNPYLRYNHADAEFQERLQEDTSFGGNLGRAVFQAKKRVLEPLGLVEEGAKTAPGKKRPVEQSPQEPDSSSGIGKTGQQPAKKRLNFGQTGDSESVPDPQPLGEPPATPAAVGPTTMASGGGAPMADNNEGADGVGNASGNWHCDSTWLGDRVITTSTRTWALPTYNNHLYKQISSASTGASNDNHYFGYSTPWGYFDFNRFHCHFSPRDWQRLINNNWGFRPKRLNFKLFNIQVKEVTQNEGTKTIANNLTSTIQVFTDSEYQLPYVLGSAHQGCLPPFPADVFMIPQYGYLTLNNGSQAVGRSSFYCLEYFPSQMLRTGNNFQFTYTFEDVPFHSSYAHSQSLDRLMNPLIDQYLYYLSRTQTTGGTANTQTLGFSQGGPNTMANQAKNWLPGPCYRQQRVSTTTGQNNNSNFAWTAGTKYHLNGRNSLANPGIAMATHKDDKERFFPSNGILIFGKQNAARDNADYSDVMLTSEEEIKTTNPVATEEYGIVADNLQQQNTAPQIGTVNSQGALPGMVWQNRDVYLQGPIWAKIPHTDGNFHPSPLMGGFGLKHPPPQILIKNTPVPADPPTTFNQSKLNSFITQYSTGQVSVEIEWELQKENSKRWNPEIQYTSNYYKSTSVDFAVNTEGVYSEPHPIGTRYLTRPL

SEQ ID NO: 1042 - protein, 736 aa, Artificial Sequence
  Description of Artificial Sequence: Synthetic polypeptide
MAADGYLPDWLEDNLSEGIREWWALKPGAPKPKANQQKQDDGRGLVLPGYKYLGPFNGLDKGEPVNEADAAALEHDKAYDQQLKAGDNPYLRYNHADAEFQERLQEDTSFGGNLGRAVFQAKKRVLEPFGLVEEGAKTAPGKKRPVEQSPQEPDSSSGIGKTGQQPAKKRLNFGQTGDSESVPDPQPLGEPPATPAAVGPTTMASGGGAPMADNNEGADGVGNASGNWHCDSQWLGDRVITTSTRTWALPTYNNHLYKQISSASTGASNDNHYFGYSTPWGYFDFNRFHCHFSPRDWQRLINNNWGFRPKRLNFKLFNIQVKEVTDNNGVKTIANNLTSTVQVFSDSEYQLPYVLGSAHQGCLPPFPADVFMIPQYGYLTLNNGSQAVGRSSFYCLEYFPSQMLRTGNNFQFTYTFEDVPFHSSYAHSQSLDRLMNPLIDQYLYYLSRTQTTGGTANTQTLGFSQGGPNTMANQAKNWLPGPCYRQQRVSTTTGQNNNSNFAWTAGTKYHLNGRNSLANPGIAMATHKDDKERFFPSNGILIFGKQNAARDNADYSDVMLTSEEEIKTTNPVATEEYGIVADNLQQQNTAPQIGTVNSQGALPGMVWQNRDVYLQGPIWAKIPHTDGNFHPSPLMGGFGLKHPPPQILIKNTPVPADPPTTFNQSKLNSFITQYSTGQVSVEIEWELQKENSKRWNPEIQYTSNYYKSTSVDFAVNTEGVYSEPHPIGTRYLTRPL

SEQ ID NO: 1043 - protein, 736 aa, Artificial Sequence
  Description of Artificial Sequence: Synthetic polypeptide
MAADGYLPDWLEDTLSEGIRQWWKLKPGPPPPKPAERHKDDSRGLVLPGYKYLGPFNGLDKGEPVNEADAAALEHDKAYDRQLDSGDNPYLKYNHADAEFQERLKEDTSFGGNLGRAVFQAKKRVLEPFGLVEEGAKTAPGKKRPVEQSPQEPDSSSGIGKTGQQPAKKRLNFGQTGDSESVPDPQPLGEPPATPAAVGPTTMASGGGAPMADNNEGADGVGNASGNWHCDSTWLGDRVITTSTRTWALPTYNNHLYKQISSASTGASNDNHYFGYSTPWGYFDFNRFHCHFSPRDWQRLINNNWGFRPKRLNFKLFNIQVKEVTDNNGVKTIANNLTSTVQVFTDSDYQLPYVLGSAHEGCLPPFPADVFMIPQYGYLTLNNGSQAVGRSSFYCLEYFPSQMLRTGNNFQFTYTFEDVPFHSSYAHSQSLDRLMNPLIDQYLYYLSRTQTTGGTANTQTLGFSQGGPNTMANQAKNWLPGPCYRQQRVSTTTGQNNNSNFAWTAGTKYHLNGRNSLANPGIAMATHKDDKERFFPSNGILIFGKQNAARDNADYSDVMLTSEEEIKTTNPVATEEYGIVADNLQQQNTAPQIGTVNSQGALPGMVWQNRDVYLQGPIWAKIPHTDGNFHPSPLMGGFGLKHPPPQILIKNTPVPADPPTTFNQSKLNSFITQYSTGQVSVEIEWELQKENSKRWNPEIQYTSNYYKSTSVDFAVNTEGVYSEPHPIGTRYLTRNL

SEQ ID NO: 1044 - protein, 738 aa, Artificial Sequence
  Description of Artificial Sequence: Synthetic polypeptide
MAADGYLPDWLEDNLSEGIREWWDLKPGAPKPKANQQKQDDGRGLVLPGYKYLGPFNGLDKGEPVNAADAAALEHDKAYDQQLQAGDNPYLRYNHADAEFQERLQEDTSFGGNLGRAVFQAKKRVLEPLGLVEEGAKTAPGKKRPVEPSPQRSPDSSTGIGKKGQQPARKRLNFGQTGDSESVPDPQPLGEPPAAPSGVGPNTMAAGGGAPMADNNEGADGVGSSSGNWHCDSQWLGDRVITTSTRTWALPTYNNHLYKQISNSTSGGSSNDNAYFGYSTPWGYFDFNRFHCHFSPRDWQRLINNNWGFRPKRLSFKLFNIQVKEVTQNEGTKTIANNLTSTIQVFTDSEYQLPYVLGSAHQGCLPPFPADVFMIPQYGYLTLNNGSQAVGRSSFYCLEYFPSQMLRTGNNFTFSYTFEDVPFHSSYAHSQSLDRLMNPLIDQYLYYLSRTQTTGGTANTQTLGFSQGGPNTMANQAKNWLPGPCYRQQRVSTTTGQNNNSNFAWTAGTKYHLNGRNSLANPGIAMATHKDDKERFFPSNGILIFGKQNAARDNADYSDVMLTSEEEIKTTNPVATEEYGIVADNLQQQNTAPQIGTVNSQGALPGMVWQNRDVYLQGPIWAKIPHTDGNFHPSPLMGGFGLKHPPPQILIKNTPVPADPPTTFNQSKLNSFITQYSTGQVSVEIEWELQKENSKRWNPEIQYTSNYYKSTSVDFAVNTEGVYSEPHPIGTRYLTRPL

SEQ ID NO: 1045 - protein, 737 aa, Artificial Sequence
  Description of Artificial Sequence: Synthetic polypeptide
MAADGYLPDWLEDNLSEGIREWWDLKPGAPKPKANQQKQDDGRGLVLPGYKYLGPFNGLDKGEPVNAADAAALEHDKAYDQQLKAGDNPYLRYNHADAEFQERLQEDTSFGGNLGRAVFQAKKRVLEPFGLVEEGAKTAPGKKRPVEQSPQEPDSSSGIGKTGQQPAKKRLNFGQTGDSESVPDPQPLGEPPATPAAVGPTTMASGGGAPMQDNNEGADGVGSSSGNWHCDSTWLGDRVITTSTRTWALPTYNNHLYKQISNGTSGGATNDNTYFGYSTPWGYFDFNRFHCHFSPRDWQRLINNNWGFRPKRLNFKLFNIQVKEVTQNEGTKTIANNLTSTIQVFTDSEYQLPYVLGSAHQGCLPPFPADVFMIPQYGYLTLNNGSQAVGRSSFYCLEYFPSQMLRTGNNFTFSYTFEDVPFHSSYAHSQSLDRLMNPLIDQYLYYLSRTQTTGGTANTQTLGFSQGGPNTMANQAKNWLPGPCYRQQRVSTTTGQNNNSNFAWTAGTKYHLNGRNSLANPGIAMATHKDDKERFFPSNGILIFGKQNAARDNADYSDVMLTSEEEIKTTNPVATEEYGIVADNLQQQNTAPQIGTVNSQGALPGMVWQNRDVYLQGPIWAKIPHTDGNFHPSPLMGGFGLKHPPPQILIKNTPVPADPPTTFNQSKLNSFITQYSTGQVSVEIEWELQKENSKRWNPEIQYTSNYYKSTSVDFAVNTEGVYSEPHPIGTRYLTRPL

SEQ ID NO: 1046 - protein, 736 aa, Artificial Sequence
  Description of Artificial Sequence: Synthetic polypeptide
MAADGYLPDWLEDNLSEGIREWWALKPGAPKPKANQQKQDDGRGLVLPGYKYLGPFNGLDKGEPVNAADAAALEHDKAYDQQLKAGDNPYLRYNHADAEFQERLQEDTSFGGNLGRAVFQAKKRVLEPLGLVEEGAKTAPGKKRPVEQSPQEPDSSSGIGKTGQQPAKKRLNFGQTGDSESVPDPQPLGEPPATPAAVGPTTMASGGGAPMADNNEGADGVGSSSGNWHCDSTWLGDRVITTSTRTWALPTYNNHLYKQISSASTGASNDNHYFGYSTPWGYFDFNRFHCHFSPRDWQRLINNNWGFRPKRLNFKLFNIQVKEVTDNNGVKTIANNLTSTVQVFTDSDYQLPYVLGSAHEGCLPPFPADVFMIPQYGYLTLNNGSQAVGRSSFYCLEYFPSQMLRTGNNFTFSYTFEDVPFHSSYAHSQSLDRLMNPLIDQYLYYLSRTQTTGGTANTQTLGFSQGGPNTMANQAKNWLPGPCYRQQRVSTTTGQNNNSNFAWTAGTKYHLNGRNSLANPGIAMATHKDDKERFFPSNGILIFGKQNAARDNADYSDVMLTSEEEIKTTNPVATEEYGIVADNLQQQNTAPQIGTVNSQGALPGMVWQNRDVYLQGPIWAKIPHTDGNFHPSPLMGGFGLKHPPPQILIKNTPVPADPPTTFNQSKLNSFITQYSTGQVSVEIEWELQKENSKRWNPEIQYTSNYYKSTSVDFAVNTEGVYSEPHPIGTRYLTRPL

SEQ ID NO: 1047 - protein, 737 aa, Artificial Sequence
  Description of Artificial Sequence: Synthetic polypeptide
MAADGYLPDWLEDNLSEGIREWWDLKPGAPKPKANQQKQDDGRGLVLPGYKYLGPFNGLDKGEPVNAADAAALEHDKAYDQQLKAGDNPYLRYNHADAEFQERLQEDTSFGGNLGRAVFQAKKRVLEPLGLVEEGAKTAPGKKRPVEPSPQRSPDSSTGIGKKGQQPARKRLNFGQTGDSESVPDPQPLGEPPATPAAVGPTTMASGGGAPMADNNEGADGVGNASGNWHCDSTWLGDRVITTSTRTWALPTYNNHLYKQISSASTGASNDNHYFGYSTPWGYFDFNRFHCHFSPRDWQRLINNNLGSRPKRLNFKLFIIQVKEVTTNDGVTTIANNLTSTVQVFSDSEYQLPYVLGSAHQGCLPPFPADVFMIPQYGYLTLNNGSQAVGRSSFYCLEYFPSQMLRTGNNFTFSYTFEDVPFHSSYAHSQSLDRLMNPLIDQYLYYLNRTQNQSGSAQNKDLLFSRGSPAGMSVQPKNWLPGPCYRQQRVSKTKTDNNNSNFTWTGASKYNLNGRESIINPGTAMASHKDDKDKFFPMSGVMIFGKESAGASNTALDNVMITDEEEIKATNPVATERFGTVAVNLQSSSTDPATGDVHVMGALPGMVWQDRDVYLQGPIWAKIPHTDGHFHPSPLMGGFGLKHPPPQILIKNTPVPANPPAEFSATKFASFITQYSTGQVSVEIEWELQKENSKRWNPEVQYTSNYAKSANVDFTVDNNGLYTEPRPIGTRYLTRPL

SEQ ID NO: 1048 - protein, 736 aa, Artificial Sequence
  Description of Artificial Sequence: Synthetic polypeptide
MAADGYLPDWLEDNLSEGIREWWALKPGAPKPKANQQKQDDGRGLVLPGYKYLGPFNGLDKGEPVNAADAAALEHDKAYDQQLKAGDNPYLRYNHADAEFQERLQEDTSFGGNLGRAVFQAKKRLLEPLGLVEEAAKTAPGKKRPVEQSPQEPDSSSGIGKTGQQPAKKRLNFGQTGDSESVPDPQPIGEPPATPAAVGPTTMASGGGAPMADNNEGADGVGNSSGNWHCDSTWLGDRVITTSTRTWALPTYNNHLYKQISSASTGASNDNHYFGYSTPWGYFDFNRFHCHFSPRDWQRLINNNWGFRPKRLNFKLFNIQVKEVTQNEGTKTIANNLTSTIQVFTDSEYQLPYVLGSAHQGCLPPFPADVFMIPQYGYLTLNNGSQAVGRSSFYCLEYFPSQMLRTGNNFTFSYTFEDVPFHSSYAHSQSLDRLMNPLIDQYLYYLSRTQTTGGTANTQTLGFSQGGPNTMANQAKNWLPGPCYRQQRVSTTTGQNNNSNFAWTAGTKYHLNGRNSLANPGIAMATHKDDKERFFPSNGILIFGKQNAARDNADYSDVMLTSEEEIKTTNPVATEEYGIVADNLQQQNTAPQIGTVNSQGALPGMVWQNRDVYLQGPIWAKIPHTDGNFHPSPLMGGFGLKHPPPQILIKNTPVPADPPTTFNQSKLNSFITQYSTGQVSVEIEWELQKENSKRWNPEIQYTSNYYKSTSVDFAVNTEGVYSDPHPIGTRYLTRPL

SEQ ID NO: 1049 - protein, 736 aa, Artificial Sequence
  Description of Artificial Sequence: Synthetic polypeptide
MAADGYLPDWLEDNLSEGIREWWALKPGAPKPKANQQEQDDGRGLVLPGYKYLGPFNGLDKGEPVNAADAAALEHDKAYDQQLKAGDNPYLRYNHADAEFQERLQEDTSFGGNLGRAVFQAKKRVLEPFGLVEEGAKTAPGKKRPVEQSPQEPDSSSGIGKTGQQPAKKRLNFGQTGDSESVPDPQPLGEPPAAPSGVGPNTMAAGGGAPMADNNEGADGVGSSSGNWHCDSTWLGDRVITTSTRTWALPTYNNHLYKQISSASTGASNDNHYFGYSTPWGYFDFNRFHCHFSPRDWQRLINNNWGFRPKRLNFKLFNIQVKEVTQNEGTKTIANNLTSTIQVFTDSEYQLPYVLGSAHQGCLPPFPADVFMIPQYGYLTLNNGSQAVGRSSFFCLEYFPSQMLRTGNNFTFSYTFEDVPFHSSYAHSQSLDRLMNPLIDQYLYYLSRTQTTGGTANTQTLGFSQGGPNTMANQAKNWLPGPCYRQQRVSTTTGQNNNSNFAWTAGTKYHLNGRNSLANPGIAMATHKDDKERFFPSNGILIFGKQNAARDNADYSDVMLTSEEEIKTTNPVATEEYGIVADNLQQQNTAPQIGTVNSQGALPGMVWQNRDVYLQGPIWAKIPHTDGNFHPSPLMGGFGLKHPPPQILIKNTPVPADPPTTFNQSKLNSFITQYSTGQVSVEIEWELQKENSKRWNPEIQYTSNYYKSTSVDFAVNTEGVYSEPHPIGTRYLTRPL

SEQ ID NO: 1050 - protein, 736 aa, Artificial Sequence
  Description of Artificial Sequence: Synthetic polypeptide
MAADGYLPDWLEDNLSEGIREWWDLKPGAPKPKANQQKQDDGRGLVLPGYKYLGPFNGLDKGEPVNAADAAALEHDKAYDQQLKAGDNPYLRYNHADAEFQERLQEDTSFGGNLGRAVFQAKKRVLEPLGLVEEGAKTAPGKKRPVEQSPQEPDSSSGIGKTGQQPAKKRLNFGQTGDSESVPDPQPLGEPPATPAAVGPTTMASGGGAPMADNNEGADGVGNASGNWHCDSTWLGDRVITTSTRTWALPTYNNHLYKQISSASTGASNDNHYFGYSTPWGYFDFNRFHCHFSPRDWQRLINNNWGFRPKRLNFKLFNIQVKEVTTNDGVTTIANNLTSTVQVFSDSEYQLPYVLGSAHQGCLPPFPADVFMIPQYGYLTLNNGSQAVGRSSFYCLEYFPSQMLRTGNNFTFSYTFEDVPFHSSYAHSQSLDRLMNPLIDQYLYYLNRTQNQSGSAQNKDLLFSRGSPAGMSVQPKNWLPGPCYRQQRVSKTKTDNNNSNFTWTGASKYNLNGRESIINPGTAMASHKDDKDKFFPMSGVMIFGKESAGASNTALDNVMITDEEEIKATNPVATERFGTVAVNLQNSSTDPATGDVHVMGALPGMVWQDRDVYLQGPIWAKIPHTDGHFHPSPLMGGFGLKHPPPQILIKNTPVPANPPAEFSATKFASFITQYSTGQVSVEIEWELQKENSKRWNPEVQYTSNYAKSANVDFTVDNNGLYTVPRPIGTRYLTRPL

SEQ ID NO: 1051 - protein, 736 aa, Artificial Sequence
  Description of Artificial Sequence: Synthetic polypeptide
MAADGYLPDWLEDNLSEGIREWWALKPGAPKPKANQQKQDDGRGLVLPGYKYLGPFNGLDKGEPVNAADAAALEHDKAYDQQLKAGDNPYLRYNHADAEFQERLQEDTSFGGNLGRAVFQAKKRLLEPLGLVEEGAKTAPGKKRPVEQSPQEPDSSSGIGKTGEQPAKKRLNFGQTGDSESVPDPQPLGEPPATPAAVGPTTMASGGGAPMADNNEGADGVGSASGNWHCDSTWLGDRVITTSTRTWALPTYNNHLYKQISSASTGASNDNHYFGYSTPWGYFDFNRFHCHFSPRDWQRLINNNWGFRPKRLNFKLFNIQVKEVTDNNGVKTIANNLTSTIQVFTDSEYQLPYVLGSAHQGCLPPFPADVFMIPQYGYLTLNNGSQAVGRSSFYCLEYFPSQMLRTGNNFPFSYTFEDVPFHSSYAHSQSLDRLMNPLIDQYLYYLSRTQTTGGTANTQTLGFSQGGPNTMANQAKNWLPGPCYRQQRVSTTTGQNNNSNFAWTAGTKYHLNGRNSLANPGIAMATHKDDKERFFPSNGILIFGKQNAARDNADYSDVMLTSEEEIKTTNPVATEEYGIVADNLQQQNTAPQIGTVNSQGALPGMVWQNRDVYLQGPIWAKIPHTDGNFHPSPLMGGFGLKHPPPQILIKNTPVPADPPTTFNQSKLNSFITQYSTGQVSVEIEWELQKENSKRWNPEIQYTSNYYKSTSVDFAVNTEGVYSEPHPIGTRYLTRPL

SEQ ID NO: 1052 - protein, 736 aa, Artificial Sequence
  Description of Artificial Sequence: Synthetic polypeptide
MAADGYLPDWLEDNLSEGIREWWALKPGAPKPKANQQKQDDGRGLVLPGYKYLGPFNGLDKGEPVNAADAAALEHDKAYDQQLKAGDNPYLRYNHADAEFQERLQEDTSFGGNLGRAVFQAKKRVLEPLGLVEEGAKTAPGKKRPVEQSPQEPDSSSGIGKTGQQPAKKRLNFGQTGDSESVPDPQPLGEPPATPAAVGPTTMASGGGAPMADNNEGADGVGSSSGNWHCDSQWLGDRVITTSTRTWALPTYNNHLYKQISSASTGASNDNHYFGYSTPWGYFDFNRFHCHFSPRDWQRLINNNWGFRPKRLNFKLFNIQVKEVTDNNGVKTIANNLTSTVQVFTDSEYQLPYVLGSAHQDCLPPFPADVFMIPQYGYLTLNNGSQAVGRSSFYCLEYFPSQMLRTGNNFTFSYTFEDVPFHSSYAHSQSLDRLMNPLIDQYLYYLSRTQTTGGTANTQTLGFSQGGPNTMANQAKNWLPGPCYRQQRVSTTTGQNNNSNFAWTAGTKYHLNGRNSLANPGIAMATHKDDKERFFPSNGILIFGKQNAARDNADYSDVMLTSEEEIKTTNPVATEEYGIVADNLQQQNTAPQIGTVNSQGALPGMVWQNRDVYLQGPIWAKIPHTDGNFHPSPLMGGFGLKHPPPQILIKNTPVPADPPTTFNQSKLNSFITQYSTGQVSVEIEWELQKENSKRWNPEIQYTSNYYKSTSVDFAVNTEGVYSEPHPIGTRYLTRPL

SEQ ID NO: 1053 - protein, 735 aa, Artificial Sequence
  Description of Artificial Sequence: Synthetic polypeptide
MAADGYLPDWLEDNLSEGIREWWDLKPGAPKPKANQQKQDDGRGLVLPGYKYLGPFNGLDKGEPVNAADAAALEHDKAYDQQLKAGDNPYLRYNHADAEFQERLQEDTSFGGNLGRAVFQAKKRVLEPLGLVEEGAKTAPGKKRPVEQSPQEPDSSSGIGKTGQQPAKKRLNFGQTGDSESVPDPQPLGEPPATPAAVGPTTMASGGGAPMADNNEGADGVGNASGNWHCDSTWLGDVITTSTRTWALPTYNNHLYKQISSASTGASNDNHYFGYSTPWGYFDFNRFHCHFSPRDWQRLINNNWGFRPKRLNFKLFNIQVKEVTQNEGTKTIANNLTSTIQVFTDSEYQLPYVLGSAHQGCLPPFPADVFMIPQYGYLTLNNGSQAVGRSSFYCLEYFPSQMLRTGNNFQFTYTFEDVPFHSSYAHSQSLDRLMNPLIDQYLYYLSRTQTTGGTANTQTLGFSQGGPNTMANQAKNWLPGPCYRQQRVSTTTGQNNNSNFAWTAGTKYHLNGRNSLANPGIAMATHKDDKERFFPSNGILIFGKQNAARDNADYSDVILTSEEEIKTTNPVATEEYGIVADNLQQQNTAPQIGTVNSQGALPGMVWQNRDVYLQGPIWAKIPHTDGNFHPSPLMGGFGLKHPPPQILIKNTPVPADPPTTFNQSKLNSFITQYSTGQVSVEIEWELQKENSKRWNPEIQYTSNYYKSTSVDFAVNTEGVYSEPHPIGTRYLTRPL

SEQ ID NO: 1054 - protein, 736 aa, Artificial Sequence
  Description of Artificial Sequence: Synthetic polypeptide
MAADGYLPDWLEDTLSEGIRQWWKLKPGPPPPKPAERHKDDSRGLVLPGYKYLGPFNGLDKGEPVNEADAAALEHDKAYDRQLDSGDNPYLKYNHADAEFQERLKEDTSFGGNLGRAVFQAKKRVLEPFGLVEEGAKTAPGKKRPVEQSPQEPDSSSGIGKTGQQPAKKRLNFGQTGDSESVPDPQPLGEPPATPAAVGPTTMASGGGAPMADNNEGADGVGNASGNWHCDSTWLGDRVITTSTRTWALPTYNNHLYKQISSTSTGASNDNHYFGYSTPWGYFDFNRFHCHFSPRDWQRLINNNWGFRPKRLNFKLFNIQVKEVTDNNGVKTIANNLTSTVQVFTDSEYQLPYVLGSAHQGCLPPFPADVFMIPQYGYLTLNNGSQAVGRSSFYCLEYFPSQMLRTGNNFTFSYTFEDVPFHSSYAHSQSLDRLMNPLIDQYLYYLSRTQTTGGTANTQTLGFSQGGPNTMANQAKNWLPGPCYRQQRVSTTTGQNNNSNFAWTAGTKYHLNGRNSLANPGIAMATHKDDKERFFPSNGILIFGKQNAARDNADYSDVMLTSEEEIKTTNPVATEEYGIVADNLQQQNTAPQIGTVNSQGALPGMVWQNRDVYLQGPIWAKIPHTDGNFHPSPLMGGFGLKHPPPQILIKNTPVPADPPTTFNQSKLNSFITQYSTGQVSVEIEWELQKENSKRWNPEIQYTSNYYKSTSVDFAVNTEGVYSEPHPIGTRYLTRPL

SEQ ID NO: 1055 - protein, 735 aa, Artificial Sequence
  Description of Artificial Sequence: Synthetic polypeptide
MAADGYLPDWLEDNLSEGIREWWDLKPGAPKPKANQQKQDDGRGLVLPGYKYLGPFNGLDKGEPVNAADAAALEHDKAYDRQLDSGDNPYLRYNHADAEFQERLKEDTSFGGNLGRAVFQAKKRVLEPFGLVEEGAKTAPGKKRPVEQSPQEPDSSSGIGKTGQQPAKKRLNFGQTGDSESVPDPQPLGEPPATPAAVGPTTMASGGGAPMADNNEGADGVGNASGNWHCDSTWLGDRVITTSTRTWALPTYNNHLYKQISSASTGASNDNHYFGYSTPWGYFDFNRFHCHFSPRDWQRLINNNWGFRPKRLNFKLFNIQVKEVTQNEGTKTIANNLTSTIQVFTDSEYQLPYVLGSAHQGCLPPFPADVFMIPQYGYLTLNNGSQAVGRSSFYCLEYFPSQMLRTGNNFQFTYTFEDVPFHSSYAHSQSLDRLMNPLIDQYLYYLSRTQTTGGTANTQTLGFSQGGPNTMANQAKNWLPGPCYRQQRVSTTTGQNNNSNFAWTAGTKYHLNGRNSLANPGIAMATHKDDRSVFFQYRDPDFGKQNAARDNADYSDVMLTSEEEIKTTNPVATEEYGIVADNLQQQNTAPQIGTVNSQGALPGMVWQNRDVYLQGPIWAKIPHTDGNFHPSPLMGGFGLKHPPPQILIKNTPVPADPPTTFNQSKLNSFITQYSTGQVSVEIEWELQKENSKRWNPEIQYTSNYYKSTSVDFAVNTEGVYSEPHPIGTRYLTRPL

SEQ ID NO: 1056 - protein, 736 aa, Artificial Sequence
  Description of Artificial Sequence: Synthetic polypeptide
MAADGYLPDWLEDNLSEGIREWWALKPGAPKPKANQQKQDDGRGLVLPGYKYLGPFNGLDKGEPVNAADAAALEHDKAYDQQLKAGDNPYLKYNHADAEFQERLQGDTSFGGNLGRAVFQAKKRVLEPLGLVEEAAKTAPGKKRPVEQSPQEPDSSAGIGKSGAQPAKKRLNFGQTGDTESVPDPQPLGEPPAAPSGVGPNTMAAGGGAPMADNNEGADGVGSSSGNWHCDSQWLGDRVITTSTRTWALPTYNNHLYKQISSASTGASNDNHYFGYSTPWGYFDFNRFHCHFSPRDWQRLINNNWGFRPKRLNFKLFNIQVKEVTDNNGVKTIANNLTSTVQVFTDSDYQLPYVLGSAHEGCLPPFPADVFMIPQYGYLTLNNGSQAVGRSSFYCLEYFPSQMLRTGNNFQFTYTFEDVPFHSSYAHSQSLDRLMNPLIDQYLYYLSRTQTTGGTANTQTLGFSQGGPNTMANQAKNWLPGPCYRQQRVSTTTGQNNNSNFAWTAGTKYHLNGRNSLANPGIAMATHKDDKERFFPSNGILIFGKQNAARDNADYSDVMLTSEEEIKTTNPVATEEYGIVADNLQQQNTAPQIGTVNSQGALPGMVWQNRDVYLQGPIWAKIPHTDGNFHPSPLMGGFGLKHPPPQILIKNTPVPADPPTTFNQSKLNSFITQYSTGQVSVEIEWELQKENSKRWNPEIQYTSNYYKSTSVDFAVNTEGVYSEPHPIGTRYLTRPL

SEQ ID NO: 1057 - protein, 736 aa, Artificial Sequence
  Description of Artificial Sequence: Synthetic polypeptide
MAADGYLPDWLEDTLSEGIRQWWKLKPGPPPPKPAERHKDDSRGLVLPGYKYLGPFNGLDKGEPVNEADAAALEHDKAYDRQLDSGDNPYLKYNHADAEFQERLKEDTSFGGNLGRAVFQAKKRVLEPFGLVEEAAKTAPGKKRPVEQSPQEPDSSSGIGKTGQQPAKKRLNFGQTGDSESVPDPQPLGEPPATPAAVGPTTMASGGGAPMADNNEGADGVGNASGNWHCDSTWLGDRVITTSTRTWALPTYNNHLYKQISSASTGASNDNHYFGYSTPWGYFDFNRFHCHFSPRDWQRLINNNWGFRPKRLNFKLFNIQVKEVTDNNGVKTIANNLTSTVQVFTDSDYQLPYVLGSAHEGCLPPFPADVFMIPQYGYLTLNNGSQAVGRSSFYCLEYFPSQMLRTGNNFTFSYTFEDVPFHSSYAHSQSLDRLMNPLIDQYLYYLSRTQTTGGTANTQTLGFSQGGPNTMANQAKNWLPGPCYRQQRVSTTTGQNNNSNFAWTAGTKYHLNGRNSLANPGIAMATHKDDKERFFPSNGILIFGKQNAARDNADYSDVMLTSEEEIKTTNPVATEEYGIVADNLQQQNTAPQIGTVNSQGALPGMVWQNRDVYLQGPIWAKIPHTDGNFHPSPLMGGFGLKHPPPQILIKNTPVPADPPTTFNQSKLNSFITQYSTGQVSVEIEWELQKENSKRWNPEIQYTSNYYKSTSVDFAVNTEGVYSEPHPIGTRYLTRPL

SEQ ID NO: 1058 - protein, 736 aa, Artificial Sequence
  Description of Artificial Sequence: Synthetic polypeptide
MAADGYLPDWLEDNLSEGIREWWALKPGAPKPKANQQKQDDGRGLVLPGYKYLGPFNGLDKGEPVNAADAAALEHDKAYDQQLKAGDNPYLRYNHADAEFQERLQEDTSFGGNLGRAVFQAKKRVLEPLGLVEEGAKTAPGKKRPVEQSPQEPDSSSGIGKTGQQPAKKRLNFGQTGDSESVPDPQPLGEPPATPAAVGPTTMASGGGAPMADNNEGADGVGSSSGNWHCDSTWLGDRVITTSTRTWALPTYNNHLYKQISSASTGASNDNHYFGYSTPWGYFDFNRFHCHFSPRDWQRLINNNWGFRPKRLNFKLFNIQVKEVTDNNGVKTIANNLTSTVQVFTDSEYQLPYVLGSAHQGCLPPFPADVFMIPQYGYLTLNNGSQAVGRSSFYCLEYFPSQMLRTGNNFTFSYTFEDVPFHSSYAHSQSLDRLMNPLIDQYLYYLSRTQTTGGTANTQTLGFSQGGPNTMANQAKNWLPGPCYRQQRVSTTTGQNNNSNFAWTAGTKYHLNGRNSLANPGIAMATHKDDKERFFPSNGILIFGKQNAARDNADYSDVMLTSEEEIKTTNPVATEEYGIVADNLQQQNTAPQIGTVNSQGALPGMVWQNRDVYLQGPIWAKIPHTDGNFHPSPLMGGFGLKHPPPQILIKNTPVPADPPTTFNQSKLNSFITQYSTGQVSVEIEWELQKENSKRWNPEIQYTSNYYKSTSVDFAVNTEGVYSEPHPIGTRYLTRPL

SEQ ID NO: 1059 - protein, 737 aa, Artificial Sequence
  Description of Artificial Sequence: Synthetic polypeptide
MAADGYLPDWLEDNLSEGIREWWALKPGAPKPKANQQKQDDGRGLVLPGYKYLGPFNGLDKGEPVNAADAAALEHDKAYDQQLKAGDNPYLRYNHADAEFQERLQEDTSFGGNLGRAVFQAKKRVLEPLGLVEEGAKTAPGKKRPVEQSPQEPDSSSGIGKTGQQPAKKRLNFGQTGDTESVPDPQPIGEPPAAPSGVGSLTMASGGGAPVADNNEGADGVGSSSGNWHCDSQWLGDRVITTSTRTWALPTYNNHLYKQISNSTSGGSSNDNAYFGYSTPWGYFDFNRFHCHFSPRDWQRLINNNWGFRPKRLNFKLFNIQVKEVTQNEGTKTIANNLTSTIQVFTDSEYQLPYVLGSAHQGCLPPFPADVFMIPQYGYLTLNNGSQAVGRSSFYCLEYFPSQMLRTGNNFQFTYTFEDVPFHSSYAHSQSLDRLMNPLIDQYLYYLSRTQTTGGTANTQTLGFSQGGPNTMANQAKNWLPGPCYRQQRVSTTTGQNNNSNFAWTAGTKYHLNGRNSLANPGIAMATHKDDKERFFPSNGILIFGKQNAARDNADYSDVMLTSEEEIKTTNPVATEEYGIVADNLQQQNTAPQIGTVNSQGALPGMVWQNRDVYLQGPIWAKIPHTDGNFHPSPLMGGFGLKHPPPQILIKNTPVPADPPTTFNQSKLNSFITQYSTGQVSVEIEWELQKENSKRWNPEIQYTSNYYKSTSVDFAVNTEGVYSEPHPIGTRYLTRPL

SEQ ID NO: 1060 - protein, 736 aa, Artificial Sequence
  Description of Artificial Sequence: Synthetic polypeptide
MAADGYLPDWLEDNLSEGIREWWALKPGAPKPKANQQKQDDGRGLVLPGYKYLGPFNGLDKGEPVNAADAAALEHDKAYDQQLKAGDNPYLKYNHADAEFQERLQGDTSFGGNLGRAVFQAKKRVLEPLGLVEEAAKTAPGKKRPVEQSPQEPDSSAGIGKSGAQPAKKRLNFGQTGDTESVPDPQPLGEPPAAPSGVGPNTMAAGGGAPMADNNEGADGVGSSSGNWHCDSQWLGDRVITTSTRTWALPTYNNHLYKQISSASTGASNDNHYFGYSTPWGYFDFNRFHCHFSPRDWQRLINNNWGFRPKRLNFKLFNIQVKEVTDNNGVKTIANNLTSTVQVFTDSEYQLPYVLGSAHQGCLPPFPADVFMIPQYGYLTLNNGSQAVGRSSFYCLEYFPSQMLRTGNNFTFSYTFEDVPFHSSYAHSQSLDRLMNPLIDQYLYYLSRTQTTGGTANTQTLGFSQGGPNTMANQAKNWLPGPCYRQQRVSTTTGQNNNSNFAWTAGTKYHLNGRNSLANPGIAMATHKDDKERFFPSNGILIFDKQNAARDNADYSDVMLTSEEEIKTTNPVATEEYGIVADNLQQQNTAPQIGTVNSQGALPGMVWQNRDVYLQGPIWAKIPHTDGNFHPSPLMGGFGLKHPPPQILIKNTPVPADPPTTFNQSKLNSFITQYSTGQVSVEIEWELQKENSKRWNPEIQYTSNYYKSTSVDFAVNTEGVYSEPHPIGTRYLTRPL

SEQ ID NO: 1061 - protein, 736 aa, Artificial Sequence
  Description of Artificial Sequence: Synthetic polypeptide
MAADGYLPDWLEDTLSEGIRQWWKLKPGPPPPKPAERHKDDSRGLVLPGYKYLGPFNGLDKGEPVNEADAAALEHDKAYDRQLDSGDNPYLKYNHADAEFQERLKEDTSFGGNLGRAVFQAKKRVLEPLGLVEEPVKTAPGKKRPVEHSPVEPDSSSGTGKAGQQPARKRLNFGQTGDSESVPDPQPLGEPPATPAAVGPNTMATGSGAPMADNNEGADGVGNSSGNWHCDSTWMGDRVITTSTRTWALPTYNNHLYKQISSASTGASNDNHYFGYSTPWGYFDFNRFHCHFSPRDWQRLINNNWGFRPKRLNFKLFNIQVKEVTDNNGVKTIANNLTSTIQVFTDSEYQLPYVLGSAHQGCLPPFPADVFMIPQYGYLTLNNGSQAVGRSSFYCLEYFPSQMLRTGNNFTFSYTFEDVPFHSSYAHSQSLDRLMNPLIDQYLYYLSRTQTTGGKANTQTLGFSQGGPNTMANQAKNWLPGPCYRQQRVSTTTGQNNNSNFAWTAGTKYHLNGRNSLANPGIAMATHKDDKERFFPSNGILIFGKQNAARDNADYSDVMLTSEEEIKTTNPVATEEYGIVADNLQQQNTAPQIGTVNSQGALPGMVWQNRDVYLQGPIWAKIPHTDGNFHPSPLMGGFGLKHPPPQILIKNTPVPADPPTTFNQSKLNSFITQYSTGQVSVEIEWELQKENSKRWNPEIQYTSNYYKSTSVDFAVNTEGVYSEPHPIGTRYLTRPL

SEQ ID NO: 1062 - protein, 736 aa, Artificial Sequence
  Description of Artificial Sequence: Synthetic polypeptide
MAADGYLPDWLEDNLSEGIREWWALKPGAPKPKANQQKQDDGRGLVLPGYKYLGPFNGLDKGEPVNAADAAALEHDKAYDQQLKAGDNPYLRYNHADAEFQERLQEDTSFGGNLGRAVFQAKKRVLEPFGLVEEGAKTAPGKKRPVEQSPQEPDSSSGIGKTGQQPAKKRLNFGQTGDSESVPDPQPLGEPPATPAAVGPTTMASGGGAPMADNNEGADGVGNASGNWHCDSTWLGDRVITTSTRTWALPTYNNHLYKQISSASTGASNDNHYFGYSTPWGYFDFNRFHCHFSPRDWQRLINNNWGFRPKRLNFKLFNIQVKEVTDNNGVKTIANNLTSTVQVFTDSEYQLPYVLGSAHQGCLPPFPADVFMIPQYGYLTLNNGSQAVGRSSFYCLEYFPSQMLRTGNNFTFSYTFEDVPFHSSYAHSQSLDRLMNPLIDQYLYYLSRTQTTGGTGNTQTLGFSQGGPNTMANQAKNWLPGPCYRQQRVSTTTGQNNNSNFAWTAGTKYHLNGRNSLANPGIAMATHKDDKERFFPSNGILIFGKQNAARDNADYSDVMLTSEEEIKTTNPVATEEYGIVADNLQQQNTAPQIGTVNSQGALPGMVWQNRDVYLQGPIWAKIPHTDGNFHPSPLMGGFGLKHPPPQILIKNTPVPADPPTTFNQSKLNSFITQYSTGQVSVEIEWELQKENSKRWNPEIQYTSNYYKSTSVDFAVNTEGVYSEPHPIGTRYLTRPL

SEQ ID NO: 1063 - protein, 736 aa, Artificial Sequence
  Description of Artificial Sequence: Synthetic polypeptide
MAADGYLPDWLEDNLSEGIREWWDLKPGAPKPKANQQKQDDGRGLVLPGYKYLGPFNGLDKGEPVNAADAAALEHDKAYDQQLKAGDNPYLRYNHADAEFQERLQEDTSFGGNLGRAVFQAKKRVLEPLGLVEEGAKTAPGKKRPVEQSPQEPDSSSGIGKTGQQPAKKRLNFGQTGDSESVPDPQPLGEPPATPAAVGPTTMASGGGAPMADNNEGADGVGSSSGNWHCDSTWLGDRVITTSTRTWALPTYNNHLYKQISSASTGASNDNHYFGYSTPWGYFDFNRFHCHFSPRDWQRLINNNWGFRPKRLNFKLFNIQVKEVTQNEGTKTIANNLTSTIQVFTDSEYQLPYVLGSAHQGCLPPFPADVFMIPQYGYLTLNNGSQAVGRSSFYCLEYFPSQMLRTGNNFTFSYTFEDVPFHSSYAHSQSLDRLMNPLIDQYLYYLSRTQTTGGTANTQTLGFSQGGPNTMANQAKNWLPGPCYRQQRVSTTTGQNNNSNFAWTAGTKYHLNGRNSLANPGIAMATHKDDKERFFPSNGILIFGKQNAARDNADYSDVMLTSEEEIKTTNPVATEEYGIVADNLQQQNTAPQIGTVNSQGALPGMVWQNRDVYLQGPIWAKIPHTDGNFHPSPLMGGFGLKHPPPQILIKNTPVPADPPTTFNQSKLNSFITQYSTGQVSVEIEWELQKENSKRWNPEIQYTSNYYKSTSVDFAVNTEGVYSEPHPIGTRYLTRPL

SEQ ID NO: 1064 - protein, 736 aa, Artificial Sequence
  Description of Artificial Sequence: Synthetic polypeptide
MAADGYLPDWLEDNLSEGIREWWALKPGAPKPKANQQKQDDGRGLVLPGYKYLGPFNGLDKGEPVNAADAAALEHDKAYDQQLKAGDNPYLRYNHADAEFQERLQEDTSFGGNLGRAVFQAKKRVLEPLGLVEEGAKTAPGKKRPVEQSPQEPDSSSGIGKTGQQPAKKRLNFGQTGDSESVPDPQPLGEPPATPAAVGPTTMAAGGGAPMADNNEGADGVGSSSGNWHCDSTWMGDRVITTSTRTWALPTYNNHLYKQISSASTGASNDNHYFGYSTPWGYFDFNRFHCHFSPRDWQRLINNNWGFRPKRLSFKLFNIQVKEVTQNEGTKTIANNLTSTIQVFTDSEYQLPYVLGSAHQGCLPPFPADVFMIPQYGYLTLNNGSQAVGRSSFYCLEYFPSQMLRTGNNFTFSYTFEDVPFHSSYAHSQSLDRLMNPLIDQYLYYLSRTQTTGGTANTQTLGFSQGGPNTMANQAKNWLQGPCYRQQRVSTTTGQNNNSNFAWTAGTKYHLNGRNSLANPGIAMATHKDDKERFFPSNGILIFGKQNAARDNADYSDVMLTSEEEIKTTNPVATEEYGIVADNLQQQNTAPQIGTVNSQGALPGMVWQNLDVYLQGPIWAKIPHTDGNFHPSPLMGGFGLKHPPPQILIKNTPVPADPPTTFNQSKLNSFITQYSTGQVSVEIEWELQKENSKRWNPEIQYTSNYYKSTSVDFAVNTEGVYSEPHPIGTRYLTRPL

SEQ ID NO: 1065 - protein, 737 aa, Artificial Sequence
  Description of Artificial Sequence: Synthetic polypeptide
MAADGYLPDWLEDNLSEGIREWWALKPGAPKPKANQQKQDDGRGLVLPGYKYLGPFNGLDKGEPVNAADAAALEHDKAYDQQLKAGDNPYLRYNHADAEFQERLQEDTSFGGNLGRAVFQAKKRVLEPLGLVEEGAKTAPGKKRPVEPSPQRSPDSSSGIGKTGQQPAKKRLNFGQTGDSESVPDPQPLGEPPATPAAVGPTTMASGGGAPMADNNEGADGVGNASGNWHCDSQWLGDRVITTSTRTWALPTYNNHLYKQISSASTGASNDNHYFGYSTPWGYFDFNRFHCHFSPRDWQRLINNNWGFRPKRLNFKLFNIQVKEVTDNNGVKTIANNLTSTVQVFTDSDYQLPYVLGSAHEGCLPPFPADVFMIPQYGYLTLNNGSQAVGRSSFYCLEYFPSQMLRTGNNFQFTYTFEDVPFHSSYAHSQSLDRLMNPLIDQYLYYLSRTQTTGGTANTQTLGFSQGGPNTMANQAKNWVPGPCYRQQRVSTATGQNNNSNFAWTAGTKYHLKGRNSLANPGIAMATHKDDKERFFPSNGILIFGKQNAARDNADYSDVMLTSEEEIKTTNPVATEEYGIVADNLQQQNTAPQIGTVNSQGALPGMVWQNRDVYLQGPIWAKIPHTDGNFHPSPLMGGFGLKHPPPQILIKNTPVPADPPTTFNQSKLNSFITQYSTGQVSVEIEWELQKENSKRWNPEIQYTSNYYKSTSVDFAVNTEGVYSEPHPIGTRYLTRPL

SEQ ID NO: 1066 - protein, 737 aa, Artificial Sequence
  Description of Artificial Sequence: Synthetic polypeptide
  MOD_RES (226)..(226): Any naturally occurring amino acid
  MOD_RES (233)..(233): Any naturally occurring amino acid
  MOD_RES (239)..(239): Any naturally occurring amino acid
  MOD_RES (250)..(250): Any naturally occurring amino acid
  MOD_RES (253)..(253): Any naturally occurring amino acid
  MOD_RES (255)..(255): Any naturally occurring amino acid
MAADGYLPDWLEDTLSEGIRQWWKLKPGPPPPKPAERHKDDSRGLVLPGYKYLGPFNGLDKGEPVNEADAAALEHDKAYDRQLDSGDNPYLKYNHADAEFQERLKEDTSFGGNLGRAVFQAKKRVLEPLGLVEEGAKTAPGKKRPVEQSPQEPDSSSGIGKTGQQPAKKRLNFGQTGDSESVPDPQPLGEPPATPSGVGPNTMAAGGGAPMADNNEGADGVGSSSXNWHCDSXWLGDRXITTSTRTWALXTYXNXLYKQISNSTSGGATNDNTYFGYSTPWGYFDFNRFHCHFSPRDWQRLINNNWGFRPKRLNFKLFNIQVKEVTQNEGTKTIANNLTSTIQVFTDSEYQLPYVLGSAHQGCLPPFPADVFMIPQYGYLTLNNGSQAVGRSSFYCLEYFPSQMLRTGNNFQFTYTFEDVPFHSSYAHSQSLDRLMNPLIDQYLYYLSRTQTTGGTANTQTLGFSQGGPNTMANQAKNWLPGPCYRQQRVSTTTGQNNNSNFAWTAGTKYHLNGRNSLANPGIAMATHKDDKERFFPSNGILIFGKQNAARDNADYSDVMLTSEEEIKTTNPVATEEYGIVADNLQQQNTAPQIGTVNSQGALPGMVWQNRDVYLQGPIWAKIPHTDGNFHPSPLMGGFGLKHPPPQILIKNTPVPADPPTTFSQAKLASFITQYSTGQVSVEIEWELQKENSKRWNPEVQYTSNYAKSANVDFTVDNNGLYTEPRPIGTRYLTRPL

SEQ ID NO: 1067 - protein, 737 aa, Artificial Sequence
  Description of Artificial Sequence: Synthetic polypeptide
MAADGYLPDWLEDNLSEGIREWWDLKPGAPKPKANQQKQDDGRGLVLPGYKYLGPFNGLDKGEPVNAADAAALEHDKAYDQQLKAGDNPYLRYNHADAEFQERLQEDTSFGGNLGRAVFQAKKRVLEPLGLVEEGAKTAPGKKRPVEPSPQRSPDSSTGIGKKGQQPAKKRLNFGQTGDSESVPDPQPIGEPPAGPSGVGSLTMASGGGAPVADNNEGADGVGSSSGNWHCDSQWLGDRVITTSTRTWALPTYNNHLYKQISSASTGASNDNHYFGYSTPWGYFDFNRFHCHFSPRDWQRLINNNWGFRPKRLNFKLFNIQVKEVTDNDGVKTIANNLTSTIQVFTDSEYQLPYVLGSAHQGCLPPFPADVFMIPQYGYLTLNNGSQAVGRSSFYCLEYFPSQMLRTGNNFTFSYTFEDVPFHSSYAHSQSLDRLMNPLIDQYLYYLSRTQTTGGTANTQTLGFSQGGPNTMANHAKNWLPGPCYRQQRVSTTTGQNNNSNFAWTAGTKYHLNGRNSLANPGIAMATHKDDKERFFPSNGILIFGKQNAARDNADYSDVMLTSEEEIKTTNPVATEEYGIVADNLQQQNTAPQIGTVNSQGALPGMVWQNRDVYLQGPIWAKIPHTDGNFHPSPLMGGFGLKHPPPQILIKNTPVPADPPTTFNQSKLNSFITQYSTGQVSVEIEWELQKENSKRWNPEIQYTSNYYKSTSVDFAVNTEGVYSEPHPIGTRYLTRPL

SEQ ID NO: 1068 - protein, 736 aa, Artificial Sequence
  Description of Artificial Sequence: Synthetic polypeptide
MAADGYLPDWLEDTLSEGIRQWWKLKPGPPPPKPAERHKDDSRGLVLPGYKYLGPFNGLDKGEPVNEADAAALEHDKAYDRQLDSGDNPYLKYNHADAEFQERLKEDTSFGGNLGRAVFQAKKRVLEPLGLVEEPVKTAPGKKRPVEHSPVEPDSSSGTGKAGQQPAKKRLNFGQTGDSESVPDPQPLGEPPATPAAVGPTTMASGGGAPMADNNEGADGVGNASGNWHCDSTWLGDRVITTSTRTWALPTYNNHLYKQISSASTGASNDNHYFGYSTPWGYFDFNRFHCHFSPRDWQRLINNNWGFRPKRLNFKLFNIQVKEVTQNEGTKTIANNLTSTIQVFTDSEYQLPYVLGSAHQGCLPPFPADVFMIPQYGYLTLNNGSQAVGRSSFYCLEYFPSQMLRTGNNFQFTYTFEDVPFHSSYAHSQSLDRLMNPLIDQYLYYLSRTQTTGGTANTQTLGFSQGGPNTMANQAKNWLPGPCYRQQRVSTTTGQNNNSNFAWTAGTKYHLNGRNSLANPGIAMATHKDDKERFFPSNGILIFGKQNAARDNADYSDVMLTSEEEIKTTNPVATEEYGIVADNLQQQNTAPQIGTVNSQGALPGMVWQNRDVYLQGPIWAKIPHTDGNFHPSPLMGGFGLKHPPPQILIKNTPVPADPPTTFNQSKLNSFITQYSTGQVSVEIEWELQKENSKRWNPEIQYTSNYYKSTSVDFAVNTEGVYSEPHPIGTRYLTRPL

SEQ ID NO: 1069 - protein, 736 aa, Artificial Sequence
  Description of Artificial Sequence: Synthetic polypeptide
MAADGYLPDWLEDNLSEGIREWWALKPGAPKPKANQQKQDDGRGLVLPGYKYLGPFNGLDKGEPVNAADAAALEHDKAYDQQLQAGDNPYLRYNHADAEFQERLQGDTSFGGNLGRAVFQAKKRVLEPLGLVEEGAKTAPGKKRPVEQSPQEPDSSSGIGKTGQQPAKKRLNFGQTGDSESVPDPQPLGEPPATPAAVGPTTMASGGGAPMADNNEGADGVGNASGNWHCDSTWLGDRVITTSTRTWALPTYNNHLYKQISSASTGASNDNHYFGYSTPWGYFDFNRFHCHFSPRDWQRLINNNWGFRPKRLNFKLFNIQVKEVTDNNGVKTIANNLTSTIQVFTDSEYQLPYVLGSAHQGCLPPFPADVFMIPQYGYLTLNNGSQAVGRSSFYCLEYFPSQMLRTGNNFQFTYTFEDVPFHSSYAHSQSLDRLMNPLIDQYLYYLSRTQTTGGTANTQTLGFSQGGPNTMANQAKNWLPGPCYRQQRVSTTTGQNNNSNFAWTAGTKYHLNGRNSLANPGIAMATHKDDKERFFPSNGILIFGKQNAARDNADYSDVMLTSEEEIKTTNPVATEEYGIVADNLQQQNTAPQIGTVNSQGALPGMVWQNRDVYLQGPIWAKIPHTDGNFHPSPLMGGFGLKHPPPQILIKNTPVPADPPTTFNQSKLNSFITQYSTGQVSVEIEWELQKENSKRWNPEIQYTSNYYKSTSVDFAVNTEGVYSEPHPIGTRYLTRPL

SEQ ID NO: 1070 - protein, 738 aa, Artificial Sequence
  Description of Artificial Sequence: Synthetic polypeptide
MAADGYLPDWLEDTLSEGIRQWWKLKPGPPPPKPAERHKDDSRGLVLPGYKYLGPFNGLDKGEPVNAADAAALEHDKAYDQQLKAGDNPYLRYNHADAEFQERLKEDTSFGGNLGRAVFQAKKRVLEPLGLVEEGAKTAPGKKRPVEPSPQRSPDSSTGIGKKGQQPARKRLNFGQTGDSESVPDPQPLGEPPAAPSGVGPNTMAAGGGAPMADNNEGADGVGSSSGNWHCDSQWLGDRVITTSTRTWALPTYNNHLYKQISNSTSGGSSNDNAYFGYSTPWGYFDFNRFHCHFSPRDWQRLINNNWGFRPKRLNFKLFNIQVKEVTDNNGVKTIANNLTSTVQVFTDSEYQLPYVLGSAHQGCLPPFPADVFMIPQYGYLTLNNGSQAVGRSSFYCLEYFPSQMLRTGNNFTFSYTFEDVPFHSSYAHSQSLDRLMNPLIDQYLYYLSRTQTTGGTANTQTLGFSQGGPNTMANQAKNWLPGPCYRQQRVSTTTGQNNNSNFAWTAGTKYHLNGRNSLANPGIAMATHKDDKERFFPSNGILIFGKQNAARDNADYSDVMLTSEEEIKTTNPVATEEYGIVADNLQQQNTAPQIGTVNSQGALPGMVWQNRDVYLQGPIWAKIPHTDGHFHPSPLMGGFGLKHPPPQILIKNTPVPANPPTTFNQSKLNSFITQYSTGQVSVEIEWELQKENSKRWNPEVQYTSNYAKSANVDFTVDNNGLYTEPRPIGTRYLTRPL

SEQ ID NO: 1071 - protein, 738 aa, Artificial Sequence; identical to SEQ ID NO: 1070
  Description of Artificial Sequence: Synthetic polypeptide

SEQ ID NO: 1072 - protein, 736 aa, Artificial Sequence
  Description of Artificial Sequence: Synthetic polypeptide
MAADGYLPDWLEDNLSEGIREWWALKPGAPKPKANQQKQDDGRGLVLPGYKYLGPFNGLDKGEPVNAADAAALEHDKAYDQQLKAGDNPYLRYNHADAEFQERLQEDTSFGGNLGRAVFQAKKRLLEPLGLVEEGAKTAPGKKRPVEQSPQEPDSSSGIGKTGQQPAKKRLNFGQTGDSESVPDPQPLGEPPATPAAVGPTTMASGGGAPMADNNEGADGVGNSSGNWHCDSTWMGDRVITTSTRTWALPTYNNHLYKQISSASTGASNDNHYFGYSTPWGYFDFNRFHCHFSPRDWQRLINNNWGFRPKRLNFKLFNIQVKEVTQNEGTKTIANNLTSTIQVFTDSEYQLPYVLGSAHQGCLPPFPADVFIIPQYGYLTLNNGSQAVGRSSFYCLEYFPSQMLRTGNNFTFSYTFEDVPFHSSYAHSQSLDRLMNPLIDQYLYYLSRTQTTGGTANTQTLGFSQGGPNTMANQAKNWLPGPCYRQQRVSTTTGQNNNSNFAWTAGTKYHLNGRNSLANPGIAMATHKDDKERFFPSNGILIFGKQNAARDNADYSDVMLTSEEEIKTTNPVATEEYGIVADNLQQQNTAPQIGTVNSQGALPGMVWQNRDVYLQGPIWAKIPHTDGNFHPSPLMGGFGLKHPPPQILIKNTPVPADPPTTFNQSKLNSFITQYSTGQVSVEIEWELQKENSKRWNPEIQYTSNYYKSTSVDFAVNTEGVYSEPHPIGTRYLTRPL

SEQ ID NO: 1073 - protein, 736 aa, Artificial Sequence
  Description of Artificial Sequence: Synthetic polypeptide
MAADGYLPDWLEDNLSEGIREWWALKPGAPKPKANQQKQDDGRGLVLPGYKYLGPFNGLDKGEPVNAADAAALEHDKAYDQQLKAGDNPYLRYNHADAEFQERLQEDTSFGGNLGRAVFQAKKRVLEPFGLVEEAAKTAPGKKRPVEQSPQEPDSSSGIGKTGQQPAKKRLNFGQTGDSESVPDPQPLGEPPATPAAVGPTTMASGGGAPMADNNEGADGVGNASGNWHCDSTWLGDRVITTSTRTWALPTYNNHLYKQISSASTGASNDNHYFGYSTPWGYFDFNRFHCHFSPRDWQRLINNNWGFRPKRLNFKLFNIQVKEVTQNEGTKTIANNLTSTIQVFTDSEYQLPYVLGSAHQGCLPPFPADVFMIPQYGYLTLNNGSQAVGRSSFYCLEYFPSQMLRTGNNFTFSYTFEDVPFHSSYAHSQSLDRLMNPLIDQYLYYLSRTQTTGGTANTQTLGFSQGGPNTMANHAKNWLPGPCYRQQRVSTTTGQNNNSNFAWTAGTKYHLNGRNSLANPGIAMATHKDDKERFFPSNGILIFGKQNAARDNADYSDVMLTSEEEIKTTNPVATEEYGIVADNLQQQNTAPQIGTVNSQGALPGMVWQNRDVYLQGPIWAKIPHTDGNFHPSPLMGGFGLKHPPPQILIKNTPVPADPPTTFNQSKLNSFITQYSTGQVSVEIEWELQKENSKRWNPEIQYTSNYYKSTSVDFAVNTEGVYSEPHPIGTRYLTRPL

SEQ ID NO: 1074 - protein, 736 aa, Artificial Sequence
  Description of Artificial Sequence: Synthetic polypeptide
MAADGYLPDWLEDNLSEGIREWWALKPGAPKPKANQQKQDDGRGLVLPGYKYLGPFNGLDKGEPVNEADAAALEHDKAYDQQLKAGDNPYLRYNHADAEFQERLQEDTSFGGNLGRAVFQAKKRLLEPLGLVEEAAKTAPGKKRPVEQSPQEPDSSAGIGKSGAQPAKKRLNFGQTGDSESVPDPQPLGEPPATPAAVGPTTMASGGGAPMADNNEGADGVGNASGNWHCDSTWLGDRVITTSTRTWALPTYNNHLYKQISSASTGASNDNHYFGYSTPWGYFDFNRFHCHFSPRDWQRLINNNWGFRPKRLNFKLFNIQVKEVTDNDGVKTIANNLTSTIQVFTDSEYQLPYVLGSAHQGCLPPFPADVFMIPQYGYLTLNNGSQAVGRSSFYCLEYFPSQMLRTGNNFQFTYTFEDVPFHSSYAHSQSLDRLMNPLIDQYLYYLSRTQTTGGTANTQTLGFSQGGPNTMANQAKNWLPGPCYRQQRVSTTTGQNNNSNFAWTAGTKYHLNGRNSLANPGIAMATHKDDKERFFPSNGILIFGKQNAARDNADYSDVMLTSEEEIKTTNPVATEEYGIVADNLQQQNTAPQIGTVNSQGALPGMVWQNRDVYLQGPIWAKIPHTDGNFHPSPLMGGFGLKHPPPQILIKNTPVPADPPTTFNQSKLNSFITQYSTGQVSVEIEWELQKENSKRWNPEIQYTSNYYKSTSVDFAVNTEGVYSEPHPIGTRYLTRPL

SEQ ID NO: 1075 - protein, 736 aa, Artificial Sequence
  Description of Artificial Sequence: Synthetic polypeptide
MAADGYLPDWLEDNLSEGIREWWALKPGAPKPKANQQKQDDGRGLVLPGYKYLGPFNGLDKGEPVNAADAAALEHDKAYDQQLKAGDNPYLRYNHADAEFQERLQEDTSFGGNLGRAVFQAKKRVLEPLGLVEEGAKTAPGKKRPVEQSPQEPDSSAGIGKTGAQPAKKRLNFGQTGDSESVPDPQPLGEPPATPAAVGPTTMASGGGAPMADNNEGADGVGSASGNWHCDSTWLGDRVITTSTRTWALPTYNNHLYKQISSASTGASNDNHYFGYSTPWGYFDFNRFHCHFSPRDWQRLINNNWGFRPKRLNFKLFNIQVKEVTDNNGVKTIANNLTSTIQVFTDSEYQLPYVLGSAHQGCLPPFPADVFMIPQYGYLTLNNGSQAVGRSSFYCLEYFPSQMLRTGNNFTFSYTFEDVPFHSSYAHSQSLDRLMNPLIDQYLYYLSRTQTTGGTANTQTLGFSQGGPNTMANQAKNWLPGPCYRQQRVSTTTGQNNNSNFAWTAGTKYHLNGRNSLANPGIAMATHKDDKERFFPSNGILIFGKQNAARDNADYSDVMLTSEEEIKTTNPVATEEYGIVADNLQQQNTAPQIGTVNSQGALPGMVWQNRDVYLQGPIWAKIPHTDGNFHPSPLMGGFGLKHPPPQILIKNTPVPADPPTTFNQSKLNSFITQYSTGQVSVEIEWELQKENSKRWNPEIQYTSNYYKSTSVDFAVNTEGVYSEPHPIGTRYLTRPL

SEQ ID NO: 1076 - protein, 736 aa, Artificial Sequence
  Description of Artificial Sequence: Synthetic polypeptide
MAADGYLPDWLEDNLSEGIREWWDLKPGAPKPKANQQKQDDGRGLVLPGYKYLGPFNGLDKGEPVNAADAAALEHDKAYDQQLKAGDNPYLRYNHADAEFQERLQEDTSFGGNLGRAVFQAKKRLLEPLGLVEEAAKTAPGKKRPVEQSPQEPDSSAGIGKSGAQPAKKRLNFGQTGDTESVPDPQPIGEPPAAPSGVGPNTMAAGGGAPMADNNEGADGVGSSSGNWHCDSQWLGDRVITTSTRTWALPTYNNHLYKQISSASTGASNDNHYFGYSTPWGYFDFNRFHCHFSPRDWQRLINNNWGFRPKRLNFKLFNIQVKEVTQNEGTKTIANNLTSTIQVFTDSEYQLPYVLGSAHQGCLPPFPADVFMIPQYGYLTLNNGSQAVGRSSFYCLEYFPSQMLRTGNNFQFTYTFEDVPFHSSYAHSQSLDRLMNPLIDQYLYYLSRTQTTGGTANTQTLGFSQGGPNTMANHAKNWLPGPCYRQQRVSTTTGQNNNSNFAWTAGTKYHLNGRNSLANPGIAMATHKDDKERFFPSNGILIFGKQNAARDNADYSDVMLTSEEEIKTTNPVATEEYGIVADNLQQQNTAPQIGTVNSQGALPGMVWQNRDVYLQGPIWAKIPHTDGNFHPSPLMGGFGLKHPPPQILIKNTPVPADPPTTFNQSKLNSFITQYSTGQVSVEIEWELQKENSKRWNPEIQYTSNYYKSTSVDFAVNTEGVYSEPHPIGTRYLTRPL

SEQ ID NO: 1077 - protein, 737 aa, Artificial Sequence; identical to SEQ ID NO: 1059
  Description of Artificial Sequence: Synthetic polypeptide

SEQ ID NO: 1078 - protein, 737 aa, Artificial Sequence
  Description of Artificial Sequence: Synthetic polypeptide
MAADGYLPDWLEDNLSEGIREWWALKPGAPKPKANQQKQDDGRGLVLPGYKYLGPFNGLDKGEPVNAADAAALEHDKAYDQQLKAGDNPYLRYNHADAEFQERLKEDTSFGGNLGRAVFQAKKRVLEPFGLVEEGAKTAPGKKRPVEQSPQEPDSSSGIGKTGQQPAKKRLNFGQTGDSESVPDPQPLGEPPAAPSGVGPNTMAAGGGAPMADNNEGADGVGSSSGNWHCDSQWLGNRVITTSTRTWALPTYNNHLYKQISNSTSGGSSNDNAYFGYSTPWGYFDFNRFHCHFSPRDWQRLINNNWGFRPKRLNFKLFNIQVKEVTDNNGVKTIANNLTSTVQVFTDSEYQLPYVLGSAHQGCLPPFPADVFMIPQYGYLTLNNGSQAVGRSSFYCLEYFPSQMLRTGNNFQFTYTFEDVPFHSSYAHSQSLDRLMNPLIDQYLYYLSRTQTTGGTANTQTLGFSQGGPNTMANQAKNWLPGPCYRQQRVSTTTGQNNNSNFAWTAGTKYHLNGRNSLANPGIAMATHKDDKERFFPSNGILIFGKQNAARDNADYSDVMLTSEEEIKTTNPVATEEYGIVADNLQQQNTAPQIGTVNSQGALPGMVWQNRDVYLQGPIWAKIPHTDGNFHPSPLMGGFGLKHPPPQILIKNTPVPADPPTTFNQSKLNSFITQYSTGQVSVEIEWELQKENSKRWNPEIQYTSNYYKSTSVDFAVNTEGVYSEPHPIGTRYLTRPL

SEQ ID NO: 1079 - protein, 736 aa, Artificial Sequence
  Description of Artificial Sequence: Synthetic polypeptide
MAADGYLPDWLEDNLSEGIREWWDLKPGAPKPKANQQKQDDGRGLVLPGYKYLGPFNGLDRGEPVNAADAAALEHDKAYDQQLKAGDNPYLRYNHADAEFQERLQEDTSFGGNLGRAVFQAKKRVLEPLGLVEEGAKTAPGKKRPVEQSPQEPDSSSGIGKTGQQPAKKRLNFGQTGDSESVPDPQPLGEPPATPAAVGPTTMASGGGAPMADNNEGADGVGNASGNWHCDSTWLGDRVITTSTRTWALPTYNNHLYKQISSASTGASNDNHYFGYSTPWGYFDFNRFHCHFSPRDWQRLINNNWGFRPKRLNFKLFNIQVKEVTDNNGVKTIANNLTSTIQVFTDSEYQLPYVLGSAHQGCLPPFPADVFMIPQYGYLTLNNGSQAVGRSSFYCLEYFPSQMLRTGNNFQFTYTFEDVPFHSSYAHSQSLDRLMNPLIDQYLYYLSRTQTTGGTANTQTLGFSQGGPNTMANQAKNWLPGPCYRQQRVSTTTGQNNNSNFAWTAGTKYHLNGRNSLANPGIAMATHKDDKERFFPSNGILIFGKQNAARDNADYSDVMLTSEEEIKTTNPVATEEYGIVADNLQQQNTAPQIGTVNSQGALPGMVWQNRDVYLQGPIWAKIPHTDGNFHPSPLMGGFGLKHPPPQILIKNTPVPADPPTTFNQSKLNSFITQYSTGQVSVEIEWELQKENSKRWNPEIQYTSNYYKSTSVDFAVNTEGVYSEPHPIGTRYLTRPL

SEQ ID NO: 1080 - protein, 736 aa, Artificial Sequence
  Description of Artificial Sequence: Synthetic polypeptide
MAADGYLPDWLEDNLSEGIREWWDLKPGAPKPKANQQKQDDGRGLVLPGYKYLGPFNGLDKGEPVNAADAAALEHDKAYDQQLKAGDNPYLRYNHADAEFQERLQEDTSFGGNLGRAVFQAKKRVLEPLGLVEEGAKTAPGKKRPVEQSPQEPDSSSGIGKKGQQPARKRLNFGQTGDSESVPDPQPLGEPPAAPSGVGSLTMASGGGAPMADNNEGADGVGNASGNWHCDSTWLGDRVITTSTRTWALPTYNNHLYKQISSASTGASNDNHYFGYSTPWGYFDFNRFHCHFSPRDWQRLINNNWGFRPKRLNFKLFNIQVKEVTQNEGTKTIANNLTSTVQVFTDSDYQLPYVLGSAHQGCLPPFPADVFMIPQYGYLTLNNGSQAVGRSSFYCLEYFPSQMLRTGNNFQFTYTFEDVPFHSSYAHSQSLDRLMNPLIDQYLYYLSRTQTTGGTANTQTLGFSQGGPNTMANQAKNWLPGPCYRQQRVSTTTGQNNNSNFAWTAGTKYHLNGRNSLSNPGIAMATHKDDKERFFPSNGILIFGKQNAARDNADYSDVMLTSEEEIKTTNPVATEEYGIVADNLQQQNTAPQIGTVNSQGALPGMVWQNRDMYLQGPIWAKIPHTDGNFHPSPLMGGFGLKHPPPQILIKNTPVPADPPTTFNQSKLNSFITQYSTGQVSVEIEWELQKENSKRWNPEIQYTSNYYKSTSVDFAVNTEGVYSEPHPIGTRYLTRPL

SEQ ID NO: 1081 - protein, 736 aa, Artificial Sequence
  Description of Artificial Sequence: Synthetic polypeptide
MAADGYLPDWLEDNLSEGIREWWALKPGAPKPKANQQKQDDGRGLVLPGYKYLGPFNGLDKGEPVNAADAAALEHDKAYDQQLKAGDNPYLRYNHADAEFQERLQEDTSFGGNLGRAVFQAKKRVLEPFGLVEEGAKTAPGKKRPVEQSPQEPDSSSGIGKTGQQPAKKRLNFGQTGGSESVPDPQPLGEPPATPAAVGPTTMAAGGGAPMADNNEGADGVGSSSGNWHCDSTWLGDRVITTSTRTWALPTYNNHLYKQISSASTGASNDNHYFGYSTPWGYFDFNRFHCHFSPRDWQRLINNNWGFRPKRLNFKLFNIQVKEVTDNNGVKTIANNLTSTVQVFTDSEYQLPYVLGSAHQGCLPPFPADVFMIPQYGYLTLNNGSQAVGRSSFYCLEYFPSQMLRTGNNFTFSYTFEEVPFHSSYAHSQSLDRLMNPLIDQYLYYLSRTQTTGGTANTQTLGFSQGGPNTMANQAKNWLPGPCYRQQRVSTTTGQNNNSNFAWTAGTKYHLNGRNSLANPGIAMASHKDDKERFFPSNGILIFGKQNAARDNADYSDVMLTSEEEIKTTNPVATEEYGIVADNLQQQNTAPQIGTVNSQGALPGMVWQNRDVYLQGPIWAKIPHTDGNFHPSPLMGGFGLKHPPPQILIKNTPVPADPPTTFNQSKLNSFITQYSTGQVSVEIEWELQKENSKRWNPEIQYTSNYYKSTSVDFAVNTEGVYSEPHPIGTRYLTRPL

SEQ ID NO: 1082 - DNA, 2211 bp, Artificial Sequence
  Description of Artificial Sequence: Synthetic polynucleotide
atggctgccgatggttatcttccagattggctcgaggacaacctctctgagggcattcgcgagtggtgggacttgaaacctgcatccccgaaacccaaagccaaccagcaaaagcaggacgacggccggggtctggtgcttcctggctacaagtacctcggacccttcaacggactcgacaagggggagcccgtcaacgcggcggacgcagcggccctcgagcacgacaaggcctacgaccagcagctcaaagcgggtgacaatccgtacctgcggtataaccacgccgacgccgagtttcaggagcgtctgcaagaagatacgtcttttgggggcaacctcgggcgagcagtcttccaggccaaaaagaggcttcttgaacctcttggtctggttgaggaagcggctaagacggctcctggaaagaagaggcctgtagagcagtctcctcaggaaccggactcctccgcgggtattggcaaatcgggtgcacagcccgccaaaaagagactcaatttcggtcagactggcggcacagagtcagttccagaccctcaacctctcggagaacctccagcagcgccctctggtgtgggacctaatacaatggctgcaggcggtggcgcaccaatggcagacaataacgaaggcgccgacggagtgggtagttcctcgggaaattggcattgcgattccacatggctgggcgacagagtcatcaccaccagcaccagaacctgggccctgcccacttacaacaaccatctctacaagcaaatctccagtgcttcaacgggggccagcaacgacaaccactacttcggctacagcaccccctgggggtattttgatttcaacagattccactgccacttctcaccacgtgactggcagcgactcatcaacaacaactggggattccggcccaagagactcagcttcaagctcttcaacatccaggtcaaggaggtcacgcagaatgaaggcaccaagaccatcgccaataacctcaccagcaccatccaggtgtttacggactcggagtaccagctgccgtacgttctcggctctgcccaccagggctgcctgcctccgttcccggcggacgtgttcatgattccccagtacggatacctaacactcaacaacggtagtcaggccgtgggacgctcctccttctactgcctggaatactttccttcgcagatgctgagaaccggcaacaacttccagtttacttacaccttcgaggacgtgcctttccacagcagctacgcccacagccagagcttggaccggctgatgaatcctctgattgaccagtacctgtactacttgtctcggactcaaacaacaggaggcacggcaaatacgcagactctgggcttcagccaaggtgggcctaatacaatggccaatcaggcaaagaactggctgccaggaccctgttaccgccaacaacgcgtctcaacgacaaccgggcaaaacaacaatagcaactttgcctggactgctgggaccaaataccatctgaatggaagaaattcattggctaatcctggcatcgctatggcaacacacaaagacgacaaggagcgtttttttcccagtaacgggatcctgatttttggcaaacaaaatgctgccagagacaatgcggattacagcgatgtcatgctcaccagcgaggaagaaatcaaaaccactaaccctgtggctacagaggaatacggtatcgtggcagataacttgcagcagcaaaacacggctcctcaaattggaactgtcaacagccagggggccttacccggtatggtctggcagaaccgggacgtgtacctgcagggtcccatctgggccaagattcctcacacggacggcaacttccacccgtctccgctgatgggcggctttggcctgaaacatcctccgcctcagatcctgatcaagaacacgcctgtacctgcggatcctccgaccaccttcaaccagtcaaagctgaactctttcatcacgcaatacagcaccggacaggtcagcgtggaaattgaatgggagctgcagaaggaaaacagcaagcgctggaaccccgagatccagtacacctccaactactacaaatctacaagtgtggactttgctgttaatacagaaggcgtgtactctgaaccccaccccattggcacccgttacctcacccgtcccctgtaa

SEQ ID NO: 1083 - DNA, 2211 bp, Artificial Sequence
  Description of Artificial Sequence: Synthetic polynucleotide
atggctgccgatggttatcttccagattggctcgaggacaacctctctgagggcattcgcgagtggtgggacttgaaacctggagccccgaaacccaaagccaaccagcaaaagcaggacgacggccggggtctggtgcttcctggctacaagtacctcggacccttcaacggactcgacaagggggagcccgtcaacgcggcggacgcagcggccctcgagcacgacaaggcctacgaccagcagctcaaagcgggtgacaatccgtacctgcggtataaccacgccgacgccgagtttcaggagcgtctgcaagaagatacgtcttttgggggcaacctcgggcgagcagtcttccaggccaagaagagggttctcgaaccttttggtctggttgaggaaggcgctaagacggctcctggaaagaaacgtccggtagagcagtcgccacaagagccagactcctcctcgggcattggcaagacaggccagcagcccgctaaaaagagactcaattttggtcagactggcgactcagagtcagtccccgacccacaacctctcggagaacctccagcaacccccgctgctgtgggacctactacaatggcttcaggtggtggcgcaccaatggcagacaataacgaaggcgccgacggagtgggtaatgcctcaggaaattggcattgcgattcccaatggctgggggacagagtcatcaccaccagcacccgaacctgggccctgcccacctacaacaatcacctctacaagcaaatctccagtgcttcaacgggggccagcaacgacaaccactacttcggctacagcaccccctgggggtattttgatttcaacagattccactgccatttctcaccacgtgactggcagcgactcatcaacaacaattggggattccggcccaagagactcaacttcaaactcttcaacatccaagtcaaggaggtcacgcagaatgaaggcaccaagaccatcgccaataacctcaccagcaccatccaggtgtttacggactcggagtaccagctgccgtacgttctcggctccgcccaccagggctgcctgcctccgttcccggcggacgtgttcatgattccccagtacggctacctaacactcaacaacggtagtcaggccgtgggacgctcctccttctactgcctggaatactttccttcgcagatgctgagaaccggcaacaacttccagtttacttacaccttcgaggacgtgcctttccacagcagctacgcccacagccagagcttggaccggctgatgaatcctctgattgaccagtacctgtactacttgtctcggactcaaacaacaggaggcacggcaaatacgcagactctgggcttcagccaaggtgggcctaatacaatggccaatcaggcaaagaactggctgccaggaccctgttaccgccaacaacgcgtctcaacgacaaccgggcaaaacaacaatagcaactttgcctggactgctgggaccaaataccatctgaatggaagaaattcattggctaatcctggcatcgctatggcaacacacaaagacgacaaggagcgtttttttcccagtaacgggatcctgatttttggcaaacaaaatgctgccagagacaatgcggattacagcgatgtcatgctcaccagcgaggaagaaatcaaaaccactaaccctgtggctacagaggaatacggtatcgtggcagataacttgcagcagcaaaacacggctcctcaaattggaactgtcaacagccagggggccttacccggtatggtctggcagaaccgggacgtgtacctgcagggtcccatctgggccaagattcctcacacggacggcaacttccacccgtctccgctgatgggcggctttggcctgaaacatcctccgcctcagatcctgatcaagaacacgcctgtacctgcggatcctccgaccaccttcaaccagtcaaagctgaactctttcatcacgcaatacagcaccggacaggtcagcgtggaaattgaatgggagctgcagaaggaaaacagcaagcgctggaaccccgagatccagtacacctccaactactacaaatctacaagtgtggactttgctgttaatacagaaggcgtgtactctgaaccccaccccattggcacccgttacctcacccgtcccctgtaa

SEQ ID NO: 1084 - DNA, 2211 bp, Artificial Sequence
  Description of Artificial Sequence: Synthetic polynucleotide
atggctgccgatggttatcttccagattggctcgaggacaacctctctgagggcattcgcgagtggtgggacttggaacctggagccccgaagcccaaagccaaccagcaaaagcaggacgacggccggggtctggtgcttcctggctacaagtacctcggacccttcaacggactcgacaagggggagcccgtcaacgcggcggacgcagcggccctcgagcacgacaaggcctacgaccagcagctcaaagcgggtgacaatccgtacctgcggtataaccacgccgacgccgagtttcaggagcgtctgcaagaagatacgtcttttgggggcaacctcgggcgagcagtcttccaggccaagaagcgggttctcgaacctctcggtctggttgaggaaggcgctaagacggctcctggaaagaaacgtccggtagagcagtcgccacaagagccagactcctcctcgggcatcggcaagacaggccagcagcccgctaaaaagagactcaattttggtcagactggcgactcagagtcagtccccgatccacaacctctcggagaacctccagcaacccccgctgctgtgggacctactacaatggcttcaggcggtggcgcaccaatggcagacaataacgaaggcgccgacggagtgggtaatgcctcaggaaattggcattgcgattccacatggctgggcgacagagtcatcaccaccagcacccgcacctgggccttgcccacctacaataaccacctctacaagcaaatctccagtgcttcaacaggggccagcaacgacaaccactacttcggctacagcaccccctgggggtattttgacttcaacagattccactgccacttctcaccacgtgactggcagcgactcatcaacaacaactggggattccggcctaagcgactcaacttcaagctcttcaacattcaggtcaaagaggttacggacaacaatggagtcaagaccatcgccaataaccttaccagcacggtccaggtcttcacggactcggagtaccagttgccgtacgtcctcggctctgcgcaccagggctgcctccctccgttcccggcggacgtgttcatgattccgcagtacggctacctaacgctcaacaacggtagtcaggccgtgggacgctcctccttctactgcctggaatactttccttcgcagatgctgagaaccggcaacaacttccagtttacttacaccttcgaggacgtgcctttccacagcagctacgcccacagccagagcttggaccggctgatgaatcctctgattgaccagtacctgtactacttgtctcggactcaaacaacaggaggcacggcaaatacgcagactctgggcttcagccaaggtgggcctaatacaatggccaatcaggcaaagaactggctgccaggaccctgttaccgccaacaacgcgtctcaacgacaaccgggcaaaacaacaatagcaactttgcctggactgctgggaccaaataccatctgaatggaagaaattcattggctaatcctggcatcgctatggcaacacacaaagacgacaaggagcgtttttttcccagtaacgggatcctgatttttggcaaacaaaatgctgccagagacaatgcggattacagcgatgtcatgctcaccagcgaggaagaaatcaaaaccactaaccctgtggctacagaggaatacggtatcgtggcagataacttgcagcagcaaaacacggctcctcaaattggaactgtcaacagccagggggccttacccggtatggtctggcagaaccgggacgtgtacctgcagggtcccatctgggccaagattcctcacacggacggcaacttccacccgtctccgctgatgggcggctttggcctgaaacatcctccgcctcagatcctgatcaagaacacgcctgtacctgcggatcctccgaccaccttcaaccagtcaaagctgaactctttcatcacgcaatacagcaccggacaggtcagcgtggaaattgaatgggagctgcagaaggaaaacagcaagcgctggaaccccgagatccagtacacctccaactactacaaatctacaagtgtggactttgctgttaatacagaaggcgtgtactctgaaccccaccccattggcacccgttacctcacccgtcccctgtaa

SEQ ID NO: 1085 - DNA, 2211 bp, Artificial Sequence
  Description of Artificial Sequence: Synthetic polynucleotide
atggctgccgatggttatcttccagattggctcgaggacactctctctgaaggaataagacagtggtggaagctcaaacctggcccaccaccaccaaagcccgcagagcggcataaggacgacagcaggggtcttgtgcttcctgggtacaagtacctcggacccttcaacggactcgacaagggagagccggtcaacgaggcagacgccgcggccctcgagcacgacaaagcctacgaccggcagctcgacagcggagacaacccgtacctcaagtacaaccacgccgacgcggagtttcaggagcgccttaaagaagatacgtcttttgggggcaacctcgggcgagcagtcttccaggccaagaagagggttctcgaaccttttggtctggttgaggaaggtgctaagacggctcctggaaagaaacgtccggtagagcagtcgccacaagagccagactcctcctcgggcattggcaagacaggccagcagcccgctaaaaagagactcaattttggtcagactggcgactcagagtcagtccccgacccacaacctctcggagaacctccagcaacccccgctgctgtgggacctactacaatggcttcaggcggtggcgcaccaatggcagacaataacgaaggcgccgacggagtgggtaatgcctcaggaaattggcattgcgattccacatggctgggcgacagagtcatcaccaccagcacccgaacatgggccttgcccacctataacaaccacctctacaagcaaatctccagtgcttcaacgggggccagcaacgacaaccactacttcggctacagcaccccctgggggtattttgacttcaacagattccactgccacttctcaccacgtgactggcagcgactcatcaacaacaactggggattccggcctaagcgactcaacttcaagctcttcaacattcaggtcaaagaggttacggacaacaatggagtcaagaccatcgccaataaccttaccagcacggtccaggtcttcacggactcagactatcagctcccgtacgtgctcgggtcggctcacgagggctgcctcccgccgttcccagcggacgttttcatgattcctcagtacggctacctaacactcaacaacggtagtcaggccgtgggacgctcctccttctactgcctggaatactttccttcgcagatgctgagaaccggcaacaacttccagtttacttacaccttcgaggacgtgcctttccacagcagctacgcgcacagccagagtctggaccggctgatgaatcctctgattgaccagtacctgtactacttgtctcggactcaaacaacaggaggcacggcaaatacgcagactctgggcttcagccaaggtgggcctaatacaatggccaatcaggcaaagaactggctgccaggaccctgttaccgccaacaacgcgtctcaacgacaaccgggcaaaacaacaatagcaactttgcctggactgctgggaccaaataccatctgaatggaagaaattcattggctaatcctggcatcgctatggcaacacacaaagacgacaaggagcgtttttttcccagtaacgggatcctgattttcggcaaacaaaatgctgccagagacaatgcggattacagcgatgtcatgctcaccagcgaggaagaaatcaaaaccactaaccctgtggctacagaggaatacggtatcgtggcagataacttgcagcagcaaaacacggctcctcaaattggaactgtcaacagccagggggccttacccggtatggtctggcagaaccgggacgtgtacctgcagggtcccatctgggccaagattcctcacacggacggcaacttccacccgtctccgctgatgggcggctttggcctgaaacatcctccgcctcagatcctgatcaagaacacgcctgtacctgcggatcctccgaccaccttcaaccagtcaaagctgaactctttcatcacgcaatacagcaccggacaggtcagcgtggaaattgaatgggagctgcagaaggaaaacagcaagcgctggaaccccgagatccagtacacctccaactactacaaatctacaagtgtggactttgctgttaatacagaaggcgtgtactctgaaccccaccccattggcaccagatacctgactcgtaatctgtaa

SEQ ID NO: 1086 - DNA, 2208 bp, Artificial Sequence
  Description of Artificial Sequence: Synthetic polynucleotide
atggctgccgatggttatcttccagattggctcgaggacactctctctgaaggaataagacagtggtggaagctcaaacctggcccaccaccaccaaagcccgcagagcggcataaggacgacagcaggggtcttgtgcttcctgggtacaagtacctcggacccttcaacggactcgacaagggagagccggtcaacgaggcagacgccgcggccctcgagcacgacaaagcctacgaccggcagctcgacagcggagacaacccgtacctcaagtacaaccacgccgacgcggagtttcaggagcgccttaaagaagatacgtcttttgggggcaacctcggacgagcagtcttccaggcgaaaaagagggttcttgaacctctgggcctggttgaggaacctgttaagacggctccgggaaaaaagaggccggtagagcagtcgccacaagagccagactcctcctcgggcatcggcaagaaaggccagcagcccgctaaaaagagactcaattttggtcagactggcgactcagagtcagtccccgacccacaacctctcggagaacctccagcaacccccgctgctgtgggacctactacaatggcttcaggcggtggcgcaccaatggcggacaataacgaaggcgccgatggagtgggtaatgcctcaggaaattggcattgcgattccacatggctgggcgacagagtcatcaccaccagcacccgaacatgggccttgcccacctataacaaccacctctacaagcaaatctccagtgcttcaacgggggccagcaacgacaaccactacttcggctacagcaccccctgggggtattttgacttcaacagattccactgccacttctcaccacgtgactggcagcgactcatcaacaacaactggggattccggcctaagcgactcaacttcaagctcttcaacattcaggtcaaagaggttacggacaacaatggagtcaagaccatcgccaataaccttaccagcacggtccaggtcttcacggactcagactatcagctcccgtacgttctcggctctgcccaccagggctgcctgcctccgttcccggcggacgtgttcatgattccccagtacggctacctaacactcaacaacggtagtcaggccgtgggacgctcctccttctactgcctggaatactttccttcgcagatgctgagaaccggcaacaacttccagtttacttacaccttcgaggacgtgcctttccacagcagctacgcccacagccagagcttggaccggctgatgaatcctctgattgaccagtacctgtactacttgtctcggactcaaacaacaggaggcacggcaaatacgcagactctgggcttcagccaaggtgggcctaatacaatggccaatcaggcaaagaactggctgccaggaccctgttaccgccaacaacgcgtctcaacgacaaccgggcaaaacaacaatagcaactttgcctggactgctgggaccaaataccatctgaatggaagaaattcattggctaatcctggcatcgctatggcaacacacaaagacgacaaggagcgtttttttcccagtaacgggatcctgatttttggcaaacaaaatgctgccagagacaatgcggattacagcgatgtcatgctcaccagcgaggaagaaatcaaaaccactaaccctgtggctacagaggaatacggtatcgtggcagataacttgcagcagcaaaacacggctcctcaaattggaactgtcaacagccagggggccttacccggtatggtctggcagaaccgggacgtgtacctgcagggtcccatctgggccaagattcctcacacggacggcaacttccacccgtctccgctgatgggcggctttggcctgaaacatcctccgcctcagatcctgatcaagaacacgcctgtacctgcggatcctccgaccaccttcaaccagtcaaagctgaactctttcatcacgcaatacagcaccggacaggtcagcgtggaaattgaatgggagctgcagaaggaaaacagcaagcgctggaaccccgagatccagtacacctccaactactacaaatctacaagtgtggactttgctgttaatacagaaggcgtgtactctgaaccccaccccattggcacccgttacctcacccgtcccctg

SEQ ID NO: 1087 - DNA, 2211 bp, Artificial Sequence
  Description of Artificial Sequence: Synthetic polynucleotide
atggctgccgatggttatcttccagattggctcgaggacactctctctgaaggaataagacagtggtggaagctcaaacctggcccaccaccaccaaagcccgcagagcggcataaggacgacagcaggggtcttgtgcttcctgggtacaagtacctcggacccttcaacggactcgacaagggagagccggtcaacgaggcagacgccgcggccctcgagcacgacaaagcctacgaccagcagctccaagcgggtgacaatccgtacctgcggtataaccacgccgacgccgagtttcaggagcgtcttcaaggagatacgtcttttgggggcaacctcggacgagcagtcttccaggccaaaaagaggcttcttgaacctcttggtctggttgaggaagcggctaagacggctcctggaaagaagaggcctgtagagcagtctcctcaggaaccggactcctccgcgggtattggcaaatcgggtgcacagcccgctaaaaagagactcaatttcggtcagactggcgacacagagtcagtcccagaccctcaaccaatcggagaacctcccgcagccccctcaggtgtgggatctcttacaatggcttcaggtggtggcgcaccagtggcagacaataacgaaggtgccgatggagtgggtagttcctcgggaaattggcattgcgattcccaatggctgggggacagagtcatcaccaccagcacccgaacatgggccttgcccacctataacaaccacctctacaagcaaatctccagtgcttcaacgggggccagcaacgacaaccactacttcggctacagcaccccctgggggtattttgacttcaaccgcttccactgccacttctcaccacgtgactggcagcgactcatcaacaacaactggggattccggcccaagagactcagcttcaagctcttcaaccatccaggtcaaggaggtcacgcagaatgaaggcaccaagaccatcgccaataacctcaccagcacatccaggtgtttacggactcggagtaccagctgccgtacgttctcggctctgcccaccagggctgcctgcctccgttcccggcggacgtgttcatgattccccagtacggctacctaacactcaacaacggtagtcaggccgtgggacgctcctccttctactgcctggaatactttccttcgcagatgctgagaaccggcaacaacttccagttcacttacaccttcgaggacgtgcctttccacagcagctacgcgcacagccagagcttggaccggctgatgaatcctctgattgaccagtacctgtactacttgtctcggactcaaacaacaggaggcacggcaaatacgcagactctgggcttcagccaaggtgggcctaatacaatggccaatcaggcaaagaactggctgccaggaccctgttaccgccaacaacgcgtctcaacgacaaccgggcaaaacaacaatagcaactttgcctggactgctgggaccaaataccatctgaatggaagaaattcattgggtaatcctggcatcgctatggcaacacacaaagacgacaaggagcgtttttttcccagtaacgggatcctgatttttggcaaacaaaatgctgccagagacaatgcggattacagcgatgtcatgctcaccagcgaggaagaaatcaaaaccactaaccctgtggctacagaggaatacggtatcgtggcagataacttgcagcagcaaaacacggctcctcaaattggaactgtcaacagccagggggccttacccggtatggtctggcagaaccgggacgtgtacctgcagggtcccatctgggccaagattcctcacacggacggcaacttccacccgtctccgctgatgggcggctttggcctgaaacatcctccgcctcagatcctcatcaaaaacacacctgtacctgcggatcctccaacggccttcaaccagtcaaagctgaactctttcatcacgcaatacagcaccggacaggtcagcgtggaaattgaatgggagctgcagaaggaaaacagcaagcgctggaaccccgagatccagtacacctccaactactacaaatctacaagtgtggactttgctgttaatacagaaggcgtgtactctgaaccccaccccattggcacccgttacctcacccgtcccctgtaa

SEQ ID NO: 1088 - DNA, 2214 bp, Artificial Sequence
  Description of Artificial Sequence: Synthetic polynucleotide
atggctgccgatggttatcttccagattggctcgaggacaacctctctgagggcattcgcgagtggtgggacttgaaacatggagccccgaaacccaaagccaaccagcaaaagcaggacgacggccggggtctggtgcttcctggctacaagtacctcggacccttcaacggactcgacaagggggagcccgtcaacgcggcggatgcagcggccctcgagcacgacaaggcctacgaccagcagctcaaagcgggtgacaatccgtacctgcggtataaccacgccgacgccgagtttcaggagcgtctgcaagaagatacgtcttttgggggcaacctcgggcgagcagtcttccaggccaagaagagggttctcgaaccttttggtctggttgaggaaggtgctaagacggctcctggaaagaaacgtccggtagagcagtcgccacaagagccagactcctcctcgggcattggcaagacaggccagcagcccgctaaaaagagactcaattttggtcagactggcgactcagagtcagtccccgacccacaacctctcggagaacctccagcaacccccgctgctgtgggacctactacaatggcttcaggcggtggcgcaccaatggcagacaataacgaaggcgccgacggagtgggtaatgcctcaggaaattggcattgcgattccacatggctgggcgacagagtcatcaccaccagcacccgaacatgggccttgcccacctataacaaccacctctacaagcaaatctccaacgggacttcgggaggaagcaccaacgacaacacctacttcggctacagcaccccctgggggtattttgactttaacagattccactgccacttctcaccacgtgactggcagcgactcatcaacaacaactggggattccggcccaagagactcaacttcaaactcttcaacatccaagtcaaggaggtcacgcagaatgaaggcaccaagaccatcgccaataacctcaccagcaccatccaggtgtttacggactcggagtaccagctgccgtacgttctcggctccgcccaccagggctgcctgcctccgttcccggcggacgtgttcatgattccccagtacggctacctaacactcaacaacggtagtcaggccgtgggacgctcctccttctactgcctggaatactttccttcgcagatgctgagaacgggcaacaactttaccttcagctacacctttgaggacgttcctttccacagcagctacgctcacagccagagtctggaccgtctcatgaatcctctgattgaccagtacctgtactacttgtctcggactcaaacaacaggaggcacggcaaatacgcagactctgggcttcagccaaggtgggcctaatacaatggccaatcaggcaaagaactggctgccaggaccctgttaccgccaacaacgcgtctcaacgacaaccgggcaaaacaacaatagcaactttgcctggactgctgggaccaaataccatctgaatggaagaaattcattggctaatcctggcatcgctatggcaacacacaaagacgacaaggagcgtttttttcccagtaacgggatcctgatttttggcaaacaaaatgctgccagagacaatgcggattacagcgatgtcatgctcaccagcgaggaagaaatcaaaaccactaaccctgtggctacagaggaatacggtatcgtggcagataacttgcagcagcaaaacacggctcctcaaattggaactgtcaacagccagggggccttacccggtatggtctggcagaaccgggacgtgtacctgcagggtcccatctgggccaagattcctcacacggacggcaacttccacccgtctccgctgatgggcggctttggcctgaaacatcctccgcctcagatcctgatcaagaacacgcctgtacctgcggatcctccgaccaccttcaaccagtcaaagctgaactctttcatcacgcaatacagcaccggacaggtcagcgtggaaattgaatgggagctgcagaaggaaaacagcaagcgctggaaccccgagatccagtacacctccaactactacaaatctacaagtgtggactttgctgttaatacagaaggcgtgtactctgatccccaccccattggcacccgttacctcacccgtcccctgtaa

SEQ ID NO: 1089 - DNA, 2214 bp, Artificial Sequence
  Description of Artificial Sequence: Synthetic polynucleotide
atggctgccgatggttatcttccagattggctcgaggacaacctctctgagggcattcgcgagtggtgggcgctgaaacctggagccccgaagcccaaagccaaccagcaaaagcaggacgacggccggggtctggtgcttcctggctacaagtacctcggacccttcaacggactcgacaaaggagagccggtcaacgaggcggacgcggcagccctcgaacacgacaaggcctacgaccagcagctcaaagcgggtgacaatccgtacctgcggtataaccacgccgacgccgagtttcaggagcgtctgcaagaagatacgtcttttgggggcaacctcgggcgagcagtcttccaggccaagaagcgggttctcgaacctctcggtctggttgaggaaggcgctaagacggctcctggaaagaagagaccggtagagccatcaccccagcgttctccagactcctctacgggcatcggcaagaaaggccagcagcccgccagaaaaagactcaattttggtcagactggcgactcagagtcagttccagaccctcaacctctcggagaacctccagcagcgccctctggtgtgggacctaatacaatggcttcaggcggtggcgcaccaatggcagacaataacgagggcgccgacggagtgggtaattcctcgggaaattggcattgcgattccacatggatgggcgacagagtcatcaccaccagcacccgaacctgggccctgcccacctacaacaaccacctctacaagcaaatctccagtgcttcaacgggggccagcaacgacaaccactacttcggctacagcaccccctgggggtattttgactttaacagattccactgccacttttcaccacgtgactggcagcgactcatcaacaacaactggggattccggcccaagagactcaacttcaagctcttcaacatccaagtcaaggaggtcacgcagaatgaaggcaccaagaccatcgccaataacctcaccagcaccatccaggtgtttacggactcggagtaccagctgccgtacgttctcggctctgcccaccagggctgcctgcctccgttcccggcggacgtgttcatgattccccagtacggctacctaacactcaacaacggtagtcaggccgtgggacgctcctccttctactgcctggaatactttccttcgcagatgctgagaaccggcaacaacttccagtttacttacaccttcgaggacgtgcctttccacagcagctacgcgcacagccagagcttggaccggctgatgaatcctctgattgaccagtacctgtactacttgtctcggactcaaacaacaggaggcacggcaaatacgcagactctgggcttcagccaaggtgggcctaatacaatggccaatcaggcaaagaactggctgccaggaccctgttaccgccaacaacgcgtctcaacgacaaccgggcaaaacaacaatagcaactttgcctggactgctgggaccaaataccatctgaatggaagaaattcattggctaatcctggcatcgctatggcaacacacaaagacgacaaggagcgtttttttcccagtaacgggatcctgatttttggcaaacaaaatgctgccagagacaatgcggattacagcgatgtcatgctcaccagcgaggaagaaatcaaaaccactaaccctgtggctacagaggaatacggtatcgtggcagataacttgcagcagcaaaacacggctcctcaaattggaactgtcaacagccagggggccttacccggtatggtctggcagaaccgggacgtgtacctgcagggtcccatctgggccaagattcctcacacggacggcaacttccacccgtctccgctgatgggcggctttggcctgaaacatcctccgcctcagatcctgatcaagaacacgcctgtacctgcggatcctccgaccaccttcaaccagtcaaagctgaactctttcatcacacaatacagcaccggacaggtcagcgtggaaattgaatgggagctgcagaaggaaaacagcaagcgctggaaccccgagatccagtacacctccaactactacaaatctacaagtgtggactttgctgttaatacagaaggcgtgtactctgaaccccaccccattggcacccgttacctcacccgtcccctgtaa

SEQ ID NO: 1090 - DNA, 2211 bp, Artificial Sequence
  Description of Artificial Sequence: Synthetic polynucleotide
  modified_base (676)..(676): a, c, g, or t
atggctgccgatggttatcttccagattggctcgaggacactctctctgaaggaataagacagtggtggaagctcaaacctggcccaccaccaccaaagcccgcagagcggcataaggacgacagcaggggtcttgtgcttcctgggtacaagtacctcggacccttcaacggactcgacaagggagagccggtcaacgaggcagacgccgcggccctcgagcacgacaaagcctacgaccggcagctcgacagcggagacaacccgtacctcaagtacaaccacgccgacgcggagtttcaggagcgccttaaagaagatacgtcttttgggggcaacctcggacgagcagtcttccaggcgaaaaagagggttcttgaacctctgggcctggttgaggaacctgttaagacggctccgggaaaaaagaggccggtagagcagtcgccacaagagccagactcctcctcgggcatcggcaagaaaggccagcagcccgctaaaaagagactcaattttggtcagactggcgactcagagtcagtccccgacccacaacctctcggagaacctccagcaacccccgctgctgtgggacctactacaatggcttcaggcggtggcgcaccaatggcggacaataacgaaggcgccgatggagtgggtaatgcctcangaaattggcattgcgattccacatggctgggcgacagagtcatcaccaccagcacccgaacatgggccttgccacctataacaaccacctctacaagcaaatctccagtgcttcaacgggggcgcagcaacgacaaccactacttcggctacagcaccccctgggggtattttgacttcaacagattccactgccacttctcaccacgtgactggcagcgactcatcaacaacaactggggattccggcctaagcgactcaacttcaagctcttcaacattcaggtcaaagaggttacggacaacaatggagtcaagaccatcgccaataaccttaccagcacggtccaggtcttcacggactcagactatcagctcccgtacgttctcggctctgcccaccagggctgcctgcctccgttcccggcggacgtgttcatgattccccagtacggctacctaacactcaacaacggtagtcaggccgtgggacgctcctccttctactgcctggaatactttccttcgcagatgctgagaaccggcaacaacttccagtttacttacaccttcgaggacgtgcctttccacagcagctacgcccacagccagagcttggaccggctgatgaatcctctgattgaccagtacctgtactacttgtctcggactcaaacaacaggaggcacggcaaatacgcagactctgggcttcagccaaggtgggcctaatacaatggccaatcaggcaaagaactggctgccaggaccctgttaccgccaacaacgcgtctcaacgacaaccgggcaaaacaacaatagcaactttgcctggactgctgggaccaaataccatctgaatggaagaaattcattggctaatcctggcatcgctatggcaacacacaaagacgacaaggagcgtttttttcccagtaacgggatcctgatttttggcaaacaaaatgctgccagagacaatgcggattacagcgatgtcatgctcaccagcgaggaagaaatcaaaaccactaaccctgtggctacagaggaatacggtatcgtggcagataacttgcagcagcaaaacacggctcctcaaattggaactgtcaacagccagggggccttacccggtatggtttggcagaaccgggacgtgtacctgcagggtcccatctgggccaagattcctcacacggacggcaacttccacccgtctccgctgatgggcggctttggcctgaaacatcctccgcctcagatcctgatcaagaacacgcctgtacctgcggatcctccgaccaccttcaaccagtcaaagctgaactctttcatcacacagtactccacgggacaggtcagcgtggaaattgaatgggagctgcagaaggaaaacagcaagcgctggaacccggagatccagtacacttccaactactacaaatctacaaatgtggactttgctgttaacacagaaggcgtgtactctgaaccccaccccattggcacccgttacctcacccgtcccctgtaa

SEQ ID NO: 1091 - DNA, 2211 bp, Artificial Sequence
  Description of Artificial Sequence: Synthetic polynucleotide
  modified_base (715)..(715): a, c, g, or t
atggctgccgatggttatcttccagattggctcgaggacaacctctctgagggcattcgcgagtggtgggacttgaaacctggagccccgaaacccaaagccaaccagcaaaagcaggacgacggccggggtctggtgcttcctggctacaagtacctcggacccttcaacggactcgacaagggggagcccgtcaacgcggcggatgcagcggccctcgagcacgacaaggcctacgaccagcagctccaagcgggtgacaatccgtacctgcggtataaccacgccgacgccgagtttcaggagcgtcttcaaggagatacgtcttttgggggcaacctcggacgagcagtcttccaggccaagaagcgggttctcgaacctctcggtctggttgaggaagcggctaagacggctcctggaaagaagaggcctgtagagcagtctcctcaggaaccggactcctccgcgggtattggcaaatcgggtgcacagcccgctaaaaagagactcaatttcggtcagactggcgacacagagtcagtcccagaccctcaaccaatcggagaacctcccgcagccccctctggtgtgggacctaatacaatggctgcaggcggtggcgcaccaatggcagacaataacgaaggcgccgatggagtgggtagttcctcgggaaattggcattgcgattccacatggctgggcgacagantcatcaccaccagcacccgaacctgggccctgcccacctataacaaccatctctacaagcaaatctccagtgcttcaacgggggccagcaacgacaaccactacttcggctacagcaccccctgggggtattttgacttcaacagattccactgccacttctcaccacgtgactggcagcgactcatcaacaacaactggggattccggcctaagcgactcaacttcaagctcttcaacattcaggtcaaagaggttacggacaacaatggagtcaagaccatcgccaataaccttaccagcacggtccaggtcttcacggactcggagtaccagttgccgtacgtcctcggctctgcgcaccagggctgcctgcctccgttcccggcggacgtgttcatgattccgcagtacggctacctaacgctcaacaatggcagccaggcagtgggacggtcatccttttactgcctggaatatttcccatcgcagatgctgagaacgggcaacaactttaccttcagctacacttttgaggacgttcctttccacagcagctacgctcacagccagagtctggaccgtctcatgaatcctctgattgaccagtacctgtactacttgtctcggactcaaacaacaggaggcacggcaaatacgcagactctgggcttcagccaaggtgggcctaatacaatggccaatcaggcaaagaactggctgccaggaccctgttaccgccaacaacgcgtctcaacgacaaccggacaaaacaacaatagcaactttgcctggactgctgggaccaaataccatctgaatggaagaaattcattggctaatcctggcatcgctatggcaacacacaaagacgacaaggagcgtttttttcccagtaacgggatcctgatttttggcaaacaaaatgctgccagagacaatgcggattacagcgatgtcatgctcaccagcgaggaagaaatcaaaaccactaaccctgtggctacagaggaatacggtatcgtggcagataactttcagcagcaaaacacggctcctcaaattggaactgtcaacagccagggggccttacccggtatggtctggcagaaccgggacgtgtacctgcagggtcccatctgggccaagattcctcacacggacggcaacttccacccgtctccgctgatgggcggctttggcctgaaacatcctccgcctcagatcctgatcaagaacacgcctgtacctgcggatcctccgaccaccttcaaccagtcaaagctgaactctttcatcacgcaatacagcaccggacaggtcagcgtggaaattgaatgggagctgcagaaggaaaacagcaagcgctggaaccccgagatccagtacacctccaactactacaaatctacaagtgtggactttgctgttaatacagaaggcgtgtactctgaaccccaccccattggcacccgttacctcacccgtcccctgtaa

SEQ ID NO: 1092 - DNA, 2211 bp, Artificial Sequence
  Description of Artificial Sequence: Synthetic polynucleotide
atggctgccgatggttatcttccagattggctcgaggacaacctctctgagggcattcgcgagtggtgggcgctgaaacctggagccccgaagcccaaagccaaccagcaaaagcaggacgacggccggggtctggtgcttcctggctacaagtacctcggacccttcaacggactcgacaaaggagagccggtcaacgaggcggacgcggcagccctcgaacacgacaaagcttacgaccagcagctcaaggccggtgacaacccctacctcaagtataaccacgccgacgccgagtttcaggagcgtctgcaagaagatacgtcttttgggggcaacctcgggcgagcagtcttccaggccaaaaagaggcttcttgaacctcttggtctggttgaggaagcggctaagacggctcctggaaagaagaggcctgtagagcagtctcctcaggaaccggactcctccgcgggtattggcaaatcgggtgcacagcccgctaaaaagagactcaatttcggtcagactggcgacacagagtcagtcccagacccacaacctctcggagaacctccagcaacccccgctgctgtgggacctactacaatggcttcaggcggtggcgcaccaatggcggacaataacgaaggcgccgatggagtgggtaatgcctcaggaaattggcattgcgattccacatggctgggcgacagagtcatcaccaccagcacccgaacatgggccttgcccacctataacaaccacctctacaagcaaatctccagtgcttcaacgggggccagcaacgacaaccactacttcggctacagcaccccctgggggtattttgacttcaacagattccactgccacttctcaccacgtgactggcagcgactcatcaacaacaactggggattccggcccaagagactcagcttcaagctcttcaacatccaggtcaaggaggtcacgcagaatgaaggcaccaagaccatcgccaataacctcaccagcaccatccaggtgtttacggactcggagtaccagctgccgtacgttctcggctccgcccaccagggctgcctgcctccgttcccggcggacgtgttcatgattccccagtacggctacctaacactcaacaacggtagtcaggccgtgggacgctcctccttctactgcctggaatactttccttcgcagatgctgagaaccggcaacaacttccagtttacttacaccttcgaggacgtgcctttccacagcagctacgcccacagccagagcttggaccggctgatgaatcctctgattgaccagtacctgtactacttgtctcggactcaaacaacaggaggcacggcaaatacgcagactctgggcttcagccaaggtgggcctaatacaatggccaatcaggcaaagaactggctgccaggaccctgttaccgccaacaacgcgtctcaacgacaaccgggcaaaacaacaatagcaactttgcctggactgctgggaccaaataccatctgaatggaagaaattcattggctaatcctggcatcgctatggcaacacacaaagacgacaaggagcgtttttttcccagtaacgggatcctgatttttggcaaacaaaatgctgccagagacaatgcggattacagcgatgtcatgctcaccagcgaggaagaaatcaaaaccactaaccctgtggctacagaggaatacggtatcgtggcagataacttgcagcagcaaaacacggctcctcaaattggaactgtcaacagccagggggccttacccggtatggtctggcagaaccgggacgtgtacctgcagggtcccatctgggccaagattcctcacacggacggcaacttccacccgtctccgctgatgggcggctttggcctgaaacatcctccgcctcagatcctgatcaagaacacgcctgtacctgcggatcctccgaccaccttcaaccagtcaaagctgaactctttcatcacgcaatacagcaccggacaggtcagcgtggaaattgaatgggagctgcagaaggaaaacagcaagcgctggaaccccgagatccagtacacctccaactactacaaatctacaagtgtggactttgctgttaatacagaaggcgtgtactctgaaccccaccccattggcacccgttacctcacccgtcccctgtaa

SEQ ID NO: 1093 - DNA, 2211 bp, Artificial Sequence
  Description of Artificial Sequence: Synthetic polynucleotide
atggctgccgatggttatcttccagattggctcgaggacactctctctgaaggaataagacagtggtggaagctcaaacctggcccaccaccaccaaagcccgcagagcggcataaggacgacagcaggggtcttgtgcttcctgggtacaagtacctcggacccttcaacggactcgacaagggagagccggtcaacgaggcagacgccgcggccctcgagcacgacaaagcctacgaccagcagctccaagcgggtgacaatccgtacctgcggtataaccacgccgacgccgagtttcaggagcgtcttcaaggagatacgtcttttgggggcaacctcggacgagcagtcttccaggccaaaaagaggcttcttgaacctcttggtctggttgaggaagcggctaagacggctcctggaaagaagaggcctgtagagcagtctcctcaggaaccggactcctccgcgggtattggcaaatcgggtgcacagcccgctaaaaagagactcaatttcggtcagactggcgacacagagtcagtcccagaccctcaaccaatcggagaacctcccgcagccccctcaggtgtgggatctcttacaatggcttcaggtggtggcgcaccagtggcagacaataacgaaggtgccgatggagtgggtagttcctcgggaaattggcattgcgattcccaatggctgggggacagagtcatcaccaccagcacccgaacatgggccttgcccacctataacaaccacctctacaagcaaatctccagtgcttcaacgggggccagcaacgacaaccactacttcggctacagcaccccctgggggtattttgacttcaaccgcttccactgccacttctcaccacgtgactggcagcgactcatcaacaacaactggggattccggcccaagagactcagcttcaagctcttcaacatccaggtcaaggaggtcacgcagaatgaaggcaccaagaccatcgccaataacctcaccagcaccatccaggtgtttacggactcggagtaccagctgccgtacgttctcggctctgcccaccagggctgcctgcctccgttcccggcggacgtgttcatgattccccagtacggctacctaacactcaacaacggtagtcaggccgtgggacgctcctccttctactgcctggaatactttccttcgcagatgctgagaaccggcaacaacttccagtttacttacaccttcgaggacgtgcctttccacagcagctacgcccacagccagagcttggaccggctgatgaatcctctgattgaccagtacctgtactacttgtctcggactcaaacaacaggaggcacggcaaatacgcagactctgggcttcagccaaggtgggcctaatacaatggccaatcaggcaaagaactggctgccaggaccctgttaccgccaacaacgcgtctcaacgacaaccgggcaaaacaacaatagcaactttgcctggactgctgggaccaaataccatctgaatggaagaaattcattggctaatcctggcatcgctatggcaacacacaaagacgacaaggagcgtttttttcccagtaacgggatcctgatttttggcaaacaaaatgctgccagagacaatgcggattacagcgatgtcatgctcaccagcgaggaagaaatcaaaaccactaaccctgtggctacagaggaatacggtatcgtggcagataacttgcagcagcaaaacacggctcctcaaattggaactgtcaacagccagggggccttacccggtatggtctggcagaaccgggacgtgtacctgcagggtcccatctgggccaagattcctcacacggacggcaacttccacccgtctccgctgatgggcggctttggcctgaaacatcctccgcctcagatcctgatcaagaacacgcctgtacctgcggatcctccgaccaccttcaaccagtcaaagctgaactctttcatcacgcaatacagcaccggacaggtcagcgtggaaattgaatgggagctgcagaaggaaaacagcaagcgctggaaccccgagatccagtacacctccaactactacaaatctacaagtgtggactttgctgttaatacagaaggcgtgtactctgaaccccaccccattggcacccgttacctcacccgtcccctgtaa

SEQ ID NO: 1094 - DNA, 2217 bp, Artificial Sequence
  Description of Artificial Sequence: Synthetic polynucleotide
atggctgccgatggttatcttccagattggctcgaggacaacctctctgagggaataagacagtggtggaagctcaaacctggcccaccaccaccaaagcccgcagagcggcataaggacgacagcaggggtcttgtgcttcctgggtacaagtacctcggacccttcaacggactcgacaagggagagccggtcaacgcggcggacgcagcggccctcgagcacgacaaggcctacgaccagcagctcaaagcgggtgacaatccgtacctgcggtataaccacgccgacgccgagtttcaggagcgtctgcaagaagatacgtcttttgggggcaacctcgggcgagcagtcttccaggccaagaagcgggttctcgaacctctcggtctggttgaggaaggcgctaagacggctcctggaaagaagagaccggtagagccatcaccccagcgttctccagactcctctacgggcatcggcaagaaaggccagcagcccgctaaaaagagactcaattttggtcagactggcgactcagagtcagtccccgacccacaacctctcggagaacctccagcaacccccgctgctgtgggacctactacaatggcttcaggcggtggcgcaccaatggcagacaataacgaaggcgccgacggagtgggtaatgcctcaggaaattggcattgcgattccacatggctgggggacagagtcatcaccaccagcacccgaacctgggccctgcccacctacaacaaccacctctacaagcaaatctccaacgggacttcgggaggaagcaccaacgacaacacctacttcggctgcgtcacgccctgggggtattttgactttaacaaattccactgccacttttcaccggatgactggcaacgactcatcaacaacggctggggattccggactaagcgactcaacttcaagctcttcagcatgaaagtcaaaaagggtacggacaacactggaatcaagaccatcgcgaataaccttaccaacacggtccatgtcttcgcggactcggagtaccagttgccgtacgtcctcggctctgcgcaccagggctgcctccctccgttcccggcggacgtgttcatgattccgcagtacggctacctaacgctcaacaatggcagccaggcagtgggacggtcatccttttactgcctggaatatttcccatcgcagatgctgagaacgggcaacaactttaccttcagctacacctttgaggacgttcctttccacagcagctacgctcacagccagagtctggaccgtctcatgaatcctctgattgaccagtacctgtactacttgtctcggactcaaacaacaggaggcacggcaaatacgcagactctgggcttcagccaaggtgggcctaatacaatggccaatcaggcaaagaactggctgccaggaccctgttaccgccaacaacgcgtctcaacgacaaccgggcaaaacaacaatagcaactttgcctggactgctgggaccaaataccatctgaatggaagaaattcattggctaatcctggcatcgctatggcaacacacaaagacgacaaggagcgtttttttcccagtaacgggatcctgatttttggcaaacaaaatgctgccagagacaatgcggattacagcgatgtcatgctcaccagcgaggaagaaatcaaaaccactaaccctgtggctacagaggaatacggtatcgtggcagataacttgcagcagcaaaacacggctcctcaaattggaactgtcaacagccagggggccttacccggtatggtctggcagaaccgggacgtgtacctgcagggtcccatctgggccaagattcctcacacggacggcaacttccacccgtctccgctgatgggcggctttggcctgaaacatcctccgcctcagatcctgatcaagaacacgcctgtacctgcggatcctccgaccaccttcaaccagtcaaagctgaactctttcatcacgcaatacagcaccggacaggtcagcgtggagatcgagtgggagctgcagaaggaaaacagcaagcgctggaacccggagatccagtacacctccaactactacaaatctacaagtgtggactttgctgttaatacagaaggcgtgtactctgaaccccaccccattggcacccgttacctcacccgtcccctgtaa

SEQ ID NO: 1095 - DNA, 2214 bp, Artificial Sequence
  Description of Artificial Sequence: Synthetic polynucleotide
atggctgccgatggttatcttccagattggctcgaggacactctctctgaaggaataagacagtggtggaagctcaaacctggcccaccaccaccaaagcccgcagagcggcataaggacgacagcaggggtcttgtgcttcctgggtacaagtacctcggacccttcaacggactcgacaagggggagcccgtcaacgcggcggacgcagcggccctcgagcacgacaaggcctacgaccagcagctcaaagcgggtgacaatccgtacctgcggtataaccacgccgacgccgagtttcaggagcgtctgcaagaagatacgtcttttgggggcaacctcgggcgagcagtcttccaggccaagaagcgggttctcgaacctctcggtctggttgaggaaggcgctaagacggctcctggaaagaagagaccggtagagccatcaccccagcgttctccagactcctctacgggcatcggcaagaaaggccagcagcccgcgaaaaagagactcaactttgggcagactggcgactcagagtcagtgcccgaccctcaaccaatcggagaaccccccgcaggcccctctggtctgggatctggtacaatggctgcaggcggtggcgctccaatggcagacaataacgaaggcgccgatggagtgggtagttcctcgggaaattggcattgcgattccacatggctgggggacagagtcatcaccaccagcacccgaacctgggccctgcccacctacaacaaccacctctacaaacaaatttccagcgcttcaacgggagcctcgaacgacaatcactactttggctacagcaccccctgggggtattttgacttcaacagattccactgccacttctcaccacgtgactggcagcgactcatcaacaacaactggggattccggcctaagcgactcaacttcaagctcttcaacattcaggtcaaagaggttacggacaacaatggagtcaagaccatcgccaataaccttaccagcacggtccaggtcttcacggactcggagtaccagttgccgtacgtcctcggctctgcgcaccagggctgcctccctccgttcccggcggacgtgttcatgattccgcagtacggctacctaacgctcaacaatggcagccaggcagtgggacggtcatccttttactgcctggaatatttcccatcgcagatgctgagaacgggcaacaactttaccttcagctacacctttgaggacgttcctttccacagcagctacgctcacagccagagtctggaccgtctcatgaatcctctgattgaccagtacctgtactacttgtctcggactcaaacaacaggaggcacggcaaatacgcagactctgggcttcagccaaggtgggcctaatacaatggccaatcaggcaaagaactggctgccaggaccctgttaccgccaacaacgcgtctcaacgacaaccgggcaaaacaacaatagcaactttgcctggactgctgggaccaaataccatctgaatggaagaaattcattggctaatcctggcatcgctatggcaacacacaaagacgacaaggagcgtttttttcccagtaacgggatcctgatttttggcaaacaaaatgctgccagagacaatgcggattacagcgatgtcatgctcaccagcgaggaagaaatcaaaaccactaaccctgtggctacagaggaatacggtatcgtggcagataacctgcagcagcaaaacacggctcctcaaattggaactgtcaacagccagggggccttacccggtatggtctggcagaaccgggacgtgtacctgcagggtcccatctgggccaagattcttcacacggacggcaactttcacccttctccgctgatgggagggtttggaatgaagcacccgcctcctccgatcctgatcaagaacacgcctgtacctgcggatcctccgaccaccttcaaccagtcaaagctgaactctttcatcacgcaatacagcaccggacaggtcagcgtggaaattgaatgggagctgccgaaggaaaacagcaagcgctggaaccccgagatccagtacacctccaactactacaaatctacaagtgtggactttgctgttaatacagaaggtgtgtactatgaaccccaccccattggcacccgttacctcacccctcccctgtaa

SEQ ID NO: 1096 - DNA, 2214 bp, Artificial Sequence
  Description of Artificial Sequence: Synthetic polynucleotide
atggctgccgatggttatcttccagattggctcgaggacaacctctctgagggcattcgcgagtggtgggcgctgaaacctggagccccgaagcccaaagccaaccagcaaaagcaggacgacggccggggtctggtgcttcctggctacaagtacctcggacccttcaacggactcgacaagggggagcccgtcaacgcggcggacgcagcggccctcgagcacgacaaggcctacgaccagcagctcaaagcgggtgacaatccgtacctgcggtataaccacgccgacgccgagtttcaggagcgtctgcaagaagatacgtcttttgggggcaacctcgggcgagcagtcttccaggccaagaagcgggttctcgaacctctcggtctggttgaggaaggcgctaagacggctcctggaaagaagagaccggtagagccatcaccccagcgctctccagactcctctacgggcatcggcaagaaaggccaacagcccgccagaaaaagactcaattttggtcagactggcgactcagagtcagttccagaccctcaacctctcggagaacctccagcagcgccctctggtgtggcacctaatacaatggctgcaggcggtggcgcaccaatggcagacaataacgaaggcgccgacggagtgggtaatgcctcaggaaattggcattgcgattccacatggctgggcgacagagtcatcaccaccagcacccgaacatgggccttgcccacctataacaaccacctctacaagcaaatctccagtgcttcaacgggggccagcaacgacaaccactacttcggctacagcaccccctgggggtattttgatttcaacagattccactgccacttttcaccacgtgactggcagcgactcatcacaacaattgggggattccggcctaagcgactcaacttcaagctcttcaacattcaggtcaaagaggttacggacaacaatggagtcaagaccatcgccaataaccttaccagcacggtccaggtcttcacggactcggagtaccagttgccgtacgtcctcggctctgcgcaccagggctgcctccctccgttcccggcggacgtgttcatgattccgcagtacggctacctaacgctcaacaatggcagccaggcagtgggacggtcatccttttactgcctggaatatttcccatcgcagatgctgagaacgggcaacaactttaccttcagctacacctttgaggacgttcctttccacagcagctacgctcacagccagagtctggaccggctgatgaatcctctgattgaccagtacctgtactacttgtctcggactcaaacaacaggaggcacggcaaatacgcagactctgggcttcagccaaggtgggcctaatacaatggccaatcaggcaaagaactggctgccaggaccctgttaccgccaacaacgcgtctcaacgacaaccgggcaaaacaacaatagcaactttgcctggactgctgggaccaaataccatctgaatggaagaaattcattggctaatcctggcatcgctatggcaacacacaaagacgacaaggagcgtttttttcccagtaacgggatcctgatttttggcaaacaaaatgctgccagagacaatgcggattacagcgatgtcatgctcaccagcgaggaagaaatcaaaaccactaaccctgtggctacagaggaatacggtatcgtggcagataacttgcagcagcaaaacacggctcctcaaattggaactgtcaacagccagggggccttacccggtatggtctggcagaaccgggacgtgtacctgcagggtcccatctgggccaagattcctcacacggacggcaacttccacccgtctccgctgatgggcggctttggcctgaaacatcctccgcctcagatcctgatcaagaacacgcctgtacctgcggatcctccgaccaccttcaaccagtcaaagctgaactctttcatcacgcaatacagcaccggacaggtcagcgtggaaattgaatgggagctgcagaaggaaaacagcaagcgctggaaccccgagatccagtacacctccaactactacaaatctacaagtgtggactttgctgttaatacagaaggcgtgtactctgaaccccaccccattggcacccgttacctcacccgtcccctgtaa

SEQ ID NO: 1097 - DNA, 2211 bp, Artificial Sequence
  Description of Artificial Sequence: Synthetic polynucleotide
atggctgccgatggttatcttccagattggctcgaggacactctctctgaaggaataagacagtggtggaagctcaaacctggcccaccaccaccaaagcccgcagagcggcataaggacgacggccggggtctggtgcttcctggctacaagtacctcggacccttcaacggactcgacaagggggagcccgtcaacgcggcggacgcagcggccctcgagcacgacaaggcctacgaccagcagctcaaagcgggtgacaatccgtacctgcggtataaccacgccgacgccgagtttcaggagcgtctgcaagaagatacgtcttttgggggcaacctcggacgagcagtcttccaggcgaaaaagagggttcttgaacctctgggcctggttgaggaacctgttaagacggctccgggaaaaaagaggccggtagagcagtcgccacaagagccagactcctcctcgggcatcggcaagaaaggccagcagcccgctaaaaagagactcaattttggtcagactggcgactcagagtcagtccccgacccacaacctctcggagaacctccagcaacccccgctgctgtgggacctactacaatggcttcaggcggtggcgcaccaatggcagacaataacgaaggcgccgacggagtgggtaatgcctcaggaaattggcattgcgattccacatggatgggcgacagagtcatcaccaccagcacccgaacatgggccttgcccacctataacaaccacctctacaagcaaatctccagtgcttcaacgggggccagcaacgacaaccactacttcggctacagcaccccctgggggtattttgactttaacagattccactgccacttttcaccacgtgactggcagcgactcatcaacaacaactggggattccggcctaagcgactcaacttcaagctcttcaacattcaggtcaaggaggtcacgcagaatgaaggcaccaagaccatcgccaataacctcaccagcaccatccaggtgtttacggactcggagtaccagctgccgtacgttctcggctccgcccaccagggctgcctgcctccgttcccggcggacgtgttcatgatcccccagtacggctacctaacactcaacaacggtagtcaggccgtgggacgctcctccttctactgcctggaatactttccttcgcagatgctgagaaccggcaacaacttccagtttacttacaccttcgaggacgtgcctttccacagcagctacgcgcacagccagagcttggaccggctgatgaatcctctgattgaccagtacctgtactacttgtctcggactcaaacaacaggaggcacggcaaatacgcagactctgggcttcagccaaggtgggcctaatacaatggccaatcacgcaaagaactggctgccaggaccctgttaccgccaacaacgcgtctcaacgacaaccgggcaaaacaacaatagcaactttgcctggactgctgggaccaaataccatctgaatggaagaaattcattggctaatcctggcatcgctatggcaacacacaaagacgacaaggagcgtttttttcccagtaacgggatcctgatttttggcaaacaaaatgctgccagagacaatgcggattacagcgatgtcatgctcaccagcgaggaagaaatcaaaaccactaaccctgtggctacagaggaatacggtatcgtggcagataacttgcagcagcaaaacacggctcctcaaattggaactgtcaacagccagggggccttacccggtatggtctggcagaaccgggacgtgtacctgcagggtcccatctgggccaagattcctcacacggacggcaacttccacccgtctccgctgatgggcggcttcggcctgaaacatcctccgcctcagatcctgatcaagaacacgcctgtacctgcggatcctccgaccaccttcaaccagtcaaagctgaactctttcatcacgcaatacagcaccggacaggtcagcgtggaaattgaatgggagctgcagaaggaaaacagcaagcgctggaaccccgagatccagtacacctccaactactacaaatctacaagtgtggactttgctgttaatacagaaggcgtgtactctgaaccccaccccattggcacccgttacctcacccgtcccctgtaa

SEQ ID NO: 1098 - DNA, 2214 bp, Artificial Sequence
  Description of Artificial Sequence: Synthetic polynucleotide
atggctgccgatggttatcttccagattggctcgaggacaacctctctcagggcattcgcgagtggtgggacttgaaacctggagccccgaaacccaaagccaaccagcaaaagcaggacgacggccggggtctggtgcttcctggctacaagtacctcggacccttcaacggactcgacaagggggagcccgtcaacgcggcggacgcagcggccctcgagcacgacaaggcctacgaccagcagctcaaagcgggtgacaatccgtacctgcggtataaccacgccgacgccgagtttcaggagcgtctgcaagaagatacgtcttttgggggcaacctcggacgagcagtcttccaggccaagaagcgggttctcgaacctctcggtctggttgaggaaggcgctaagacggctcctggaaagaagagaccggtagagccatcaccccagcgttctccagactcctctacgggcatcggcaagaaaggccaacagcccgccagaaaaagactcaattttggtcagactggcgactcagagtcagttccagaccctcaacctctcggagaacctccagcagcgcccgctgctgtgggacctactacaatggcttcaggcggtggcgcaccaatggcagacaataacgaaggcgccgacggagtgggtagttcctcgggaaattggcattgcgattcccaatggctgggggacagagtcatcaccaccagcacccgaacctgggccctgcccacctacaacaaccacctctacaagcaaatctccagtgcttcaacgggggccagcaacgacaaccactacttcggctacagcaccccctgggggtattttgacttcaacagattccactgccacttttcaccacgtgactggcaaagactcatcaacaacaactggggattccggcccaagagactcagcttcaagctcttcaacatccaggtcaaggaggtcacgcagaatgaaggcaccaagaccatcgccaataacctcaccagcaccatccaggtgtttacggactcggagtaccagctgccgtacgttctcggctctgcccaccagggctgcctgcctccgttcccggcggacgtgttcatgattccccagtacgggtacctgactctgaacaatggcagtcaggccgtgggccgttcctccttctactgcctggagtactttccttctcaaatgctgagaaccggcaacaacttccagtttacttacaccttcgaggacgtgcctttccacagcagctacgcccacagccagagcttggaccggctgatgaatcctctgattgaccagtacctgtactacttgtctcggactcaaacaacaggaggcacgacaaatgcgcagactctgggcttcagccaaggtgggcctaatacaatggccaatcaggcaaagaactggctgccaggaccctgttaccgccaacaacgcgtctcaacgacaaccgggcaaaacaacaatagcaactttgcctggactgctgggaccaaataccatctgaatggaagaaattcattggctaatcctggcatcgctatggcaacacacaaagacgacaaggagcgtttttttcccagtaacgggatcctgatttttggcaaacaaaatgctgccagagacaatgcggattacagcgatgtcatgctcaccagcgaggaagaaatcaaaaccactaaccctgtggctacagaggaatacggtatcgtggcagataacttgcagcagcaaaacacggctcctcaaattggaactgtcaacagccagggggccttacccggtatggtctggcagaaccgggacgtgtacctgcagggtcccatctgggccaagattcctcacacggacggcaacttccacccgtctccgctgatgggcggctttggcctgaaacatcctccgcctcagatcctgatcaagaacacgcctgtacctgcggatcctccgaccaccttcaaccagtcaaagctgaactctttcatcacacagtactccacgggacaggtcagcgtggaaattgaatgggagctgcagaaggaaaacagcaagcgctggaacccggagatccagtacacttccaactactacaaatctacaaatgtggactttgctgttaacacagaaggcgtgtactctgaaccccaccccattggcacccgttacctcacccgtcccctgtaa

SEQ ID NO: 1099 - DNA, 2211 bp, Artificial Sequence
  Description of Artificial Sequence: Synthetic polynucleotide
atggctgccgatggttatcttccagattggctcgaggacaacctctctgagggcattcgcgagtggtgggacttgaaacctggagccccgaaacccaaagccaaccagcaaaagcaggacgacggccggggtctggtgcttcctggctacaagtacctcggacccttcaacggactcgacaagggggagcccgtcaacgcggcggacgcagcggccctcgagcacgacaaggcctacgaccagcagctcaaagcgggtgacaatccgtacctgcggtataaccacgccgacgccgagtttcaggagcgtctgcaagaagatacgtcttttgggggcaacctcgggcgagcagtcttccaggccaagaagagggttctcgaaccttttggtctggttgaggaaggcgctaagacggctcctggaaagaaacgtccggtagagcagtcgccacaagagccagactcctcctcgggcatcggcaagacaggccagcagcccgctaaaaagagactcaatttcggtcagactggcgacacagagtcagtcccagaccctcaaccaatcggagaacctcccgcagccccctcaggtgtgggacctaatacaatggctgcaggcggtggcgcaccaatggcagacaataacgaaggcgccgacggagtgggtagttcctcgggaaattggcattgcgattccacatggatgggtgacagagtcatcaccaccagcacccgaacctgggccctgcccacctacaataaccacctctacaagcaaatctccagtgcttcaacgggggccagcaacgacaaccactacttcggctacagcaccccctgggggtattttgacttcaacagattccactgccacttctcaccacgtgactggcagcgactcatcaacaacaactggggattccggcctaagcgactcaacttcaagctcttcaacattcaggtcaaggaggtcacgcagaatgaaggcaccaagaccatcgccaataacctcaccagcaccatccaggtgtttacggactcggagtaccagctgccgtacgttctcggctctgcccaccagggctgcctgcctccgttcccggcggacgtgttcatgattccccagtacggctacctaacactcaacaacggtagtcaggccgtgggacgctcctccttctactgcctggaatactttccttcgcagatgctgagaaccggcaacaacttccagtttacttacaccttcgaggacgtgcctttccacagcagctacgcccacagccagagcttggaccggctgatgaatcctctgattgaccagtacctgtactacttgtctcggactcaaacaacaggaggcacggcaaatacgcagactctgggcttcagccaaggtgggcctaatacaatggccaatcaggcaaagaactggctgccaggaccctgttaccgccaacaacgcgtctcaacgacaaccgggcaaaacaacaatagcaactttgcctggactgctgggaccaaataccatctgaatggaagaaattcattggctaatcctggcatcgctatggcaacacacaaagacgacaaggagcgtttttttcccagtaacgggatcctgatttttggcaaacaaaatgctgccagagacaatgcggattacagcgatgtcatgctcaccagcgaggaagaaatcaaaaccactaaccctgtggctacagaggaatacggtatcgtggcagataacttgcagcagcaaaacacggctcctcaaattggaactgtcaacagccagggggccttacccggtatggtctggcagaaccgggacgtgtacctgcagggtcccatctgggccaagattcctcacacggacggcaacttccacccgtctccgctgatgggcggctttggcctgaaacatcctccgcctcagatcctgatcaagaacacgcctgtacctgcggatcctccgaccaccttcaaccagtcaaagctgaactctttcatcacacagtactccacgggacaggtcagcgtggaaattgaatgggagctgcagaaggaaaacagcaagcgctggaacccggagatccagtacacttccaactactacaaatctacaaatgtggactttgctgttaacacagaaggcgtgtactctgaaccccaccccattggcacccgttacttcacccgtcccctgtaa

SEQ ID NO: 1100 - DNA, 2211 bp, Artificial Sequence
  Description of Artificial Sequence: Synthetic polynucleotide
atggctgccgatggttatcttccagattggctcgaggacaacctctctgagggcattcgcgagtggtgggacttgaaacctggagccccgaaacccaaagccaaccagcaaaagcaggacgacggccggggtctggtgcttcctggctacaagtacctcggacccttcaacggactcgacaagggggagcccgtcaacgcggcggacgcagcggccctcgagcacgacaaggcctacgaccagcagctcaaagcgggtgacaatccgtacctgcggtataaccacgccgacgccgagtttcaggagcgtctgcaagaagatacgtcttttgggggcaacctcgggcgagcagtcttccaggccaagaagcgggttctcgaacctctcggtctggttgaggaaggcgctaagacggctcctggaaagaaacgtccggtagagcagtcgccacaagagccagactcctcctcgggcatcggcaagacaggccagcagcccgctaaaaaaagactcaattttggtcagactggcgactcagagtcagttccagaccctcaacctctcggagaacctccagcaacccccgctgctgtgggacctactacaatggcttcaggtggtggcgcaccaatggcagacaataacgagggcgccgacggagtgggtaattcctcgggaaattggcattgcgattccacatggatgggcgacagagtcatcaccaccagcacccgaacctgggccctgcccacctacaacaatcacctctacaagcaaatctccagtgcttcaacgggggccagcaacgacaaccactacttcggctacagcaccccctgggggtattttgacttcaacagattccactgccacttctcaccacgtgactggcagcgactcatcaacaacaactggggattccggcctaagcgactcaacttcaagctcttcaacattcaggtcaaagaggttacggacaacaatggagtcaagaccatcgccaataaccttaccagcacggtccaggtcttcacggactcggagtaccagttgccgtacgtcctcggctctgcgcaccagggctgcctccctccgttcccggcggacgtgttcatgattccgcagtacggctacctaacgctcaacaacggtagtcaggccgtgggacgctcctccttctactgcctggaatactttccttcgcagatgctgagaaccggcaacaacttccagtttacttacaccttcgaggacgtgcctttccacagcagctacgcccacagccagagcttggaccggctgatgaatcctctgattgaccagtacctgtactacttgtctcggactcaaacaacaggaggcacggcaaatacgcagactctgggcttcagccaaggtgggcctaatacaatggccaatcaggcaaagaactggctgccaggaccctgttaccgccaacaacgcgtctcgacgacaaccgggcaaaacaacaatagcaactttgcctggactgctgggaccaaataccatctgaatggaagaaattcattggctaatcctggcatcgctatggcaacacacaaagacgacaaggagcgtttttttcccagtaacgggatcctgatttttggcaaacaaaatgctgccagagacaatgcggattacagcgatgtcatgctcaccagcgaggaagaaatcaaaaccactaaccctgtggctacagaggaatacggtatcgtggcagataacttgcagcagcaaaacacggctcctcaaattggaactgtcaacagccagggggccttacccggtatggtttggcagaaccgggacgtgtacctgcagggtcccatctgggccaagattcctcacacggacggcaacttccacccgtctccgctgatgggcggctttggcctgaaacatcctccgcctcagatcctgatcaagaacacgcctgtacctgcggatcctccgaccaccttcaaccagtcaaagctgaactctttcatcacacagtactccacgggacaggtcagcgtggaaattgaatgggagctgcagaaggaaaacagcaagcgctggaacccggagatccagtacacttccaactactacaaatctacaaatgtggactttgctgttaacacagaaggcgtgtactctgaaccccaccccattggcacccgttacctcacccgtcccctgtaa

SEQ ID NO: 1101 - DNA, 2211 bp, Artificial Sequence
  Description of Artificial Sequence: Synthetic polynucleotide
atggctgccgatggttatcttccagattggctcgaggacaacctctctgagggcattcgcgagtggtgggacttgaaacctggagccccgaagcccaaagccaaccagcaaaagcaggacgacggccggggtctggtgcttcctggctacaagtacctcggacccttcaacggactcgacaagggggagcccgtcaacgcggcggacgcagcggccctcgagcacgacaaggcctacgaccagcagctcaaagcgggtgacaatccgtacctgcggtataaccacgccgacgccgagtttcaggagcgtctgcaagaagatacgtcttttgggggcaacctcgggcgagcagtcttccaggccaagaagcgggttctcgaacctctcggtctggttgaggaaggcgctaagacggctcctggaaagaaacgtccggtagagcagtcaccacaagagccagactcctcctcgggcatcggcaagacaggccagcagcccgctaaaaagagactcaattttggtcagactggcgactcagagtcagtccccgacccacaacctctcggagaacctccagcaacccccgctgctgtgggacctactacaatggcttcaggcggtggcgcaccaatggcggacaataacgaaggcgccgatggagtgggtaatgcctcaggaaattggcattgcgattccacatggctgggcgacagagtcatcaccaccagcacccgaacatgggccttgcccacctataacaaccacctctacaagcaaatctccagtgcttcaacgggggccagcaacgacaaccactacttcggctacagcaccccctgggggtattttgactttaacagattccactgccacttctcaccacgtgactggcagcgactcatcaacaacaactggggattccggcccaagagactcaacttcaagctcttcaacatccaggtcaaggaggtcacgcagaatgaaggcaccaagaccatcgccaataacctcaccagcaccatccaggtgtttacggactcggagtaccagctgccgtacgttctcggctctgcccaccagggctgcctgcctccgttcccggcggacgtgttcatgattccccagtacggctacctgactctgaacaatggcagtcaggccgtgggccgttcctccttctactgcctagagtactttccttctcaaatgctgagaacgggcaacaactttgagttcagctaccagtttgaggacgtgccttttcacagcagctacgcgcacagccaaagcctggaccggctgatgaatcctctgattgaccagtacctgtactacttgtctcggactcaaacaacaggaggcacggcaaatacgcagactctgggcttcagccaaggtgggcctaatacaatggccaatcaggcaaagaactggctgccaggaccctgttaccgccaacaacgcgtctcaacgacaaccgggcaaaacaacaatagcaactttgcctggactgctgggaccaaataccatatgaatggaagaaattcattggttaatcctggcatcgctatggcaacacacaaagacgacaaggagcgtttttttcccagtaacgggatcctgatttttggcaaacaaaatgttgccagagacaatgcggattacagcgatgtcatgctcaccagcgaggaagaaatcaaaaccactaaccctgtggctacagaggaatacggtattgtggcagataacttgcagcagcaaaacacggctcctcaaattggaactgtcaacagccagggggccttacccggtatggtctggcagaaccgggacgtgtacctgcagggtcccatctgggccaagattcctcacacggacggcaacttccacccgtcgccgctgatgggcggctttggcctgaaacatcctccgcctcagatcctgatcaagaacacgcctgtacctgcggatcctccgaccaccttcaaccagtcaaagctgaactctttcatcacgcaatacagcaccggacaggtcagcgtggaaattgaatgggagctgcagaaggaaaacagcaagcgctggaaccccgagatccagtacacctccaactactacaaatctacaagtgtggactttgctgttaatacagaaggcgtgtactctgaaccccaccccattggcacccgttacctcacccgtcccctgtaa

SEQ ID NO: 1102 - protein, 736 aa, Artificial Sequence
  Description of Artificial Sequence: Synthetic polypeptide
MAADGYLPDWLEDTLSEGIRQWWKLKPGPPPPKPAERHKDDSRGLVLPGYKYLGPFNGLDKGEPVNEADAAALEHDKAYDRQLDSGDNPYLKYNHADAEFQERLKEDTSFGGNLGRAVFQAKKRVLEPLGLVEEPVKTAPGKKRPVEQSPQEPDSSSGIGKKGQQPAKKRLNFGQTGDSESVPDPQPLGEPPATPAAVGPTTMASGGGAPMADNNEGADGVGNASGNWHCDSTWMGDRVITTSTRTWALPTYNNHLYKQISSASTGASNDNHYFGYSTPWGYFDFNRFHCHFSPRDWQRLINNNWGFRPKRLNFRLFNIQVKEVTDNNGVKTIANNLTSTVQVFTDSEYQLPYVLGSAHQGCLPPFPADVFMIPQYGYLTLNNGSQAVGRSSFYCLEYFPSQMLRTGNNFTFSYTFEEVPFHSSYAHSQSLDRLMNPLIDQYLYYLSRTQTTGGTANTQTLGFSQGGPNTMANQAKNWLPGPCYRQQRVSTTTGQNNNSNFAWTAGTKYHLNGRNSLANPGIAMATHKDDKERFFPSNGILIFGKQNAARDNADYSDVMLTSEEEIKTTNPVATEEYGIVADNLQQQNTAPQIGTVNSQGALPGMVWQNRDVYLQGPIWAKIPHTDGNFHPSPLMGGFGLKHPPPQILIKNTPVPADPPTTFNQSKLNSFITQYSTGQVSVEIEWELQKENSKRWNPEIQYTSNYYKSTSVDFAVNTEGVYSEPHPIGTRYLTRPL

SEQ ID NO: 1103 - protein, 736 aa, Artificial Sequence
  Description of Artificial Sequence: Synthetic polypeptide
MAADGYLPDWLEDNLSEGIREWWDLKPASPKPKANQQKQDDGRGLVLPGYKYLGPFNGLDKGEPVNAADAAALEHDKAYDQQLKAGDNPYLRYNHADAEFQERLQEDTSFGGNLGRAVFQAKKRLLEPLGLVEEAAKTAPGKKRPVEQSPQEPDSSAGIGKSGAQPAKKRLNFGQTGGTESVPDPQPLGEPPAAPSGVGPNTMAAGGGAPMADNNEGADGVGSSSGNWHCDSTWLGDRVITTSTRTWALPTYNNHLYKQISSASTGASNDNHYFGYSTPWGYFDFNRFHCHFSPRDWQRLINNNWGFRPKRLSFKLFNIQVKEVTQNEGTKTIANNLTSTIQVFTDSEYQLPYVLGSAHQGCLPPFPADVFMIPQYGYLTLNNGSQAVGRSSFYCLEYFPSQMLRTGNNFQFTYTFEDVPFHSSYAHSQSLDRLMNPLIDQYLYYLSRTQTTGGTANTQTLGFSQGGPNTMANQAKNWLPGPCYRQQRVSTTTGQNNNSNFAWTAGTKYHLNGRNSLANPGIAMATHKDDKERFFPSNGILIFGKQNAARDNADYSDVMLTSEEEIKTTNPVATEEYGIVADNLQQQNTAPQIGTVNSQGALPGMVWQNRDVYLQGPIWAKIPHTDGNFHPSPLMGGFGLKHPPPQILIKNTPVPADPPTTFNQSKLNSFITQYSTGQVSVEIEWELQKENSKRWNPEIQYTSNYYKSTSVDFAVNTEGVYSEPHPIGTRYLTRPL

SEQ ID NO: 1104 - protein, 736 aa, Artificial Sequence; identical to SEQ ID NO: 1043
  Description of Artificial Sequence: Synthetic polypeptide

SEQ ID NO: 1105 - protein, 736 aa, Artificial Sequence
  Description of Artificial Sequence: Synthetic polypeptide
MAADGYLPDWLEDNLSEGIREWWDLEPGAPKPKANQQKQDDGRGLVLPGYKYLGPFNGLDKGEPVNAADAAALEHDKAYDQQLKAGDNPYLRYNHADAEFQERLQEDTSFGGNLGRAVFQAKKRVLEPLGLVEEGAKTAPGKKRPVEQSPQEPDSSSGIGKTGQQPAKKRLNFGQTGDSESVPDPQPLGEPPATPAAVGPTTMASGGGAPMADNNEGADGVGNASGNWHCDSTWLGDRVITTSTRTWALPTYNNHLYKQISSASTGASNDNHYFGYSTPWGYFDFNRFHCHFSPRDWQRLINNNWGFRPKRLNFKLFNIQVKEVTDNNGVKTIANNLTSTVQVFTDSEYQLPYVLGSAHQGCLPPFPADVFMIPQYGYLTLNNGSQAVGRSSFYCLEYFPSQMLRTGNNFQFTYTFEDVPFHSSYAHSQSLDRLMNPLIDQYLYYLSRTQTTGGTANTQTLGFSQGGPNTMANQAKNWLPGPCYRQQRVSTTTGQNNNSNFAWTAGTKYHLNGRNSLANPGIAMATHKDDKERFFPSNGILIFGKQNAARDNADYSDVMLTSEEEIKTTNPVATEEYGIVADNLQQQNTAPQIGTVNSQGALPGMVWQNRDVYLQGPIWAKIPHTDGNFHPSPLMGGFGLKHPPPQILIKNTPVPADPPTTFNQSKLNSFITQYSTGQVSVEIEWELQKENSKRWNPEIQYTSNYYKSTSVDFAVNTEGVYSEPHPIGTRYLTRPL

SEQ ID NO: 1106 - protein, 736 aa, Artificial Sequence; identical to SEQ ID NO: 1043
  Description of Artificial Sequence: Synthetic polypeptide

SEQ ID NO: 1107 - protein, 736 aa, Artificial Sequence
  Description of Artificial Sequence: Synthetic polypeptide
MAADGYLPDWLEDTLSEGIRQWWKLKPGPPPPKPAERHKDDSRGLVLPGYKYLGPFNGLDKGEPVNEADAAALEHDKAYDRQLDSGDNPYLKYNHADAEFQERLKEDTSFGGNLGRAVFQAKKRVLEPLGLVEEPVKTAPGKKRPVEQSPQEPDSSSGIGKKGQQPAKKRLNFGQTGDSESVPDPQPLGEPPATPAAVGPTTMASGGGAPMADNNEGADGVGNASGNWHCDSTWLGDRVITTSTRTWALPTYNNHLYKQISSASTGASNDNHYFGYSTPWGYFDFNRFHCHFSPRDWQRLINNNWGFRPKRLNFKLFNIQVKEVTDNNGVKTIANNLTSTVQVFTDSDYQLPYVLGSAHQGCLPPFPADVFMIPQYGYLTLNNGSQAVGRSSFYCLEYFPSQMLRTGNNFQFTYTFEDVPFHSSYAHSQSLDRLMNPLIDQYLYYLSRTQTTGGTANTQTLGFSQGGPNTMANQAKNWLPGPCYRQQRVSTTTGQNNNSNFAWTAGTKYHLNGRNSLANPGIAMATHKDDKERFFPSNGILIFGKQNAARDNADYSDVMLTSEEEIKTTNPVATEEYGIVADNLQQQNTAPQIGTVNSQGALPGMVWQNRDVYLQGPIWAKIPHTDGNFHPSPLMGGFGLKHPPPQILIKNTPVPADPPTTFNQSKLNSFITQYSTGQVSVEIEWELQKENSKRWNPEIQYTSNYYKSTSVDFAVNTEGVYSEPHPIGTRYLTRPL

SEQ ID NO: 1108 - protein, 734 aa, Artificial Sequence
  Description of Artificial Sequence: Synthetic polypeptide
MAADGYLPDWLEDTLSEGIRQWWKLKPGPPPPKPAERHKDDSRGLVLPGYKYLGPFNGLDKGEPVNEADAAALEHDKAYDQQLQAGDNPYLRYNHADAEFQERLQGDTSFGGNLGRAVFQAKKRLLEPLGLVEEAAKTAPGKKRPVEQSPQEPDSSAGIGKSGAQPAKKRLNFGQTGDTESVPDPQPIGEPPAAPSGVGSLTMASGGGAPVADNNEGADGVGSSSGNWHCDSQWLGDRVITTSTRTWALPTYNNHLYKQISSASTGASNDNHYFGYSTPWGYFDFNRFHCHFSPRDWQRLINNNWGFRPKRLSFKLFNHPGQGGHAERHQDHRQPHQHIQVFTDSEYQLPYVLGSAHQGCLPPFPADVFMIPQYGYLTLNNGSQAVGRSSFYCLEYFPSQMLRTGNNFQFTYTFEDVPFHSSYAHSQSLDRLMNPLIDQYLYYLSRTQTTGGTANTQTLGFSQGGPNTMANQAKNWLPGPCYRQQRVSTTTGQNNNSNFAWTAGTKYHLNGRNSLGNPGIAMATHKDDKERFFPSNGILIFGKQNAARDNADYSDVMLTSEEEIKTTNPVATEEYGIVADNLQQQNTAPQIGTVNSQGALPGMVWQNRDVYLQGPIWAKIPHTDGNFHPSPLMGGFGLKHPPPQILIKNTPVPADPPTAFNQSKLNSFITQYSTGQVSVEIEWELQKENSKRWNPEIQYTSNYYKSTSVDFAVNTEGVYSEPHPIGTRYLTRPL

SEQ ID NO: 1109 - protein, 737 aa, Artificial Sequence
  Description of Artificial Sequence: Synthetic polypeptide
MAADGYLPDWLEDNLSEGIREWWDLKHGAPKPKANQQKQDDGRGLVLPGYKYLGPFNGLDKGEPVNAADAAALEHDKAYDQQLKAGDNPYLRYNHADAEFQERLQEDTSFGGNLGRAVFQAKKRVLEPFGLVEEGAKTAPGKKRPVEQSPQEPDSSSGIGKTGQQPAKKRLNFGQTGDSESVPDPQPLGEPPATPAAVGPTTMASGGGAPMADNNEGADGVGNASGNWHCDSTWLGDRVITTSTRTWALPTYNNHLYKQISNGTSGGSTNDNTYFGYSTPWGYFDFNRFHCHFSPRDWQRLINNNWGFRPKRLNFKLFNIQVKEVTQNEGTKTIANNLTSTIQVFTDSEYQLPYVLGSAHQGCLPPFPADVFMIPQYGYLTLNNGSQAVGRSSFYCLEYFPSQMLRTGNNFTFSYTFEDVPFHSSYAHSQSLDRLMNPLIDQYLYYLSRTQTTGGTANTQTLGFSQGGPNTMANQAKNWLPGPCYRQQRVSTTTGQNNNSNFAWTAGTKYHLNGRNSLANPGIAMATHKDDKERFFPSNGILIFGKQNAARDNADYSDVMLTSEEEIKTTNPVATEEYGIVADNLQQQNTAPQIGTVNSQGALPGMVWQNRDVYLQGPIWAKIPHTDGNFHPSPLMGGFGLKHPPPQILIKNTPVPADPPTTFNQSKLNSFITQYSTGQVSVEIEWELQKENSKRWNPEIQYTSNYYKSTSVDFAVNTEGVYSDPHPIGTRYLTRPL

SEQ ID NO: 1110 - protein, 737 aa, Artificial Sequence
  Description of Artificial Sequence: Synthetic polypeptide
MAADGYLPDWLEDNLSEGIREWWALKPGAPKPKANQQKQDDGRGLVLPGYKYLGPFNGLDKGEPVNEADAAALEHDKAYDQQLKAGDNPYLRYNHADAEFQERLQEDTSFGGNLGRAVFQAKKRVLEPLGLVEEGAKTAPGKKRPVEPSPQRSPDSSTGIGKKGQQPARKRLNFGQTGDSESVPDPQPLGEPPAAPSGVGPNTMASGGGAPMADNNEGADGVGNSSGNWHCDSTWMGDRVITTSTRTWALPTYNNHLYKQISSASTGASNDNHYFGYSTPWGYFDFNRFHCHFSPRDWQRLINNNWGFRPKRLNFKLFNIQVKEVTQNEGTKTIANNLTSTIQVFTDSEYQLPYVLGSAHQGCLPPFPADVFMIPQYGYLTLNNGSQAVGRSSFYCLEYFPSQMLRTGNNFQFTYTFEDVPFHSSYAHSQSLDRLMNPLIDQYLYYLSRTQTTGGTANTQTLGFSQGGPNTMANQAKNWLPGPCYRQQRVSTTTGQNNNSNFAWTAGTKYHLNGRNSLANPGIAMATHKDDKERFFPSNGILIFGKQNAARDNADYSDVMLTSEEEIKTTNPVATEEYGIVADNLQQQNTAPQIGTVNSQGALPGMVWQNRDVYLQGPIWAKIPHTDGNFHPSPLMGGFGLKHPPPQILIKNTPVPADPPTTFNQSKLNSFITQYSTGQVSVEIEWELQKENSKRWNPEIQYTSNYYKSTSVDFAVNTEGVYSEPHPIGTRYLTRPL

SEQ ID NO: 1111 - protein, 736 aa, Artificial Sequence
  Description of Artificial Sequence: Synthetic polypeptide
  MOD_RES (226)..(226): Any naturally occurring amino acid
MAADGYLPDWLEDTLSEGIRQWWKLKPGPPPPKPAERHKDDSRGLVLPGYKYLGPFNGLDKGEPVNEADAAALEHDKAYDRQLDSGDNPYLKYNHADAEFQERLKEDTSFGGNLGRAVFQAKKRVLEPLGLVEEPVKTAPGKKRPVEQSPQEPDSSSGIGKKGQQPAKKRLNFGQTGDSESVPDPQPLGEPPATPAAVGPTTMASGGGAPMADNNEGADGVGNASXNWHCDSTWLGDRVITTSTRTWALPPITTTSTSKSPVLQRGRSNDNHYFGYSTPWGYFDFNRFHCHFSPRDWQRLINNNWGFRPKRLNFKLFNIQVKEVTDNNGVKTIANNLTSTVQVFTDSDYQLPYVLGSAHQGCLPPFPADVFMIPQYGYLTLNNGSQAVGRSSFYCLEYFPSQMLRTGNNFQFTYTFEDVPFHSSYAHSQSLDRLMNPLIDQYLYYLSRTQTTGGTANTQTLGFSQGGPNTMANQAKNWLPGPCYRQQRVSTTTGQNNNSNFAWTAGTKYHLNGRNSLANPGIAMATHKDDKERFFPSNGILIFGKQNAARDNADYSDVMLTSEEEIKTTNPVATEEYGIVADNLQQQNTAPQIGTVNSQGALPGMVWQNRDVYLQGPIWAKIPHTDGNFHPSPLMGGFGLKHPPPQILIKNTPVPADPPTTFNQSKLNSFITQYSTGQVSVEIEWELQKENSKRWNPEIQYTSNYYKSTNVDFAVNTEGVYSEPHPIGTRYLTRPL

SEQ ID NO: 1112 - protein, 736 aa, Artificial Sequence
  Description of Artificial Sequence: Synthetic polypeptide
  MOD_RES (239)..(239): Any naturally occurring amino acid
MAADGYLPDWLEDNLSEGIREWWDLKPGAPKPKANQQKQDDGRGLVLPGYKYLGPFNGLDKGEPVNAADAAALEHDKAYDQQLQAGDNPYLRYNHADAEFQERLQGDTSFGGNLGRAVFQAKKRVLEPLGLVEEAAKTAPGKKRPVEQSPQEPDSSAGIGKSGAQPAKKRLNFGQTGDTESVPDPQPIGEPPAAPSGVGPNTMAAGGGAPMADNNEGADGVGSSSGNWHCDSTWLGDRXITTSTRTWALPTYNNHLYKQISSASTGASNDNHYFGYSTPWGYFDFNRFHCHFSPRDWQRLINNNWGFRPKRLNFKLFNIQVKEVTDNNGVKTIANNLTSTVQVFTDSEYQLPYVLGSAHQGCLPPFPADVFMIPQYGYLTLNNGSQAVGRSSFYCLEYFPSQMLRTGNNFTFSYTFEDVPFHSSYAHSQSLDRLMNPLIDQYLYYLSRTQTTGGTANTQTLGFSQGGPNTMANQAKNWLPGPCYRQQRVSTTTGQNNNSNFAWTAGTKYHLNGRNSLANPGIAMATHKDDKERFFPSNGILIFGKQNAARDNADYSDVMLTSEEEIKTTNPVATEEYGIVADNFQQQNTAPQIGTVNSQGALPGMVWQNRDVYLQGPIWAKIPHTDGNFHPSPLMGGFGLKHPPPQILIKNTPVPADPPTTFNQSKLNSFITQYSTGQVSVEIEWELQKENSKRWNPEIQYTSNYYKSTSVDFAVNTEGVYSEPHPIGTRYLTRPL

SEQ ID NO: 1113 - protein, 736 aa, Artificial Sequence
  Description of Artificial Sequence: Synthetic polypeptide
MAADGYLPDWLEDNLSEGIREWWALKPGAPKPKANQQKQDDGRGLVLPGYKYLGPFNGLDKGEPVNEADAAALEHDKAYDQQLKAGDNPYLKYNHADAEFQERLQEDTSFGGNLGRAVFQAKKRLLEPLGLVEEAAKTAPGKKRPVEQSPQEPDSSAGIGKSGAQPAKKRLNFGQTGDTESVPDPQPLGEPPATPAAVGPTTMASGGGAPMADNNEGADGVGNASGNWHCDSTWLGDRVITTSTRTWALPTYNNHLYKQISSASTGASNDNHYFGYSTPWGYFDFNRFHCHFSPRDWQRLINNNWGFRPKRLSFKLFNIQVKEVTQNEGTKTIANNLTSTIQVFTDSEYQLPYVLGSAHQGCLPPFPADVFMIPQYGYLTLNNGSQAVGRSSFYCLEYFPSQMLRTGNNFQFTYTFEDVPFHSSYAHSQSLDRLMNPLIDQYLYYLSRTQTTGGTANTQTLGFSQGGPNTMANQAKNWLPGPCYRQQRVSTTTGQNNNSNFAWTAGTKYHLNGRNSLANPGIAMATHKDDKERFFPSNGILIFGKQNAARDNADYSDVMLTSEEEIKTTNPVATEEYGIVADNLQQQNTAPQIGTVNSQGALPGMVWQNRDVYLQGPIWAKIPHTDGNFHPSPLMGGFGLKHPPPQILIKNTPVPADPPTTFNQSKLNSFITQYSTGQVSVEIEWELQKENSKRWNPEIQYTSNYYKSTSVDFAVNTEGVYSEPHPIGTRYLTRPL

SEQ ID NO: 1114 - protein, 736 aa, Artificial Sequence
  Description of Artificial Sequence: Synthetic polypeptide
MAADGYLPDWLEDTLSEGIRQWWKLKPGPPPPKPAERHKDDSRGLVLPGYKYLGPFNGLDKGEPVNEADAAALEHDKAYDQQLQAGDNPYLRYNHADAEFQERLQGDTSFGGNLGRAVFQAKKRLLEPLGLVEEAAKTAPGKKRPVEQSPQEPDSSAGIGKSGAQPAKKRLNFGQTGDTESVPDPQPIGEPPAAPSGVGSLTMASGGGAPVADNNEGADGVGSSSGNWHCDSQWLGDRVITTSTRTWALPTYNNHLYKQISSASTGASNDNHYFGYSTPWGYFDFNRFHCHFSPRDWQRLINNNWGFRPKRLSFKLFNIQVKEVTQNEGTKTIANNLTSTIQVFTDSEYQLPYVLGSAHQGCLPPFPADVFMIPQYGYLTLNNGSQAVGRSSFYCLEYFPSQMLRTGNNFQFTYTFEDVPFHSSYAHSQSLDRLMNPLIDQYLYYLSRTQTTGGTANTQTLGFSQGGPNTMANQAKNWLPGPCYRQQRVSTTTGQNNNSNFAWTAGTKYHLNGRNSLANPGIAMATHKDDKERFFPSNGILIFGKQNAARDNADYSDVMLTSEEEIKTTNPVATEEYGIVADNLQQQNTAPQIGTVNSQGALPGMVWQNRDVYLQGPIWAKIPHTDGNFHPSPLMGGFGLKHPPPQILIKNTPVPADPPTTFNQSKLNSFITQYSTGQVSVEIEWELQKENSKRWNPEIQYTSNYYKSTSVDFAVNTEGVYSEPHPIGTRYLTRPL

SEQ ID NO: 1115 - protein, 738 aa, Artificial Sequence
  Description of Artificial Sequence: Synthetic polypeptide
MAADGYLPDWLEDNLSEGIRQWWKLKPGPPPPKPAERHKDDSRGLVLPGYKYLGPFNGLDKGEPVNAADAAALEHDKAYDQQLKAGDNPYLRYNHADAEFQERLQEDTSFGGNLGRAVFQAKKRVLEPLGLVEEGAKTAPGKKRPVEPSPQRSPDSSTGIGKKGQQPAKKRLNFGQTGDSESVPDPQPLGEPPATPAAVGPTTMASGGGAPMADNNEGADGVGNASGNWHCDSTWLGDRVITTSTRTWALPTYNNHLYKQISNGTSGGSTNDNTYFGCVTPWGYFDFNKFHCHFSPDDWQRLINNGWGFRTKRLNFKLFSMKVKKGTDNTGIKTIANNLTNTVHVFADSEYQLPYVLGSAHQGCLPPFPADVFMIPQYGYLTLNNGSQAVGRSSFYCLEYFPSQMLRTGNNFTFSYTFEDVPFHSSYAHSQSLDRLMNPLIDQYLYYLSRTQTTGGTANTQTLGFSQGGPNTMANQAKNWLPGPCYRQQRVSTTTGQNNNSNFAWTAGTKYHLNGRNSLANPGIAMATHKDDKERFFPSNGILIFGKQNAARDNADYSDVMLTSEEEIKTTNPVATEEYGIVADNLQQQNTAPQIGTVNSQGALPGMVWQNRDVYLQGPIWAKIPHTDGNFHPSPLMGGFGLKHPPPQILIKNTPVPADPPTTFNQSKLNSFITQYSTGQVSVEIEWELQKENSKRWNPEIQYTSNYYKSTSVDFAVNTEGVYSEPHPIGTRYLTRPL

SEQ ID NO: 1116 - protein, 737 aa, Artificial Sequence
  Description of Artificial Sequence: Synthetic polypeptide
MAADGYLPDWLEDTLSEGIRQWWKLKPGPPPPKPAERHKDDSRGLVLPGYKYLGPFNGLDKGEPVNAADAAALEHDKAYDQQLKAGDNPYLRYNHADAEFQERLQEDTSFGGNLGRAVFQAKKRVLEPLGLVEEGAKTAPGKKRPVEPSPQRSPDSSTGIGKKGQQPAKKRLNFGQTGDSESVPDPQPIGEPPAGPSGLGSGTMAAGGGAPMADNNEGADGVGSSSGNWHCDSTWLGDRVITTSTRTWALPTYNNHLYKQISSASTGASNDNHYFGYSTPWGYFDFNRFHCHFSPRDWQRLINNNWGFRPKRLNFKLFNIQVKEVTDNNGVKTIANNLTSTVQVFTDSEYQLPYVLGSAHQGCLPPFPADVFMIPQYGYLTLNNGSQAVGRSSFYCLEYFPSQMLRTGNNFTFSYTFEDVPFHSSYAHSQSLDRLMNPLIDQYLYYLSRTQTTGGTANTQTLGFSQGGPNTMANQAKNWLPGPCYRQQRVSTTTGQNNNSNFAWTAGTKYHLNGRNSLANPGIAMATHKDDKERFFPSNGILIFGKQNAARDNADYSDVMLTSEEEIKTTNPVATEEYGIVADNLQQQNTAPQIGTVNSQGALPGMVWQNRDVYLQGPIWAKILHTDGNFHPSPLMGGFGMKHPPPPILIKNTPVPADPPTTFNQSKLNSFITQYSTGQVSVEIEWELPKENSKRWNPEIQYTSNYYKSTSVDFAVNTEGVYYEPHPIGTRYLTPPL

SEQ ID NO: 1117 - protein, 737 aa, Artificial Sequence
  Description of Artificial Sequence: Synthetic polypeptide
MAADGYLPDWLEDNLSEGIREWWALKPGAPKPKANQQKQDDGRGLVLPGYKYLGPFNGLDKGEPVNAADAAALEHDKAYDQQLKAGDNPYLRYNHADAEFQERLQEDTSFGGNLGRAVFQAKKRVLEPLGLVEEGAKTAPGKKRPVEPSPQRSPDSSTGIGKKGQQPARKRLNFGQTGDSESVPDPQPLGEPPAAPSGVAPNTMAAGGGAPMADNNEGADGVGNASGNWHCDSTWLGDRVITTSTRTWALPTYNNHLYKQISSASTGASNDNHYFGYSTPWGYFDFNRFHCHFSPRDWQRLITTIGGFRPKRLNFKLFNIQVKEVTDNNGVKTIANNLTSTVQVFTDSEYQLPYVLGSAHQGCLPPFPADVFMIPQYGYLTLNNGSQAVGRSSFYCLEYFPSQMLRTGNNFTFSYTFEDVPFHSSYAHSQSLDRLMNPLIDQYLYYLSRTQTTGGTANTQTLGFSQGGPNTMANQAKNWLPGPCYRQQRVSTTTGQNNNSNFAWTAGTKYHLNGRNSLANPGIAMATHKDDKERFFPSNGILIFGKQNAARDNADYSDVMLTSEEEIKTTNPVATEEYGIVADNLQQQNTAPQIGTVNSQGALPGMVWQNRDVYLQGPIWAKIPHTDGNFHPSPLMGGFGLKHPPPQILIKNTPVPADPPTTFNQSKLNSFITQYSTGQVSVEIEWELQKENSKRWNPEIQYTSNYYKSTSVDFAVNTEGVYSEPHPIGTRYLTRPL

SEQ ID NO: 1118 - protein, 736 aa, Artificial Sequence
  Description of Artificial Sequence: Synthetic polypeptide
MAADGYLPDWLEDTLSEGIRQWWKLKPGPPPPKPAERHKDDGRGLVLPGYKYLGPFNGLDKGEPVNAADAAALEHDKAYDQQLKAGDNPYLRYNHADAEFQERLQEDTSFGGNLGRAVFQAKKRVLEPLGLVEEPVKTAPGKKRPVEQSPQEPDSSSGIGKKGQQPAKKRLNFGQTGDSESVPDPQPLGEPPATPAAVGPTTMASGGGAPMADNNEGADGVGNASGNWHCDSTWMGDRVITTSTRTWALPTYNNHLYKQISSASTGASNDNHYFGYSTPWGYFDFNRFHCHFSPRDWQRLINNNWGFRPKRLNFKLFNIQVKEVTQNEGTKTIANNLTSTIQVFTDSEYQLPYVLGSAHQGCLPPFPADVFMIPQYGYLTLNNGSQAVGRSSFYCLEYFPSQMLRTGNNFQFTYTFEDVPFHSSYAHSQSLDRLMNPLIDQYLYYLSRTQTTGGTANTQTLGFSQGGPNTMANHAKNWLPGPCYRQQRVSTTTGQNNNSNFAWTAGTKYHLNGRNSLANPGIAMATHKDDKERFFPSNGILIFGKQNAARDNADYSDVMLTSEEEIKTTNPVATEEYGIVADNLQQQNTAPQIGTVNSQGALPGMVWQNRDVYLQGPIWAKIPHTDGNFHPSPLMGGFGLKHPPPQILIKNTPVPADPPTTFNQSKLNSFITQYSTGQVSVEIEWELQKENSKRWNPEIQYTSNYYKSTSVDFAVNTEGVYSEPHPIGTRYLTRPL

SEQ ID NO: 1119 - protein, 737 aa, Artificial Sequence
  Description of Artificial Sequence: Synthetic polypeptide
MAADGYLPDWLEDNLSQGIREWWDLKPGAPKPKANQQKQDDGRGLVLPGYKYLGPFNGLDKGEPVNAADAAALEHDKAYDQQLKAGDNPYLRYNHADAEFQERLQEDTSFGGNLGRAVFQAKKRVLEPLGLVEEGAKTAPGKKRPVEPSPQRSPDSSTGIGKKGQQPARKRLNFGQTGDSESVPDPQPLGEPPAAPAAVGPTTMASGGGAPMADNNEGADGVGSSSGNWHCDSQWLGDRVITTSTRTWALPTYNNHLYKQISSASTGASNDNHYFGYSTPWGYFDFNRFHCHFSPRDWQRLINNNWGFRPKRLSFKLFNIQVKEVTQNEGTKTIANNLTSTIQVFTDSEYQLPYVLGSAHQGCLPPFPADVFMIPQYGYLTLNNGSQAVGRSSFYCLEYFPSQMLRTGNNFQFTYTFEDVPFHSSYAHSQSLDRLMNPLIDQYLYYLSRTQTTGGTTNAQTLGFSQGGPNTMANQAKNWLPGPCYRQQRVSTTTGQNNNSNFAWTAGTKYHLNGRNSLANPGIAMATHKDDKERFFPSNGILIFGKQNAARDNADYSDVMLTSEEEIKTTNPVATEEYGIVADNLQQQNTAPQIGTVNSQGALPGMVWQNRDVYLQGPIWAKIPHTDGNFHPSPLMGGFGLKHPPPQILIKNTPVPADPPTTFNQSKLNSFITQYSTGQVSVEIEWELQKENSKRWNPEIQYTSNYYKSTNVDFAVNTEGVYSEPHPIGTRYLTRPL

SEQ ID NO: 1120 - protein, 736 aa, Artificial Sequence
  Description of Artificial Sequence: Synthetic polypeptide
MAADGYLPDWLEDNLSEGIREWWDLKPGAPKPKANQQKQDDGRGLVLPGYKYLGPFNGLDKGEPVNAADAAALEHDKAYDQQLKAGDNPYLRYNHADAEFQERLQEDTSFGGNLGRAVFQAKKRVLEPFGLVEEGAKTAPGKKRPVEQSPQEPDSSSGIGKTGQQPAKKRLNFGQTGDTESVPDPQPIGEPPAAPSGVGPNTMAAGGGAPMADNNEGADGVGSSSGNWHCDSTWMGDRVITTSTRTWALPTYNNHLYKQISSASTGASNDNHYFGYSTPWGYFDFNRFHCHFSPRDWQRLINNNWGFRPKRLNFKLFNIQVKEVTQNEGTKTIANNLTSTIQVFTDSEYQLPYVLGSAHQGCLPPFPADVFMIPQYGYLTLNNGSQAVGRSSFYCLEYFPSQMLRTGNNFQFTYTFEDVPFHSSYAHSQSLDRLMNPLIDQYLYYLSRTQTTGGTANTQTLGFSQGGPNTMANQAKNWLPGPCYRQQRVSTTTGQNNNSNFAWTAGTKYHLNGRNSLANPGIAMATHKDDKERFFPSNGILIFGKQNAARDNADYSDVMLTSEEEIKTTNPVATEEYGIVADNLQQQNTAPQIGTVNSQGALPGMVWQNRDVYLQGPIWAKIPHTDGNFHPSPLMGGFGLKHPPPQILIKNTPVPADPPTTFNQSKLNSFITQYSTGQVSVEIEWELQKENSKRWNPEIQYTSNYYKSTNVDFAVNTEGVYSEPHPIGTRYFTRPL

SEQ ID NO: 1121 - protein, 736 aa, Artificial Sequence
  Description of Artificial Sequence: Synthetic polypeptide
MAADGYLPDWLEDNLSEGIREWWDLKPGAPKPKANQQKQDDGRGLVLPGYKYLGPFNGLDKGEPVNAADAAALEHDKAYDQQLKAGDNPYLRYNHADAEFQERLQEDTSFGGNLGRAVFQAKKRVLEPLGLVEEGAKTAPGKKRPVEQSPQEPDSSSGIGKTGQQPAKKRLNFGQTGDSESVPDPQPLGEPPATPAAVGPTTMASGGGAPMADNNEGADGVGNSSGNWHCDSTWMGDRVITTSTRTWALPTYNNHLYKQISSASTGASNDNHYFGYSTPWGYFDFNRFHCHFSPRDWQRLINNNWGFRPKRLNFKLFNIQVKEVTDNNGVKTIANNLTSTVQVFTDSEYQLPYVLGSAHQGCLPPFPADVFMIPQYGYLTLNNGSQAVGRSSFYCLEYFPSQMLRTGNNFQFTYTFEDVPFHSSYAHSQSLDRLMNPLIDQYLYYLSRTQTTGGTANTQTLGFSQGGPNTMANQAKNWLPGPCYRQQRVSTTTGQNNNSNFAWTAGTKYHLNGRNSLANPGIAMATHKDDKERFFPSNGILIFGKQNAARDNADYSDVMLTSEEEIKTTNPVATEEYGIVADNLQQQNTAPQIGTVNSQGALPGMVWQNRDVYLQGPIWAKIPHTDGNFHPSPLMGGFGLKHPPPQILIKNTPVPADPPTTFNQSKLNSFITQYSTGQVSVEIEWELQKENSKRWNPEIQYTSNYYKSTNVDFAVNTEGVYSEPHPIGTRYLTRPL

SEQ ID NO: 1122 - protein, 736 aa, Artificial Sequence
  Description of Artificial Sequence: Synthetic polypeptide
MAADGYLPDWLEDNLSEGIREWWDLKPGAPKPKANQQKQDDGRGLVLPGYKYLGPFNGLDKGEPVNAADAAALEHDKAYDQQLKAGDNPYLRYNHADAEFQERLQEDTSFGGNLGRAVFQAKKRVLEPLGLVEEGAKTAPGKKRPVEQSPQEPDSSSGIGKTGQQPAKKRLNFGQTGDSESVPDPQPLGEPPATPAAVGPTTMASGGGAPMADNNEGADGVGNASGNWHCDSTWLGDRVITTSTRTWALPTYNNHLYKQISSASTGASNDNHYFGYSTPWGYFDFNRFHCHFSPRDWQRLINNNWGFRPKRLNFKLFNIQVKEVTQNEGTKTIANNLTSTIQVFTDSEYQLPYVLGSAHQGCLPPFPADVFMIPQYGYLTLNNGSQAVGRSSFYCLEYFPSQMLRTGNNFEFSYQFEDVPFHSSYAHSQSLDRLMNPLIDQYLYYLSRTQTTGGTANTQTLGFSQGGPNTMANQAKNWLPGPCYRQQRVSTTTGQNNNSNFAWTAGTKYHMNGRNSLVNPGIAMATHKDDKERFFPSNGILIFGKQNVARDNADYSDVMLTSEEEIKTTNPVATEEYGIVADNLQQQNTAPQIGTVNSQGALPGMVWQNRDVYLQGPIWAKIPHTDGNFHPSPLMGGFGLKHPPPQILIKNTPVPADPPTTFNQSKLNSFITQYSTGQVSVEIEWELQKENSKRWNPEIQYTSNYYKSTSVDFAVNTEGVYSEPHPIGTRYLTRPL

SEQ ID NO: 1123 - DNA, 2217 bp, Artificial Sequence
  Description of Artificial Sequence: Synthetic polynucleotide
atggctgccgatggttatcttccagattggctcgaggacaacctctctgagggcattcgcgagtggtgggcgctgaaacctggagccccgaagcccaaagccaaccagcaaaagcaggacgacggccggggtctggtgcttcctggctacaagtacctcggacccttcaacggactcgacaagggggagcccgtcaacgcggcggacgcagcggccctcgagcacgacaaggcctacgaccagcagctgcaggcgggtgacaatccgtacctgcggtataaccacgccgacgccgagtttcaggagcgtctgcaagaagatacgtcttttgggggcaacctcgggcgagcagtcttccaggccaagaagcgggttctcgaacctctcggtctggttgaggaaggcgctaagacggctcctggaaagaagagaccggtagagccatcaccccagcgttctccagactcctctacgggcatcggcaagaaaggccaacagcccgccagaaaaagactcaattttggtcagactggcgactcagagtcagttccagaccctcaacctctcggagaacctccagcagcgccctctggtgtgggacctaatacaatggctgcaggcggtggcgcaccaatggcagacaataacgaaggcgccgacggagtgggtagttcctcgggaaattggcattgcgattccacatggctgggcgacagagtcatcaccaccagcacccgaacctgggccctgcccacctacaacaaccacctctacaagcaaatctccaacgggacatcgggaggagccaccaacgacaacacctacttcggctacagcaccccctgggggtattttgactttaacagattccactgccacttttcaccacgtgactggcagcgactcatcaacaacaactggggattccggcccaagagactcagcttcaagctcttcaacatccaggtcaaggaggtcacgcagaatgaaggcaccaagaccatcgccaataacctcaccagcaccatccaggtgtttacggactcggagtaccagctgccgtacgttctcggctctgcccaccagggctgcctgcctccgttcccggcggacgtgttcatgattccccagtacggctacctaacactcaacaacggtagtcaggccgtgggacgctcctccttctactgcctggaatactttccttcgcagatgctgagaaccggcaacaacttccagtttacttacaccttcgaggacgtgcctttccacagcagctacgcccacagccagagcttggaccggctgatgaatcctctgattgaccagtacctgtactacttgtctcggactcaaacaacaggaggcacggcaaatacgcagactctgggcttcagccaaggtgggcctaatacaatggccaatcaggcaaagaactggctgccaggaccctgttaccgccaacaacgcgtctcaacgacaaccgggcaaaacaacaatagcaactttgcctggactgctgggaccaaataccatctgaatggaagaaattcattggctaatcctggcatcgctatggcaacacacaaagacgacgaggagcgtttttttcccagtaacgggatcctgatttttggcaaacaaaatgctgccagagacaatgcggattacagcgatgtcatgctcaccagcgaggaagaaatcaaaaccactaaccctgtggctacagaggaatacggtatcgtggcagataacttgcagcagcaaaacacggctcctcaaattggaactgtcaacagccagggggccttacccggtatggtttggcagaaccgggacgtgtacctgcagggtcccatctgggccaagattcctcacacggacggcaacttccacccgtctccgctgatgggcggctttggcctgaaacatcctccgcctcagatcctgatcaagaacacgcctgtacctgcggatcctccgaccaccttcaaccagtcaaagctgaactctttcatcacgcaatacagcaccggacaggtcagcgtggaaattgaatgggagctgcagaaggaaaacagcaagcgctggaaccccgagatccagtacacctccaactactacaaatctacaagtgtggactttgctgttaatacagaaggcgtgtactctgaaccccgccccattggcacccgttacctcacccgtaatctgtaa

SEQ ID NO: 1124 - protein, 738 aa, Artificial Sequence; identical to SEQ ID NO: 114
  Description of Artificial Sequence: Synthetic polypeptide

SEQ ID NO: 1125 - protein, 735 aa, Artificial Sequence
  Description of Artificial Sequence: Synthetic polypeptide
MAADGYLPDWLEDNLSEGVREWWALQPGAPKPKANQQHQDNARGLVLPGYKYLGPGNGLDKGEPVNAADAAALEHDKAYDQQLKAGDNPYLKYNHADAEFQQRLQGDTSFGGNLGRAVFQAKKRVLEPLGLVEQAGETAPGKKRPLIESPQQPDSSTGIGKKGKQPAKKKLVFEDETGAGDGPPEGSTSGAMSDDSEMRAAAGGAAVEGGQGADGVGNASGDWHCDSTWSEGHVTTTSTRTWVLPTYNNHLYKRLGESLQSNTYNGFSTPWGYFDFNRFHCHFSPRDWQRLINNNWGMRPKAMRVKIFNIQVKEVTTSNGETTVANNLTSTVQIFADSSYELPYVMDAGQEGSLPPFPNDVFMVPQYGYCGLVTGNTSQQQTDRNAFYCLEYFPSQMLRTGNNFEITYSFEKVPFHSMYAHSQSLDRLMNPLIDQYLWGLQSTTTGTTLNAGTATTNFTKLRPTNFSNFKKNWLPGPSIKQQGFSKTANQNYKIPATGSDSLIKYETHSTLDGRWSALTPGPPMATAGPADSKFSNSQLIFAGPKQNGNTATVPGTLIFTSEEELAATNATDTDMWGNLPGGDQSNSNLPTVDRLTALGAVPGMVWQNRDIYYQGPIWAKIPHTDGHFHPSPLIGGFGLKHPPPQIFIKNTPVPANPATTFSSTPVNSFITQYSTGQVSVQIDWEIQKERSKRWNPEVQFTSNYGQQNSLLWAPDAAGKYTEPRAIGTRYLTHHL

SEQ ID NO: 1126 - protein, 735 aa, Artificial Sequence
  Description of Artificial Sequence: Synthetic polypeptide
MAADGYLPDWLEDNLSEGVREWWALQPGAPKPKANQQHQDNARGLVLPGYKYLGPGNGLDKGEPVNAADAAALEHDKAYDQQLKAGDNPYLKYNHADAEFQQRLQGDTSFGGNLGRAVFQAKKRVLEPLGLVEQAGETAPGKKRPLIESPQQPDSSTGIGKKGKQPAKKKLVFEDETGAGDGPPEGSTSGAMSDDSEMRAAAGGAAVEGGQGADGVGNASGDWHCDSTWSEGHVTTTSTRTWVLPTYNNHLYKRLGESLQSNTYNGFSTPWGYFDFNRFHCHFSPRDWQRLINNNWGMRPKAMRVKIFNIQVKEVTTSNGETTVANNLTSTVQIFADSSYELPYVMDAGQEGSLPPFPNDVFMVPQYGYCGLVTGNTSQQQTDRNAFYCLEYFPSQMLRTGNNFEITYSFEKVPFHSMYAHSQSLDRLMNPLIDQYLWGLQSTTTGTTLNAGTATTNFTKLRPTNFSNFKKNWLPGPSIKQQGFSKTANQNYLIPATGSDSLIRYETHSTLDGRWSALTPGPPMATAGPADSKFSNSQLIFAGPKQNGNTATVPGTLIFTSEEELAATNATDTDMWGNLPFRDLSSSNLPTVDRSTPLGAVPGMVWQNRDIYYQGPIWAKIPHTDGHFHPSPLIGGFGLKHPPPQIFIKNTPVPANPATTFSSTPVNSFITQYSTGQVSVQIDWEIQKERSKRWNPEVQFTSNYGQQNSLLWAPDAAGKYTEPRAIGTRYLTHHL

SEQ ID NO: 1127 - protein, 735 aa, Artificial Sequence
  Description of Artificial Sequence: Synthetic polypeptide
MAADGYLPDWLEDNLSEGVREWWALQPGAPKPKANQQHQDNARGLVLPGYKYLGPGNGLDKGEPVNAADAAALEHDKAYDQQLKAGDNPYLKYNHADAEFQQRLQGDTSFGGNLGRAVFQAKKRVLEPLGLVEQAGETAPGKKRPLIESPQQPDSSTGIGKKGKQPAKKKLVFEDETGAGDGPPEGSTSGAMSDDSEMRAAAGGAAVEGGQGADGVGNASGDWHCDSTWSEGHVTTTSTRTWVLPTYNNHLYKRLGESLQSNTYNGFSTPWGYFDFNRFHCHFSPRDWQRLINNNWGMRPKAMRVKIFNIQVKEVTTSNGETTVANNLTSTVQIFADSSYELPYVMDAGQEGSLPPFPNDVFMVPQYGYCGLVTGNTSQQQTDRNAFYCLEYFPSQMLRTGNNFEITYSFEKVPFHSMYAHSQSLDRLMNPLIDQYLWGLQSTTTGTTLNAGTATTNFTKLRPTNFSNFKKNWLPGPSIKQQGFSKTANQNYYIPATGSDSLILYETHSTLDGRWSALTPGPPMATAGPADSKFSNSQLIFAGPKQNGNTATVPGTLIFTSEEELAATNATDTDMWGNLPGGDQSNSNLPTVDRLTALGAVPGMVWQNRDIYYQGPIWAKIPHTDGHFHPSPLIGGFGLKHPPPQIFIKNTPVPANPATTFSSTPVNSFITQYSTGQVSVQIDWEIQKERSKRWNPEVQFTSNYGQQNSLLWAPDAAGKYTEPRAIGTRYLTHHL

SEQ ID NO: 1128 - protein, 735 aa, Artificial Sequence
  Description of Artificial Sequence: Synthetic polypeptide
MAADGYLPDWLEDNLSEGVREWWALQPGAPKPKANQQHQDNARGLVLPGYKYLGPGNGLDKGEPVNAADAAALEHDKAYDQQLKAGDNPYLKYNHADAEFQQRLQGDTSFGGNLGRAVFQAKKRVLEPLGLVEQAGETAPGKKRPLIESPQQPDSSTGIGKKGKQPAKKKLVFEDETGAGDGPPEGSTSGAMSDDSEMRAAAGGAAVEGGQGADGVGNASGDWHCDSTWSEGHVTTTSTRTWVLPTYNNHLYKRLGESLQSNTYNGFSTPWGYFDFNRFHCHFSPRDWQRLINNNWGMRPKAMRVKIFNIQVKEVTTSNGETTVANNLTSTVQIFADSSYELPYVMDAGQEGSLPPFPNDVFMVPQYGYCGLVTGNTSQQQTDRNAFYCLEYFPSQMLRTGNNFEITYSFEKVPFHSMYAHSQSLDRLMNPLIDQYLWGLQSTTTGTTLNAGTATTNFTKLRPTNFSNFKKNWLPGPSIKQQGFSKTANQNYGIPATGSDSLIKYETHSTLDGRWSALTPGPPIATAGPADSKFSNSQLIFAGPKQNGNTATVPGTLIFTSEEELAATNATDTDMWGNLPLYDASSSNLPTVDRLTLLGAVPGMVWQNRDIYYQGPIWAKIPHTDGHFHPSPLIGGFGLKHPPPQIFIKNTPVPANPATTFSSTPVNSFITQYSTGQVSVQIDWEIQKERSKRWNPEVQFTSNYGQQNSLLWAPDAAGKYTEPRAIGTRYLTHHL

SEQ ID NO: 1129 - protein, 735 aa, Artificial Sequence
  Description of Artificial Sequence: Synthetic polypeptide
MAADGYLPDWLEDNLSEGVREWWALQPGAPKPKANQQHQDNARGLVLPGYKYLGPGNGLDKGEPVNAADAAALEHDKAYDQQLKAGDNPYLKYNHADAEFQQRLQGDTSFGGNLGRAVFQAKKRVLEPLGLVEQAGETAPGKKRPLIESPQQPDSSTGIGKKGKQPAKKKLVFEDETGAGDGPPEGSTSGAMSDDSEMRAAAGGAAVEGGQGADGVGNASGDWHCDSTWSEGHVTTTSTRTWVLPTYNNHLYKRLGESLQSNTYNGFSTPWGYFDFNRFHCHFSPRDWQRLINNNWGMRPKAMRVKIFNIQVKEVTTSNGETTVANNLTSTVQIFADSSYELPYVMDAGQEGSLPPFPNDVFMVPQYGYCGLVTGNTSQQQTDRNAFYCLEYFPSQMLRTGNNFEITYSFEKVPFHSMYAHSQSLDRLMNPLIDQYLWGLQSTTTGTTLNAGTATTNFTKLRPTNFSNFKKNWLPGPSIKQQGFSKTANQNYTIPATGSDSLITYETHSTLDGRWSALTPGPPGATAGPADSKFSNSQLIFAGPKQNGNTATVPGTLIFTSEEELAATNATDTDMWGNLPRVDTSASNLPTVDRYTNLGAVPGMVWQNRDIYYQGPIWAKIPHTDGHFHPSPLIGGFGLKHPPPQIFIKNTPVPANPATTFSSTPVNSFITQYSTGQVSVQIDWEIQKERSKRWNPEVQFTSNYGQQNSLLWAPDAAGKYTEPRAIGTRYLTHHL

SEQ ID NO: 1130 - protein, 735 aa, Artificial Sequence
  Description of Artificial Sequence: Synthetic polypeptide
MAADGYLPDWLEDNLSEGVREWWALQPGAPKPKANQQHQDNARGLVLPGYKYLGPGNGLDKGEPVNAADAAALEHDKAYDQQLKAGDNPYLKYNHADAEFQQRLQGDTSFGGNLGRAVFQAKKRVLEPLGLVEQAGETAPGKKRPLIESPQQPDSSTGIGKKGKQPAKKKLVFEDETGAGDGPPEGSTSGAMSDDSEMRAAAGGAAVEGGQGADGVGNASGDWHCDSTWSEGHVTTTSTRTWVLPTYNNHLYKRLGESLQSNTYNGFSTPWGYFDFNRFHCHFSPRDWQRLINNNWGMRPKAMRVKIFNIQVKEVTTSNGETTVANNLTSTVQIFADSSYELPYVMDAGQEGSLPPFPNDVFMVPQYGYCGLVTGNTSQQQTDRNAFYCLEYFPSQMLRTGNNFEITYSFEKVPFHSMYAHSQSLDRLMNPLIDQYLWGLQSTTTGTTLNAGTATTNFTKLRPTNFSNFKKNWLPGPSIKQQGFSKTANQNYSIPATGSDSLIKYETHSTLDGRWSALTPGPPFATAGPADSKFSNSQLIFAGPKQNGNTATVPGTLIFTSEEELAATNATDTDMWGNLPDYDSSLSNLPTVDRDTTLGAVPGMVWQNRDIYYQGPIWAKIPHTDGHFHPSPLIGGFGLKHPPPQIFIKNTPVPANPATTFSSTPVNSFITQYSTGQVSVQIDWEIQKERSKRWNPEVQFTSNYGQQNSLLWAPDAAGKYTEPRAIGTRYLTHHL

SEQ ID NO: 1131 - protein, 735 aa, Artificial Sequence
  Description of Artificial Sequence: Synthetic polypeptide
MAADGYLPDWLEDNLSEGVREWWALQPGAPKPKANQQHQDNARGLVLPGYKYLGPGNGLDKGEPVNAADAAALEHDKAYDQQLKAGDNPYLKYNHADAEFQQRLQGDTSFGGNLGRAVFQAKKRVLEPLGLVEQAGETAPGKKRPLIESPQQPDSSTGIGKKGKQPAKKKLVFEDETGAGDGPPEGSTSGAMSDDSEMRAAAGGAAVEGGQGADGVGNASGDWHCDSTWSEGHVTTTSTRTWVLPTYNNHLYKRLGESLQSNTYNGFSTPWGYFDFNRFHCHFSPRDWQRLINNNWGMRPKAMRVKIFNIQVKEVTTSNGETTVANNLTSTVQIFADSSYELPYVMDAGQEGSLPPFPNDVFMVPQYGYCGLVTGNTSQQQTDRNAFYCLEYFPSQMLRTGNNFEITYSFEKVPFHSMYAHSQSLDRLMNPLIDQYLWGLQSTTTGTTLNAGTATTNFTKLRPTNFSNFKKNWLPGPSIKQQGFSKTANQNYSIPATGSDSLIWYETHSTLDGRWSALTPGPPCATAGPADSKFSNSQLIFAGPKQNGNTATVPGTLIFTSEEELAATNATDTDMWGNLPQGDSSLSNLPTVDRMTVLGAVPGMVWQNRDIYYQGPIWAKIPHTDGHFHPSPLIGGFGLKHPPPQIFIKNTPVPANPATTFSSTPVNSFITQYSTGQVSVQIDWEIQKERSKRWNPEVQFTSNYGQQNSLLWAPDAAGKYTEPRAIGTRYLTHHL

SEQ ID NO: 1132 - protein, 735 aa, Artificial Sequence
  Description of Artificial Sequence: Synthetic polypeptide
MAADGYLPDWLEDNLSEGVREWWALQPGAPKPKANQQHQDNARGLVLPGYKYLGPGNGLDKGEPVNAADAAALEHDKAYDQQLKAGDNPYLKYNHADAEFQQRLQGDTSFGGNLGRAVFQAKKRVLEPLGLVEQAGETAPGKKRPLIESPQQPDSSTGIGKKGKQPAKKKLVFEDETGAGDGPPEGSTSGAMSDDSEMRAAAGGAAVEGGQGADGVGNASGDWHCDSTWSEGHVTTTSTRTWVLPTYNNHLYKRLGESLQSNTYNGFSTPWGYFDFNRFHCHFSPRDWQRLINNNWGMRPKAMRVKIFNIQVKEVTTSNGETTVANNLTSTVQIFADSSYELPYVMDAGQEGSLPPFPNDVFMVPQYGYCGLVTGNTSQQQTDRNAFYCLEYFPSQMLRTGNNFEITYSFEKVPFHSMYAHSQSLDRLMNPLIDQYLWGLQSTTTGTTLNAGTATTNFTKLRPTNFSNFKKNWLPGPSIKQQGFSKTANQNYCIPATGSDSLIRYETHSTLDGRWSALTPGPPLATAGPADSKFSNSQLIFAGPKQNGNTATVPGTLIFTSEEELAATNATDTDMWGNLPYKDSSRSNLPTVDRETSLGAVPGMVWQNRDIYYQGPIWAKIPHTDGHFHPSPLIGGFGLKHPPPQIFIKNTPVPANPATTFSSTPVNSFITQYSTGQVSVQIDWEIQKERSKRWNPEVQFTSNYGQQNSLLWAPDAAGKYTEPRAIGTRYLTHHL

SEQ ID NO: 1133 - protein, 735 aa, Artificial Sequence
  Description of Artificial Sequence: Synthetic polypeptide
MAADGYLPDWLEDNLSEGVREWWALQPGAPKPKANQQHQDNARGLVLPGYKYLGPGNGLDKGEPVNAADAAALEHDKAYDQQLKAGDNPYLKYNHADAEFQQRLQGDTSFGGNLGRAVFQAKKRVLEPLGLVEQAGETAPGKKRPLIESPQQPDSSTGIGKKGKQPAKKKLVFEDETGAGDGPPEGSTSGAMSDDSEMRAAAGGAAVEGGQGADGVGNASGDWHCDSTWSEGHVTTTSTRTWVLPTYNNHLYKRLGESLQSNTYNGFSTPWGYFDFNRFHCHFSPRDWQRLINNNWGMRPKAMRVKIFNIQVKEVTTSNGETTVANNLTSTVQIFADSSYELPYVMDAGQEGSLPPFPNDVFMVPQYGYCGLVTGNTSQQQTDRNAFYCLEYFPSQMLRTGNNFEITYSFEKVPFHSMYAHSQSLDRLMNPLIDQYLWGLQSTTTGTTLNAGTATTNFTKLRPTNFSNFKKNWLPGPSIKQQGFSKTANQNYIIPATGSDSLIYYETHSTLDGRWSALTPGPPRATAGPADSKFSNSQLIFAGPKQNGNTATVPGTLIFTSEEELAATNATDTDMWGNLPWIDNSRSNLPTVDRPTSLGAVPGMVWQNKNIYYQGPIWAKIPHTDGHFHPSPLIGGFGLKHPPPQIFIKNTPVPANPATTFTSTPVNSFITQYSTGQVSVQIDWEIQKERSKRWNPEVQFTSNYGQQNSLLWAPDAAGKYTEPRAIGTRYLTHHL

SEQ ID NO: 1134 - protein, 735 aa, Artificial Sequence
  Description of Artificial Sequence: Synthetic polypeptide
MAADGYLPDWLEDNLSEGVREWWALQPGAPKPKANQQHQDNARGLVLPGYKYLGPGNGLDKGEPVNAADAAALEHDKAYDQQLKAGDNPYLKYNHADAEFQQRLQGDTSFGGNLGRAVFQAKKRVLEPLGLVEQAGETAPGKKRPLIESPQQPDSSTGIGKKGKQPAKKKLVFEDETGAGDGPPEGSTSGAMSDDSEMRAAAGGAAVEGGQGADGVGNASGDWHCDSTWSEGHVTTTSTRTWVLPTYNNHLYKRLGESLQSNTYNGFSTPWGYFDFNRFHCHFSPRDWQRLINNNWGMRPKAMRVKIFNIQVKEVTTSNGETTVANNLTSTVQIFADSSYELPYVMDAGQEGSLPPFPNDVFMVPQYGYCGLVTGNTSQQQTDRNAFYCLEYFPSQMLRTGNNFEITYSFEKVPFHSMYAHSQSLDRLMNPLIDQYLWGLQSTTTGTTLNAGTATTNFTKLRPTNFSNFKKNWLPGPSIKQQGFSKTANQNYGIPATGSDSLIIYETHSTLDGRWSALTPGPPRATAGPADSKFSNSQLIFAGPKQNGNTATVPGTLIFTSEEELAATNATDTDMWGNLPGGDQSNSNLPTVDRLTALGAVPGMVWQNRDIYYQGPIWAKIPHTDGHFHPSPLIGGFGLKHPPPQIFIKNTPVPANPATTFSSTPVNSFITQYSTGQVSVQIDWEIQKERSKRWNPEVQFTSNYGQQNSLLWAPDAAGKYTEPRAIGTRYLTHHL

SEQ ID NO: 1135 - protein, 735 aa, Artificial Sequence
  Description of Artificial Sequence: Synthetic polypeptide
MAADGYLPDWLEDNLSEGVREWWALQPGAPKPKANQQHQDNARGLVLPGYKYLGPGNGLDKGEPVNAADAAALEHDKAYDQQLKAGDNPYLKYNHADAEFQQRLQGDTSFGGNLGRAVFQAKKRVLEPLGLVEQAGETAPGKKRPLIESPQQPDSSTGIGKKGKQPAKKKLVFEDETGAGDGPPEGSTSGAMSDDSEMRAAAGGAAVEGGQGADGVGNASGDWHCDSTWSEGHVTTTSTRTWVLPTYNNHLYKRLGESLQSNTYNGFSTPWGYFDFNRFHCHFSPRDWQRLINNNWGMRPKAMRVKIFNIQVKEVTTSNGETTVANNLTSTVQIFADSSYELPYVMDAGQEGSLPPFPNDVFMVPQYGYCGLVTGNTSQQQTDRNAFYCLEYFPSQMLRTGNNFEITYSFEKVPFHSMYAHSQSLDRLMNPLIDQYLWGLQSTTTGTTLNAGTATTNFTKLRPTNFSNFKKNWLPGPSIKQQGFSKTANQNYVIPATESDSLIYYETHSTLDGRWSALTPGPPYATAGPADSKFSNSQLIFAGPKQNGNTATVPGTLIFTSEEELAATNATDTDMWGNLPPRDDSTSNLPTVDRKTYLGAVPGMVWQNRDIYYQGPIWAKIPHTDGHFHPSPLIGGFGLKHPPPQIFIKNTPVPANPATTFSSTPVNSFITQYSTGQVSVQIDWEIQKERSKRWNPEVQFTSNYGQQNSLLWAPDAAGKYTEPRAIGTRYLTHHL

SEQ ID NO: 1136 - protein, 735 aa, Artificial Sequence
  Description of Artificial Sequence: Synthetic polypeptide
MAADGYLPDWLEDNLSEGVREWWALQPGAPKPKANQQHQDNARGLVLPGYKYLGPGNGLDKGEPVNAADAAALEHDKAYDQQLKAGDNPYLKYNHADAEFQQRLQGDTSFGGNLGRAVFQAKKRVLEPLGLVEQAGETAPGKKRPLIESPQQPDSSTGIGKKGKQPAKKKLVFEDETGAGDGPPEGSTSGAMSDDSEMRAAAGGAAVEGGQGADGVGNASGDWHCDSTWSEGHVTTTSTRTWVLPTYNNHLYKRLGESLQSNTYNGFSTPWGYFDFNRFHCHFSPRDWQRLINNNWGMRPKAMRVKIFNIQVKEVTTSNGETTVANNLTSTVQIFADSSYELPYVMDAGQEGSLPPFPNDVFMVPQYGYCGLVTGNTSQQQTDRNAFYCLEYFPSQMLRTGNNFEITYSFEKVPFHSMYAHSQSLDRLMNPLIDQYLWGLQSTTTGTTLNAGTATTNFTKLRPTNFSNFKKNWLPGPSIKQQGFSKTANQNYYIPATGSDSLIIYETHSTLDGRWSALTPGPPIATAGPADSKFSNSQLIFAGPKQNGNTATVPGTLIFTSEEELAATNSTDTDMWGNLPTDDDSRSNLPTVDRMTLLGAVPGMVWQNRDIYYQGPIWAKIPHTDGHFHPSPLIGGFGLKHPPPQIFIKNTPVPANPATTFSSTPVNSFITQYSTGQVSVQIDWEIQKERSKRWNPEVQFTSNYGQQNSLLWAPDAAGKYTEPRAIGTRYLTHHL

SEQ ID NO: 1137 - protein, 735 aa, Artificial Sequence
  Description of Artificial Sequence: Synthetic polypeptide
MAADGYLPDWLEDNLSEGVREWWALQPGAPKPKANQQHQDNARGLVLPGYKYLGPGNGLDKGEPVNAADAAALEHDKAYDQQLKAGDNPYLKYNHADAEFQQRLQGDTSFGGNLGRAVFQAKKRVLEPLGLVEQAGETAPGKKRPLIESPQQPDSSTGIGKKGKQPAKKKLVFEDETGAGDGPPEGSTSGAMSDDSEMRAAAGGAAVEGGQGADGVGNASGDWHCDSTWSEGHVTTTSTRTWVLPTYNNHLYKRLGESLQSNTYNGFSTPWGYFDFNRFHCHFSPRDWQRLINNNWGMRPKAMRVKIFNIQVKEVTTSNGETTVANNLTSTVQIFADSSYELPYVMDAGQEGSLPPFPNDVFMVPQYGYCGLVTGNTSQQQTDRNAFYCLEYFPSQMLRTGNNFEITYSFEKVPFHSMYAHSQSLDRLMNPLIDQYLWGLQSTTTGTTLNAGTATTNFTKLRPTNFSNFKKNWLPGPSIKQQGFSKTANQNYHIPATGSDSLIYYETHSTLDGRWSALTPGPPSATAGPADSKFSNSQLIFAGPKQNGNTATVPGTLIFTSEEELAATNATDTDMWGNLPRRDSSVSNLPTVDRYTDLGAVPGMVWQNRDIYYQGPIWAKIPHTDGHFHPSPLIGGFGLKHPPPQIFIKNTPVPANPATTFSSTPVNSFITQYSTGQVSVQIDWEIQKERSKRWNPEVQFTSNYGQQNSLLWAPDAAGKYTEPRAIGTRYLTHHL

SEQ ID NO: 1138 - protein, 735 aa, Artificial Sequence
  Description of Artificial Sequence: Synthetic polypeptide
MAADGYLPDWLEDNLSEGVREWWALQPGAPKPKANQQHQDNARGLVLPGYKYLGPGNGLDKGEPVNAADAAALEHDKAYDQQLKAGDNPYLKYNHADAEFQQRLQGDTSFGGNLGRAVFQAKKRVLEPLGLVEQAGETAPGKKRPLIESPQQPDSSTGIGKKGKQPAKKKLVFEDETGAGDGPPEGSTSGAMSDDSEMRAAAGGAAVEGGQGADGVGNASGDWHCDSTWSEGHVTTTSTRTWVLPTYNNHLYKRLGESLQSNTYNGFSTPWGYFDFNRFHCHFSPRDWQRLINNNWGMRPKAMRVKIFNIQVKEVTTSNGETTVANNLTSTVQIFADSSYELPYVMDAGQEGSLPPFPNDVFMVPQYGYCGLVTGNTSQQQTDRNAFYCLEYFPSQMLRTGNNFEITYSFEKVPFHSMYAHSQSLDRLMNPLIDQYLWGLQSTTTGTTLNAGTATTNFTKLRPTNFSNFKKNWLPGPSIKQQGFSKTANQNYSIPATGSDSLISYETHSTLDGRWSALTPGPPRATAGPADSKFSNSQLIFAGPKQNGNTATVPGTLIFTSEEELAATNATDTDMWGNLPRHDSSLSNLPTVDRNTGLGAVPGMVWQNRDIYYQGPIWAKIPHTDGHFHPSPLIGGFGLKHPPPQIFIKNTPVPANPATTFSSTPVNSFITQYSTGQVSVQIDWEIQKERSKRWNPEVQFTSNYGQQNSLLWAPDAAGKYTEPRAIGTRYLTHHL

SEQ ID NO: 1139 - protein, 735 aa, Artificial Sequence
  Description of Artificial Sequence: Synthetic polypeptide
MAADGYLPDWLEDNLSEGVREWWALQPGAPKPKANQQHQDNARGLVLPGYKYLGPGNGLDKGEPVNAADAAALEHDKAYDQQLKAGDNPYLKYNHADAEFQQRLQGDTSFGGNLGRAVFQAKKRVLEPLGLVEQAGETAPGKKRPLIESPQQPDSSTGIGKKGKQPAKKKLVFEDETGAGDGPPEGSTSGAMSDDSEMRAAAGGAAVEGGQGADGVGNASGDWHCDSTWSEGHVTTTSTRTWVLPTYNNHLYKRLGESLQSNTYNGFSTPWGYFDFNRFHCHFSPRDWQRLINNNWGMRPKAMRVKIFNIQVKEVTTSNGETTVANNLTSTVQIFADSSYELPYVMDAGQEGSLPPFPNDVFMVPQYGYCGLVTGNTSQQQTDRNAFYCLEYFPSQMLRTGNNFEITYSFEKVPFHSMYAHSQSLDRLMNPLIDQYLWGLQSTTTGTTLNAGTATTNFTKLRPTNFSNFKKNWLPGPSIKQQGFSKTANQNYFIPATGSDSLIRYETHSTLDGRWSALTPGPPLATAGPADSKFSNSQLIFAGPKQNGNTATVPGTLIFTSEEELAATNATDTDMWGNLPVIDFSKSNLPTVDRLTHLGAVPGMVWQNRDIYYQGPIWAKIPHTDGHFHPSPLIGGFGLKHPPPQIFIKNTPVPANPATTFSSTPVNSFITQYSTGQVSVQIDWEIQKERSKRWNPEVQFTSNYGQQNSLLWAPDAAGKYTEPRAIGTRYLTHHL

SEQ ID NO: 1140 - protein, 735 aa, Artificial Sequence
  Description of Artificial Sequence: Synthetic polypeptide
MAADGYLPDWLEDNLSEGVREWWALQPGAPKPKANQQHQDNARGLVLPGYKYLGPGNGLDKGEPVNAADAAALEHDKAYDQQLKAGDNPYLKYNHADAEFQQRLQGDTSFGGNLGRAVFQAKKRVLEPLGLVEQAGETAPGKKRPLIESPQQPDSSTGIGKKGKQPAKKKLVFEDETGAGDGPPEGSTSGAMSDDSEMRAAAGGAAVEGGQGADGVGNASGDWHCDSTWSEGHVTTTSTRTWVLPTYNNHLYKRLGESLQSNTYNGFSTPWGYFDFNRFHCHFSPRDWQRLINNNWGMRPKAMRVKIFNIQVKEVTTSNGETTVANNLTSTVQIFADSSYELPYVMDAGQEGSLPPFPNDVFMVPQYGYCGLVTGNTSQQQTDRNAFYCLEYFPSQMLRTGNNFEITYSFEKVPFHSMYAHSQSLDRLMNPLIDQYLWGLQSTTTGTTLNAGTATTNFTKLRPTNFSNFKKNWLPGPSIKQQGFSKTANQNYKIPATGSDSLIKYETHSTLDGRWSALTPGPPMATAGPADSKFSNSQLIFAGPKQNGNTATVPGTLIFTSEEELAATNATDTDMWGNLPVRDFSLSNLPTVDRTTKLGAVPGMVWQNRDIYYQGPIWAKIPHTDGHFHPSPLIGGFGLKHPPPQIFIKNTPVPANPATTFSSTPVNSFITQYSTGQVSVQIDWEIQKERSKRWNPEVQFTSNYGQQNSLLWAPDAAGKYTEPRAIGTRYLTHHL

SEQ ID NO: 1141 - protein, 735 aa, Artificial Sequence
  Description of Artificial Sequence: Synthetic polypeptide
MAADGYLPDWLEDNLSEGVREWWALQPGAPKPKANQQHQDNARGLVLPGYKYLGPGNGLDKGEPVNAADAAALEHDKAYDQQLKAGDNPYLKYNHADAEFQQRLQGDTSFGGNLGRAVFQAKKRVLEPLGLVEQAGETAPGKKRPLIESPQQPDSSTGIGKKGKQPAKKKLVFEDETGAGDGPPEGSTSGAMSDDSEMRAAAGGAAVEGGQGADGVGNASGDWHCDSTWSEGHVTTTSTRTWVLPTYNNHLYKRLGESLQSNTYNGFSTPWGYFDFNRFHCHFSPRDWQRLINNNWGMRPKAMRVKIFNIQVKEVTTSNGETTVANNLTSTVQIFADSSYELPYVMDAGQEGSLPPFPNDVFMVPQYGYCGLVTGNTSQQQTDRNAFYCLEYFPSQMLRTGNNFEITYSFEKVPFHSMYAHSQSLDRLMNPLIDQYLWGLQSTTTGTTLNAGTATTNFTKLRPTNFSNFKKNWLPGPSIKQQGFSKTANQNYFIPATGSDSLIQYETHSTLDGRWSALTPGPPMATAGPADSKFSNSQLIFAGPKQNGNTATVPGTLIFTSEEELAATNATDTDMWGNLPGGDQSNSNLPTVDRLTALGAVPGMVWQNRDIYYQGPIWAKIPHTDGHFHPSPLIGGFGLKHPPPQIFIKNTPVPANPATTFSSTPVNSFITQYSTGQVSVQIDWEIQKERSKRWNPEVQFTSNYGQQNSLLWAPDAAGKYTEPRAIGTRYLTHHL

SEQ ID NO: 1142 - protein, 735 aa, Artificial Sequence
  Description of Artificial Sequence: Synthetic polypeptide
MAADGYLPDWLEDNLSEGVREWWALQPGAPKPKANQQHQDNARGLVLPGYKYLGPGNGLDKGEPVNAADAAALEHDKAYDQQLKAGDNPYLKYNHADAEFQQRLQGDTSFGGNLGRAVFQAKKRVLEPLGLVEQAGETAPGKKRPLIESPQQPDSSTGIGKKGKQPAKKKLVFEDETGAGDGPPEGSTSGAMSDDSEMRAAAGGAAVEGGQGADGVGNASGDWHCDSTWSEGHVTTTSTRTWVLPTYNNHLYKRLGESLQSNTYNGFSTPWGYFDFNRFHCHFSPRDWQRLINNNWGMRPKAMRVKIFNIQVKEVTTSNGETTVANNLTSTVQIFADSSYELPYVMDAGQEGSLPPFPNDVFMVPQYGYCGLVTGNTSQQQTDRNAFYCLEYFPSQMLRTGNNFEITYSFEKVPFHSMYAHSQSLDRLMNPLIDQYLWGLQSTTTGTTLNAGTATTNFTKLRPTNFSNFKKNWLPGPSIKQQGFSKTANQNYEMPATGSDSLIIYETHSTLDGRWSALTPGPPFATAGPADSKFSNSQLIFAGPKQNGNTATVPGTLIFTSEEELAATNATDTDVWGNLPSGDHSQSNLPTVDRPTMLGAVPGMVWQNRDIYYQGPIWAKIPHTDGHFHPSPLIGGFGLKHPPPQIFIKNTPVPANPATTFISTPVNSFITQYSTGQVSVHIDWEIQKERSKRWNPEVQFTSDYGQHSSLLWAPDAAGKYTEPTAIGTRYLTHHL

SEQ ID NO: 1143 - protein, 734 aa, Artificial Sequence
  Description of Artificial Sequence: Synthetic polypeptide
MAADGYLPDWLEDNLSEGVREWWALQPGAPKPKANQQHQDNARGLVLPGYKYLGPGNGLDKGEPVNAADAAALEHDKAYDQQLKAGDNPYLKYNHADAEFQQRLQGDTSFGGNLGRAVFQAKKRVLEPLGLVEQAGETAPGKKRPLIESPQQPDSSTGIGKKGKQPAKKKLVFEDETGAGDGPPEGSTSGAMSDDSEMRAAAGGAAVEGGQGADGVGNASGDWHCDSTWSEGHVTTTSTRTWVLPTYNNHLYKRLGESLQSNTYNGFSTPWGYFDFNRFHCHFSPRDWQRLINNNWGMRPKAMRVKIFNIQVKEVTTSNGETTVANNLTSTVQIFADSSYELPYVMDAGQEGSLPPFPNDVFMVPQYGYCGLVTGNTSQQQTDRNAFYCLEYFPSQMLRTGNNFEITYSFEKVPFHSMYAHSQSLDRLMNPLIDQYLWGLQSTTTGTTLNAGTATTNFTKLRPTNFSNFKKNWLPGPSIKQQGFSKTANQNDIPATGSDSLIKYETHSTLDGRWSALTPGPPMATAGPADSKFSNSQLIFAGPKQNGNTATVPGTLIFTSEEELAATNATDTDMWGNLPGGDQSNSNLPTVDRLTALGAVPGMVWQNRDIYYQGPIWAKIPHTDGHFHPSPLIGGFGLKHPPPQIFIKNTPVPANPATTFSSTPVNSFITQYSTGQVSVQIDWEIQKERSKRWNPEVQFTSNYGQQNSLLWAPDAAGKYTEPRAIGTRYLTHHL

SEQ ID NO: 1144 - protein, 735 aa, Artificial Sequence
  Description of Artificial Sequence: Synthetic polypeptide
MAADGYLPDWLEDNLSEGVREWWALQPGAPKPKANQQHQDNARGLVLPGYKYLGPGNGLDKGEPVNAADAAALEHDKAYDQQLKAGDNPYLKYNHADAEFQQRLQGDTSFGGNLGRAVFQAKKRVLEPLGLVEQAGETAPGKKRPLIESPQQPDSSTGIGKKGKQPAKKKLVFEDETGAGDGPPEGSTSGAMSDDSEMRAAAGGAAVEGGQGADGVGNASGDWHCDSTWSEGHVTTTSTRTWVLPTYNNHLYKRLGESLQSNTYNGFSTPWGYFDFNRFHCHFSPRDWQRLINNNWGMRPKAMRVKIFNIQVKEVTTSNGETTVANNLTSTVQIFADSSYELPYVMDAGQEGSLPPFPNDVFMVPQYGYCGLVTGNTSQQQTDRNAFYCLEYFPSQMLRTGNNFEITYSFEKVPFHSMYAHSQSLDRLMNPLIDQYLWGLQSTTTGTTLNAGTATTNFTKLRPTNFSNFKKNWLPGPSIKQQGFSKTANQNYIIPATGSDSLITYETHSTLDGRWSALTPGPPVATAGPADSKFSNSQLIFAGPKQNGNTATVPGTLIFTSEEELAATNATDTDMWGNLPFNDDSSSNLPTVDRSTFLGAVPGMVWQNRDIYYQGPIWAKIPHTDGHFHPSPLIGGFGLKHPPPQIFIKNTPVPANPATTFSSTPVNSFITQYSTGQVSVQIDWEIQKERSKRWNPEVQFTSNYGQQNSLLWAPDAAGKYTEPRAIGTRYLTHHL

SEQ ID NO: 1145 - protein, 733 aa, Artificial Sequence
  Description of Artificial Sequence: Synthetic polypeptide
MAADGYLPDWLEDNLSEGIREWWDLKPGAPKPKANQQKQDDGRGLVLPGYKYLGPFNGLDKGEPVNAADAAALEHDKAYDQQLKAGDNPYLRYNHADAEFQERLQEDTSFGGNLGRAVFQAKKRVLEPLGLVEEGAKTAPGKKRPLESPQEPDSSSGIGKKGKQPARKRLNFEEDTGAGDGPPEGSDTSAMSSDIEMRAAPGGNAVDAGQGSDGVGNASGDWHCDSTWSEGKVTTTSTRTWVLPTYNNHLYLRLGTTSSSNTYNGFSTPWGYFDFNRFHCHFSPRDWQRLINNNWGLRPKAMRVKIFNIQVKEVTTSNGETTVANNLTSTVQIFADSSYELPYVMDAGQEGSLPPFPNDVFMVPQYGYCGIVTGENQNQTDRNAFYCLEYFPSQMLRTGNNFEMAYNFEKVPFHSMYAHSQSLDRLMNPLLDQYLWHLQSTTSGETLNQGNAATTFGKIRSGDFAFYRKNWLPGPCVKQQRFSKTASQNYKIPASGGNALLKYDTHYTLNNRWSNIAPGPPMATAGPSDGDFSNAQLIFPGPSVTGNTTTSANNLLFTSEEEIAATNPRDTDMFGQIADNNQNATTAPITGNVTAMGVLPGMVWQNRDIYYQGPIWAKIPHADGHFHPSPLIGGFGLKHPPPQIFIKNTPVPANPATTFTAARVDSFITQYSTGQVAVQIEWEIEKERSKRWNPEVQFTSNYGNQSSMLWAPDTTGKYTEPRVIGSRYLTNHL

SEQ ID NO: 1146 - protein, 742 aa, Artificial Sequence; identical to SEQ ID NO: 957
  Description of Artificial Sequence: Synthetic polypeptide

SEQ ID NO: 1147 - protein, 733 aa, Artificial Sequence; identical to SEQ ID NO: 430
  Description of Artificial Sequence: Synthetic polypeptide

SEQ ID NO: 1148 - protein, 733 aa, Artificial Sequence; identical to SEQ ID NO: 147
  Description of Artificial Sequence: Synthetic polypeptide

SEQ ID NO: 1149 - protein, 733 aa, Artificial Sequence; identical to SEQ ID NO: 434
  Description of Artificial Sequence: Synthetic polypeptide

SEQ ID NO: 1150 - protein, 735 aa, Artificial Sequence
  Description of Artificial Sequence: Synthetic polypeptide
MAADGYLPDWLEDNLSEGVREWWALQPGAPKPKANQQHQDNARGLVLPGYKYLGPGNGLDKGEPVNAADAAALEHDKAYDQQLKAGDNPYLKYNHADAEFQQRLQGDTSFGGNLGRAVFQAKKRVLEPLGLVEQAGETAPGKKRPLIESPQQPDSSTGIGKKGKQPAKKKLVFEDETGAGDGPPEGSTSGAMSDDSEMRAAAGGAAVEGGQGADGVGNASGDWHCDSTWSEGHVTTTSTRTWVLPTYNNHLYKRLGESLQSNTYNGFSTPWGYFDFNRFHCHFSPRDWQRLINNNWGMRPKAMRVKIFNIQVKEVTTSNGETTVANNLTSTVQIFADSSYELPYVMDAGQEGSLPPFPNDVFMVPQYGYCGLVTGNTSQQQTDRNAFYCLEYFPSQMLRTGNNFEITYSFEKVPFHSMYAHSQSLDRLMNPLIDQYLWGLQSTTTGTTLNAGTATTNFTKLRPTNFSNFKKNWLPGPSIKQQGFSKTANQNYEIPATGSDSLIEYETHSTLDGRWSALTPGPPMATAGPADSKFSNSQLIFAGPKQNGNTATVPGTLIFTSEEELAATNATDTDMWGNLPGGDQSSSNLPTVDRLTALGAVPGMVWQNRDIYYQGPIWAKIPHTDGHFHPSPLIGGFGLKHPPPQIFIKNTPVPANPATTFSSTPVNSFITQYSTGQVSVQIDWEIQKERSKRWNPEVQFTSNYGQQNSLLWAPDAAGKYTEPRAIGTRYLTHHL

SEQ ID NO: 1151 - protein, 735 aa, Artificial Sequence
  Description of Artificial Sequence: Synthetic polypeptide
MAADGYLPDWLEDNLSEGVREWWALQPGAPKPKANQQHQDNARGLVLPGYKYLGPGNGLDKGEPVNAADAAALEHDKAYDQQLKAGDNPYLKYNHADAEFQQRLQGDTSFGGNLGRAVFQAKKRVLEPLGLVEQAGETAPGKKRPLIESPQQPDSSTGIGKKGKQPAKKKLVFEDETGAGDGPPEGSTSGAMSDDSEMRAAAGGAAVEGGQGADGVGNASGDWHCDSTWSEGHVTTTSTRTWVLPTYNNHLYKRLGESLQSNTYNGFSTPWGYFDFNRFHCHFSPRDWQRLINNNWGMRPKAMRVKIFNIQVKEVTTSNGETTVANNLTSTVQIFADSSYELPYVMDAGQEGSLPPFPNDVFMVPQYGYCGLVTGNTSQQQTDRNAFYCLEYFPSQMLRTGNNFEITYSFEKVPFHSMYAHSQSLDRLMNPLIDQYLWGLQSTTTGTTLNAGTATTNFTKLRPTNFSNFKKNWLPGPSIKQQGFSKTANQNYEIPATGSDSLIEYETHSTLDGRWSALTPGPPMATAGPADSKFSNSQLIFAGPKQNGNTATVPGTLIFTSEEELAATNATDTDMWGNLPGGDQSSSNLPVVRGLRALGAVPGMVWQNRDIYYQGPIWAKIPHTDGHFHPSPLIGGFGLKHPPPQIFIKNTPVPANPATTFSSTPVNSFITQYSTGQVSVQIDWEIQKERSKRWNPEVQFTSNYGQQNSLLWAPDAAGKYTEPRAIGTRYLTHHL

SEQ ID NO: 1152 - protein, 735 aa, Artificial Sequence
  Description of Artificial Sequence: Synthetic polypeptide
MAADGYLPDWLEDNLSEGVREWWALQPGAPKPKANQQHQDNARGLVLPGYKYLGPGNGLDKGEPVNAADAAALEHDKAYDQQLKAGDNPYLKYNHADAEFQQRLQGDTSFGGNLGRAVFQAKKRVLEPLGLVEQAGETAPGKKRPLIESPQQPDSSTGIGKKGKQPAKKKLVFEDETGAGDGPPEGSTSGAMSDDSEMRAAAGGAAVEGGQGADGVGNASGDWHCDSTWSEGHVTTTSTRTWVLPTYNNHLYKRLGESLQSNTYNGFSTPWGYFDFNRFHCHFSPRDWQRLINNNWGMRPKAMRVKIFNIQVKEVTTSNGETTVANNLTSTVQIFADSSYELPYVMDAGQEGSLPPFPNDVFMVPQYGYCGLVTGNTSQQQTDRNAFYCLEYFPSQMLRTGNNFEITYSFEKVPFHSMYAHSQSLDRLMNPLIDQYLWGLQSTTTGTTLNAGTATTNFTKLRPTNFSNFKKNWLPGPSIKQQGFSKTANQNYEIPATGSDSLIEYETHSTLDGRWSALTPGPPMATAGPADSKFSNSQLIFAGPKQNGNTATVPGTLIFTSEEELAATNATDTDMWGNLPGGDQSSSNLPVVNRLSALGAVPGMVWQNRDIYYQGPIWAKIPHTDGHFHPSPLIGGFGLKHPPPQIFIKNTPVPANPATTFSSTPVNSFITQYSTGQVSVQIDWEIQKERSKRWNPEVQFTSNYGQQNSLLWAPDAAGKYTEPRAIGTRYLTHHL

SEQ ID NO: 1153 - protein, 735 aa, Artificial Sequence
  Description of Artificial Sequence: Synthetic polypeptide
MAADGYLPDWLEDNLSEGVREWWALQPGAPKPKANQQHQDNARGLVLPGYKYLGPGNGLDKGEPVNAADAAALEHDKAYDQQLKAGDNPYLKYNHADAEFQQRLQGDTSFGGNLGRAVFQAKKRVLEPLGLVEQAGETAPGKKRPLIESPQQPDSSTGIGKKGKQPAKKKLVFEDETGAGDGPPEGSTSGAMSDDSEMRAAAGGAAVEGGQGADGVGNASGDWHCDSTWSEGHVTTTSTRTWVLPTYNNHLYKRLGESLQSNTYNGFSTPWGYFDFNRFHCHFSPRDWQRLINNNWGMRPKAMRVKIFNIQVKEVTTSNGETTVANNLTSTVQIFADSSYELPYVMDAGQEGSLPPFPNDVFMVPQYGYCGLVTGNTSQQQTDRNAFYCLEYFPSQMLRTGNNFEITYSFEKVPFHSMYAHSQSLDRLMNPLIDQYLWGLQSTTTGTTLNAGTATTNFTKLRPTNFSNFKKNWLPGPSIKQQGFSKTANQNYEIPATGSDSLIEYETHSTLDGRWSALTPGPPMATAGPADSKFSNSQLIFAGPKQNGNTATVPGTLIFTSEEELAATNATDTDMWGNLPGGDQSSSNLPPVMGLGALGAVPGMVWQNRDIYYQGPIWAKIPHTDGHFHPSPLIGGFGLKHPPPQIFIKNTPVPANPATTFSSTPVNSFITQYSTGQVSVQIDWEIQKERSKRWNPEVQFTSNYGQQNSLLWAPDAAGKYTEPRAIGTRYLTHHL

SEQ ID NO: 1154 - protein, 736 aa, Artificial Sequence
  Description of Artificial Sequence: Synthetic polypeptide
MAADGYLPDWLEDNLSEGVREWWALQPGAPKPKANQQHQDNARGLVLPGYKYLGPGNGLDKGEPVNAADAAALEHDKAYDQQLKAGDNPYLKYNHADAEFQQRLQGDTSFGGNLGRAVFQAKKRVLEPLGLVEQAGETAPGKKRPLIESPQQPDSSTGIGKKGKQPAKKKLVFEDETGAGDGPPEGSTSGAMSDDSEMRAAAGGAAVEGGQGADGVGNASGDWHCDSTWSEGHVTTTSTRTWVLPTYNNHLYKRLGESLQSNTYNGFSTPWGYFDFNRFHCHFSPRDWQRLINNNWGMRPKAMRVKIFNIQVKEVTTSNGETTVANNLTSTVQIFADSSYELPYVMDAGQEGSLPPFPNDVFMVPQYGYCGLVTGNTSQQQTDRNAFYCLEYFPSQMLRTGNNFEITYSFEKVPFHSMYAHSQSLDRLMNPLIDQYLWGLQSTTTGTTLNAGTATTNFTKLRPTNFSNFKKNWLPGPSIKQQGFSKTANQNYEIPATGSDSLIEYETHSTLDGRWSALTPGPPMATAGPADSKFSNSQLIFAGPKQNGNTATVPGTLIFTSEEELAATNATDTDMWGNLPGGDQSRVDRLPTVDRLTALGAVPGMVWQNRDIYYQGPIWAKIPHTDGHFHPSPLIGGFGLKHPPPQIFIKNTPVPANPATTFSSTPVNSFITQYSTGQVSVQIDWEIQKERSKRWNPEVQFTSNYGQQNSLLWAPDAAGKYTEPRAIGTRYLTHHL

SEQ ID NO: 1155 - protein, 736 aa, Artificial Sequence
  Description of Artificial Sequence: Synthetic polypeptide
MAADGYLPDWLEDNLSEGVREWWALQPGAPKPKANQQHQDNARGLVLPGYKYLGPGNGLDKGEPVNAADAAALEHDKAYDQQLKAGDNPYLKYNHADAEFQQRLQGDTSFGGNLGRAVFQAKKRVLEPLGLVEQAGETAPGKKRPLIESPQQPDSSTGIGKKGKQPAKKKLVFEDETGAGDGPPEGSTSGAMSDDSEMRAAAGGAAVEGGQGADGVGNASGDWHCDSTWSEGHVTTTSTRTWVLPTYNNHLYKRLGESLQSNTYNGFSTPWGYFDFNRFHCHFSPRDWQRLINNNWGMRPKAMRVKIFNIQVKEVTTSNGETTVANNLTSTVQIFADSSYELPYVMDAGQEGSLPPFPNDVFMVPQYGYCGLVTGNTSQQQTDRNAFYCLEYFPSQMLRTGNNFEITYSFEKVPFHSMYAHSQSLDRLMNPLIDQYLWGLQSTTTGTTLNAGTATTNFTKLRPTNFSNFKKNWLPGPSIKQQGFSKTANQNYEIPATGSDSLIEYETHSTLDGRWSALTPGPPMATAGPADSKFSNSQLIFAGPKQNGNTATVPGTLIFTSEEELAATNATDTDMWGNLPGGDQSRALRLPTVDRLTALGAVPGMVWQNRDIYYQGPIWAKIPHTDGHFHPSPLIGGFGLKHPPPQIFIKNTPVPANPATTFSSTPVNSFITQYSTGQVSVQIDWEIQKERSKRWNPEVQFTSNYGQQNSLLWAPDAAGKYTEPRAIGTRYLTHHL

SEQ ID NO: 1156 - DNA, 1172 bp, Artificial Sequence
  Description of Artificial Sequence: Synthetic polynucleotide
cttaattaggctgcgcgctcgctcgctcactgaggccgcccgggcaaagcccgggcgtcgggcgacctttggtcgcccggcctcagtgagcgagcgagcgcgcagagagggagtggccaactccatcactaggggttccttgtagttaatgattaacccgccatgctacttatctaccagggtaatggggatcctctagaactatagctagtcgacattgattattgactagttattaatagtaatcaattacggggtcattagttcatagcccatatatggagttccgcgttacataacttacggtaaatggcccgcctggctgaccgcccaacgacccccgcccattgacgtcaataatgacgtatgttcccatagtaacgccaatagggactttccattgacgtcaatgggtggactatttacggtaaactgcccacttggcagtacatcaagtgtatcatatgccaagtacgccccctattgacgtcaatgacggtaaatggcccgcctggcattatgcccagtacatgaccttatgggactttcctacttggcagtacatctacgtattagtcatcgctattaccatgtcgaggccacgttctgcttcactctccccatctcccccccctccccacccccaattttgtatttatttattttttaattattttgtgcagcgatgggggcggggggggggggcgcgcgccaggcggggcggggcggggcgaggggcggggcggggcgaggcggagaggtgcggcggcagccaatcagagcggcgcgctccgaaagtttccttttatggcgaggcggcggcggcggcggccctataaaaagcgaagcgcgcggcgggcgggagcaagctttattgcggtagtttatcacagttaaattgctaacgcagtcagtgcttctgacacaacagtctcgaacttaagctgcagaagttggtcgtgaggcactgggcaggtaagtatcaaggttacaagacaggtttaaggagaccaatagaaactgggcttgtcgagacagagaagactcttgcgtttctgataggcacctattggtcttactgacatccactttgcctttctctccacaggtgtccactcccagttcaattacagctcttaaggctagagtacttaatacgactcsactatagg

SEQ ID NO: 1157 - DNA, 3231 bp, Artificial Sequence
  Description of Artificial Sequence: Synthetic polynucleotide
taagaattcacgcgtggtacctctagagtcgacccgggcggcctcgaggacggggtgaactacgcctgaggatccgatctttttccctctgccaaaaattatggggacatcatgaagccccttgagcatctgacttctggctaataaaggaaatttattttcattgcaatagtgtgttggaattttttgtgtctctcactcggaagcaattcgttgatctgaatttcgaccacccataatacccattaccctggtagataagtagcatggcgggttaatcattaactacaaggaacccctagtgatggagttggccactccctctctgcgcgctcgctcgctcactgaggccgggcgaccaaaggtcgcccgacgcccgggctttgcccgggcggcctcagtgagcgagcgagcgcgcagccttaattaacctaattcactggccgtcgttttacaacgtcgtgactgggaaaaccctggcgttacccaacttaatcgccttgcagcacatccccctttcgccagctggcgtaatagcgaagaggcccgcaccgatcgcccttcccaacagttgcgcagcctgaatggcgaatgggacgcgccctgtagcggcgcattaagcgcggcgggtgtggtggttacgcgcagcgtgaccgctacacttgccagcgccctagcgcccgctcctttcgctttcttcccttcctttctcgccacgttcgccggctttccccgtcaagctctaaatcgggggctccctttagggttccgatttagtgctttacggcacctcgaccccaaaaaacttgattagggtgatggttcacgtagtgggccatcgccctgatagacggtttttcgccctttgacgttggagtccacgttctttaatagtggactcttgttccaaactggaacaacactcaaccctatctcggtctattcttttgatttataagggattttgccgatttcggcctattggttaaaaaatgagctgatttaacaaaaatttaacgcgaattttaacaaaatattaacgcttacaatttaggtggcacttttcggggaaatgtgcgcggaacccctatttgtttatttttctaaatacattcaaatatgtatccgctcatgagacaataaccctgataaatgcttcaataatattgaaaaaggaagagtatgagtattcaacatttccgtgtcgcccttattcccttttttgcggcattttgccttcctgtttttgctcacccagaaacgctggtgaaagtaaaagatgctgaagatcagttgggtgcacgagtgggttacatcgaactggatctcaacagcggtaagatccttgagagttttcgccccgaagaacgttttccaatgatgagcacttttaaagttctgctatgtggcgcggtattatcccgtattgacgccgggcaagagcaactcggtcgccgcatacactattctcagaatgacttggttgagtactcaccagtcacagaaaagcatcttacggatggcatgacagtaagagaattatgcagtgctgccataaccatgagtgataacactgcggccaacttacttctgacaacgatcggaggaccgaaggagctaaccgcttttttgcacaacatgggggatcatgtaactcgccttgatcgttgggaaccggagctgaatgaagccataccaaacgacgagcgtgacaccacgatgcctgtagcaatggcaacaacgttgcgcaaactattaactggcgaactacttactctagcttcccggcaacaattaatagactggatggaggcggataaagttgcaggaccacttctgcgctcggcccttccggctggctggtttattgctgataaatctggagccggtgagcgtgggtctcgcggtatcattgcagcactggggccagatggtaagccctcccgtatcgtagttatctacacgacggggagtcaggcaactatggatgaacgaaatagacagatcgctgagataggtgcctcactgattaagcattggtaactgtcagaccaagtttactcatatatactttagattgatttaaaacttcatttttaatttaaaaggatctaggtgaagatcctttttgataatctcatgaccaaaatcccttaacgtgagttttcgttccactgagcgtcagaccccgtagaaaagatcaaaggatcttcttgagatcctttttttctgcgcgtaatctgctgcttgcaaacaaaaaaaccaccgctaccagcggtggtttgtttgccggatcaagagctaccaactctttttccgaaggtaactggcttcagcagagcgcagataccaaatactgttcttctagtgtagccgtagttaggccaccacttcaagaactctgtagcaccgcctacatacctcgctctgctaatcctgttaccagtggctgctgccagtggcgataagtcgtgtcttaccgggttggactcaagacgatagttaccggataaggcgcagcggtcgggctgaacggggggttcgtgcacacagcccagcttggagcgaacgacctacaccgaactgagatacctacagcgtgagctatgagaaagcgccacgcttcccgaagggagaaaggcggacaggtatccggtaagcggcagggtcggaacaggagagcgcacgagggagcttccagggggaaacgcctggtatctttatagtcctgtcgggtttcgccacctctgacttgagcgtcgatttttgtgatgctcgtcaggggggcggagcctatggaaaaacgccagcaacgcggcctttttacggttcctggccttttgctggccttttgctcacatgttctttcctgcgttatcccctgattctgtggataaccgtattaccgcctttgagtgagctgataccgctcgccgcagccgaacgaccgagcgcagcgagtcagtgagcgaggaagcggaagagcgcccaatacgcaaaccgcctctccccgcgcgttggccgattcattaatgcagctggcacgacaggtttcccgactggaaagcgggcagtgagcgcaacgcaattaatgtgagttagctcactcattaggcaccccaggctttacactttatgcttccggctcgtatgttgtgtggaattgtgagcggataacaatttcacacaggaaacagctatgaccatgattacgccagatttaattaaggc

SEQ ID NO: 1158 - protein, 737 aa, Artificial Sequence
  Description of Artificial Sequence: Synthetic polypeptide
  MOD_RES (264)..(264): Any amino acid
  MOD_RES (266)..(266): Any amino acid
  MOD_RES (268)..(268): Any amino acid
  MOD_RES (448)..(448): Any amino acid
  MOD_RES (459)..(460): Any amino acid
  MOD_RES (467)..(467): Any amino acid
  MOD_RES (470)..(471): Any amino acid
  MOD_RES (474)..(474): Any amino acid
  MOD_RES (495)..(495): Any amino acid
  MOD_RES (516)..(516): Any amino acid
  MOD_RES (533)..(533): Any amino acid
  MOD_RES (547)..(547): Any amino acid
  MOD_RES (551)..(551): Any amino acid
  MOD_RES (555)..(555): Any amino acid
  MOD_RES (557)..(557): Any amino acid
  MOD_RES (561)..(561): Any amino acid
  MOD_RES (563)..(563): Any amino acid
  MOD_RES (577)..(577): Any amino acid
  MOD_RES (583)..(583): Any amino acid
  MOD_RES (593)..(593): Any amino acid
  MOD_RES (596)..(596): Any amino acid
  MOD_RES (661)..(662): Any amino acid
  MOD_RES (664)..(665): Any amino acid
  MOD_RES (710)..(710): Any amino acid
  MOD_RES (717)..(719): Any amino acid
  MOD_RES (723)..(723): Any amino acid
MAADGYLPDWLEDNLSEGIREWWDLKPGAPKPKANQQKQDDGRGLVLPGYKYLGPFNGLDKGEPVNAADAAALEHDKAYDQQLKAGDNPYLRYNHADAEFQERLQEDTSFGGNLGRAVFQAKKRVLEPLGLVEEGAKTAPGKKRPVEPSPQRSPDSSTGIGKKGQQPAKKRLNFGQTGDSESVPDPQPLGEPPAGPSGLGSGTMAAGGGAPMADNNEGADGVGNASGNWHCDSTWLGDRVITTSTRTWALPTYNNHLYKQISSXSXGXTNDNHYFGYSTPWGYFDFNRFHCHFSPRDWQRLINNNWGFRPKRLNFKLFNIQVKEVTTNDGVTTIANNLTSTVQVFSDSEYQLPYVLGSAHQGCLPPFPADVFMIPQYGYLTLNNGSQAVGRSSFYCLEYFPSQMLRTGNNFTFSYTFEDVPFHSSYAHSQSLDRLMNPLIDQYLYYLXRTQSTGGTAGXXELLFSQXGPXXMSXQAKNWLPGPCYRQQRVSKTLXQNNNSNFAWTGATKYHLNGRXSLVNPGVAMATHKDDEXRFFPSSGVLIFGKXGAGXNNTXLXNVMXTXEEEIKTTNPVATEXYGVVAXNLQSSNTAPXTGXVNSQGALPGMVWQNRDVYLQGPIWAKIPHTDGNFHPSPLMGGFGLKHPPPQILIKNTPVPANPPXXFXXAKFASFITQYSTGQVSVEIEWELQKENSKRWNPEIQYTSNYAKSXNVDFAVXXXGVYXEPRPIGTRYLTRNL

SEQ ID NO: 1159 - protein, 737 aa, Artificial Sequence
  Description of Artificial Sequence: Synthetic polypeptide
MAADGYLPDWLEDNLSEGIREWWDLKPGAPKPKANQQKQDDGRGLVLPGYKYLGPFNGLDKGEPVNAADAAALEHDKAYDQQLKAGDNPYLRYNHADAEFQERLQEDTSFGGNLGRAVFQAKKRVLEPLGLVEEGAKTAPGKKRPVEPSPQRSPDSSTGIGKKGQQPAKKRLNFGQTGDSESVPDPQPLGEPPAGPSGLGSGTMAAGGGAPMADNNEGADGVGNASGNWHCDSTWLGDRVITTSTRTWALPTYNNHLYKQISSASSGSTNDNHYFGYSTPWGYFDFNRFHCHFSPRDWQRLINNNWGFRPKRLNFKLFNIQVKEVTTNDGVTTIANNLTSTVQVFSDSEYQLPYVLGSAHQGCLPPFPADVFMIPQYGYLTLNNGSQAVGRSSFYCLEYFPSQMLRTGNNFTFSYTFEDVPFHSSYAHSQSLDRLMNPLIDQYLYYLARTQSTGGTAGNRELLFSQGGPSNMSAQAKNWLPGPCYRQQRVSKTLAQNNNSNFAWTGATKYHLNGRDSLVNPGVAMATHKDDEDRFFPSSGVLIFGKEGAGANNTALENVMLTNEEEIKTTNPVATEQYGVVASNLQSSNTAPATGAVNSQGALPGMVWQNRDVYLQGPIWAKIPHTDGNFHPSPLMGGFGLKHPPPQILIKNTPVPANPPATFTPAKFASFITQYSTGQVSVEIEWELQKENSKRWNPEIQYTSNYAKSTNVDFAVNNEGVYSEPRPIGTRYLTRNL

SEQ ID NO: 1160 - protein, 737 aa, Artificial Sequence
  Description of Artificial Sequence: Synthetic polypeptide
MAADGYLPDWLEDNLSEGIREWWDLKPGAPKPKANQQKQDDGRGLVLPGYKYLGPFNGLDKGEPVNAADAAALEHDKAYDQQLKAGDNPYLRYNHADAEFQERLQEDTSFGGNLGRAVFQAKKRVLEPLGLVEEGAKTAPGKKRPVEPSPQRSPDSSTGIGKKGQQPAKKRLNFGQTGDSESVPDPQPLGEPPAGPSGLGSGTMAAGGGAPMADNNEGADGVGNASGNWHCDSTWLGDRVITTSTRTWALPTYNNHLYKQISSQSSGSTNDNHYFGYSTPWGYFDFNRFHCHFSPRDWQRLINNNWGFRPKRLNFKLFNIQVKEVTTNDGVTTIANNLTSTVQVFSDSEYQLPYVLGSAHQGCLPPFPADVFMIPQYGYLTLNNGSQAVGRSSFYCLEYFPSQMLRTGNNFTFSYTFEDVPFHSSYAHSQSLDRLMNPLIDQYLYYLSRTQSTGGTAGNRELLFSQGGPANMSAQAKNWLPGPCYRQQRVSKTLSQNNNSNFAWTGATKYHLNGRDSLVNPGVAMATHKDDEERFFPSSGVLIFGKQGAGANNTTLDNVMMTSEEEIKTTNPVATEQYGVVASNLQSSNTAPQTGTVNSQGALPGMVWQNRDVYLQGPIWAKIPHTDGNFHPSPLMGGFGLKHPPPQILIKNTPVPANPPAVFSPAKFASFITQYSTGQVSVEIEWELQKENSKRWNPEIQYTSNYAKSTNVDFAVNSEGVYSEPRPIGTRYLTRNL

SEQ ID NO: 1161 - protein, 737 aa, Artificial Sequence
  Description of Artificial Sequence: Synthetic polypeptide
MAADGYLPDWLEDNLSEGIREWWDLKPGAPKPKANQQKQDDGRGLVLPGYKYLGPFNGLDKGEPVNAADAAALEHDKAYDQQLKAGDNPYLRYNHADAEFQERLQEDTSFGGNLGRAVFQAKKRVLEPLGLVEEGAKTAPGKKRPVEPSPQRSPDSSTGIGKKGQQPAKKRLNFGQTGDSESVPDPQPLGEPPAGPSGLGSGTMAAGGGAPMADNNEGADGVGNASGNWHCDSTWLGDRVITTSTRTWALPTYNNHLYKQISSASSGSTNDNHYFGYSTPWGYFDFNRFHCHFSPRDWQRLINNNWGFRPKRLNFKLFNIQVKEVTTNDGVTTIANNLTSTVQVFSDSEYQLPYVLGSAHQGCLPPFPADVFMIPQYGYLTLNNGSQAVGRSSFYCLEYFPSQMLRTGNNFTFSYTFEDVPFHSSYAHSQSLDRLMNPLIDQYLYYLARTQSTGGTAGTRELLFSQGGPSNMSAQAKNWLPGPCYRQQRVSKTLTQNNNSNFAWTGATKYHLNGRDSLVNPGVAMATHKDDEDRFFPSSGVLIFGKQGAGANNTALDNVMITNEEEIKTTNPVATEQYGVVASNLQSSNTAPATGTVNSQGALPGMVWQNRDVYLQGPIWAKIPHTDGNFHPSPLMGGFGLKHPPPQILIKNTPVPANPPTVFSPAKFASFITQYSTGQVSVEIEWELQKENSKRWNPEIQYTSNYAKSTNVDFAVNSEGVYTEPRPIGTRYLTRNL

SEQ ID NO: 1162 - protein, 737 aa, Artificial Sequence
  Description of Artificial Sequence: Synthetic polypeptide
  MOD_RES (264)..(264): Any amino acid
  MOD_RES (448)..(448): Any amino acid
  MOD_RES (459)..(459): Any amino acid
  MOD_RES (470)..(470): Any amino acid
  MOD_RES (495)..(495): Any amino acid
  MOD_RES (533)..(533): Any amino acid
  MOD_RES (547)..(547): Any amino acid
  MOD_RES (555)..(555): Any amino acid
  MOD_RES (557)..(557): Any amino acid
  MOD_RES (561)..(561): Any amino acid
  MOD_RES (563)..(563): Any amino acid
  MOD_RES (593)..(593): Any amino acid
  MOD_RES (596)..(596): Any amino acid
  MOD_RES (661)..(662): Any amino acid
  MOD_RES (664)..(664): Any amino acid
  MOD_RES (718)..(718): Any amino acid
  MOD_RES (723)..(723): Any amino acid
MAADGYLPDWLEDNLSEGIREWWDLKPGAPKPKANQQKQDDGRGLVLPGYKYLGPFNGLDKGEPVNAADAAALEHDKAYDQQLKAGDNPYLRYNHADAEFQERLQEDTSFGGNLGRAVFQAKKRVLEPLGLVEEGAKTAPGKKRPVEPSPQRSPDSSTGIGKKGQQPAKKRLNFGQTGDSESVPDPQPLGEPPAGPSGLGSGTMAAGGGAPMADNNEGADGVGNASGNWHCDSTWLGDRVITTSTRTWALPTYNNHLYKQISSXSSGSTNDNHYFGYSTPWGYFDFNRFHCHFSPRDWQRLINNNWGFRPKRLNFKLFNIQVKEVTTNDGVTTIANNLTSTVQVFSDSEYQLPYVLGSAHQGCLPPFPADVFMIPQYGYLTLNNGSQAVGRSSFYCLEYFPSQMLRTGNNFTFSYTFEDVPFHSSYAHSQSLDRLMNPLIDQYLYYLXRTQSTGGTAGXRELLFSQGGPXNMSAQAKNWLPGPCYRQQRVSKTLXQNNNSNFAWTGATKYHLNGRDSLVNPGVAMATHKDDEXRFFPSSGVLIFGKXGAGANNTXLXNVMXTXEEEIKTTNPVATEQYGVVASNLQSSNTAPXTGXVNSQGALPGMVWQNRDVYLQGPIWAKIPHTDGNFHPSPLMGGFGLKHPPPQILIKNTPVPANPPXXFXPAKFASFITQYSTGQVSVEIEWELQKENSKRWNPEIQYTSNYAKSTNVDFAVNXEGVYXEPRPIGTRYLTRNL

SEQ ID NO: 1163 - protein, 737 aa, Artificial Sequence
  Description of Artificial Sequence: Synthetic polypeptide
  MOD_RES (264)..(264): Any amino acid
  MOD_RES (448)..(448): Any amino acid
  MOD_RES (470)..(470): Any amino acid
  MOD_RES (533)..(533): Any amino acid
  MOD_RES (547)..(547): Any amino acid
  MOD_RES (555)..(555): Any amino acid
  MOD_RES (557)..(557): Any amino acid
  MOD_RES (561)..(561): Any amino acid
  MOD_RES (563)..(563): Any amino acid
  MOD_RES (593)..(593): Any amino acid
  MOD_RES (596)..(596): Any amino acid
  MOD_RES (662)..(662): Any amino acid
  MOD_RES (664)..(664): Any amino acid
  MOD_RES (718)..(718): Any amino acid
MAADGYLPDWLEDNLSEGIREWWDLKPGAPKPKANQQKQDDGRGLVLPGYKYLGPFNGLDKGEPVNAADAAALEHDKAYDQQLKAGDNPYLRYNHADAEFQERLQEDTSFGGNLGRAVFQAKKRVLEPLGLVEEGAKTAPGKKRPVEPSPQRSPDSSTGIGKKGQQPAKKRLNFGQTGDSESVPDPQPLGEPPAGPSGLGSGTMAAGGGAPMADNNEGADGVGNASGNWHCDSTWLGDRVITTSTRTWALPTYNNHLYKQISSXSSGSTNDNHYFGYSTPWGYFDFNRFHCHFSPRDWQRLINNNWGFRPKRLNFKLFNIQVKEVTTNDGVTTIANNLTSTVQVFSDSEYQLPYVLGSAHQGCLPPFPADVFMIPQYGYLTLNNGSQAVGRSSFYCLEYFPSQMLRTGNNFTFSYTFEDVPFHSSYAHSQSLDRLMNPLIDQYLYYLXRTQSTGGTAGNRELLFSQGGPXNMSAQAKNWLPGPCYRQQRVSKTLSQNNNSNFAWTGATKYHLNGRDSLVNPGVAMATHKDDEXRFFPSSGVLIFGKXGAGANNTXLXNVMXTXEEEIKTTNPVATEQYGVVASNLQSSNTAPXTGXVNSQGALPGMVWQNRDVYLQGPIWAKIPHTDGNFHPSPLMGGFGLKHPPPQILIKNTPVPANPPAXFXPAKFASFITQYSTGQVSVEIEWELQKENSKRWNPEIQYTSNYAKSTNVDFAVNXEGVYSEPRPIGTRYLTRNL

SEQ ID NO: 1164 - DNA, 2217 bp, Artificial Sequence
  Description of Artificial Sequence: Synthetic polynucleotide
atggctgccgatggttatcttccagattggctcgaggacactctctctgaaggaataagacagtggtggaagctcaaacctggcccaccaccaccaaagcccgcagagcggcataaggacgacagcaggggtcttgtgcttcctgggtacaagtacctcggacccttcaacggactcgacaagggagagccggtcaacgaggcagacgccgcggccctcgagcacgacaaagcctacgaccggcagctcgacagcggagacaacccgtacctcaagtacaaccacgccgacgcggagtttcaggagcgccttaaagaagatacgtcttttgggggcaacctcggacgagcagtcttccaggcgaaaaagagggttcttgaacctctgggcctggttgaggaacctgttaagacggctccgggaaagaagagaccggtagagccatcaccccagcgttctccagactcctctacgggcatcggcaagaaaggccaacagcccgccagaaaaagactcaattttggtcagactggcgactcagagtcagttccagaccctcaacctctcggagaacctccagcagcgccctctggtgtgggacctaatacaatggctgcaggcggtggcgcaccaatggcagacaataacgaaggcgccgacggagtgggtagttcctcgggaaattggcattgcgattccacatggctgggcgacagagtcatcaccaccagcacccgaacctgggccctgcccacctacaacaaccacctctacaagcaaatctccaacgggacatcgggaggagccaccaacgacaacacctacttcggctacagcaccccctgggggtattttgactttaacagattccactgccacttttcaccacgtgactggcagcgactcatcaacaacaactggggattccggcccaagagactcagcttcaagctcttcaacatccaggtcaaggaggtcacgcagaatgaaggcaccaagaccatcgccaataacctcaccagcaccatccaggtgtttacggactcggagtaccagctgccgtacgttctcggctctgcccaccagggctgcctgcctccgttcccggcggacgtgttcatgattccccagtacggctacctaacactcaacaacggtagtcaggccgtgggacgctcctccttctactgcctggaatactttccttcgcagatgctgagaaccggcaacaacttccagtttacttacaccttcgaggacgtgcctttccacagcagctacgcccacagccagagcttggaccggctgatgaatcctctgattgaccagtacctgtactacttgtctcggactcaaacaacaggaggcacggcaaatacgcagactctgggcttcagccaaggtgggcctaatacaatggccaatcaggcaaagaactggctgccaggaccctgttaccgccaacaacgcgtctcaacgacaaccgggcaaaacaacaatagcaactttgcctggactgctgggaccaaataccatctgaatggaagaaattcattggctaatcctggcatcgctatggcaacacacaaagacgacgaggagcgtttttttcccagtaacgggatcctgatttttggcaaacaaaatgctgccagagacaatgcggattacagcgatgtcatgctcaccagcgaggaagaaatcaaaaccactaaccctgtggctacagaggaatacggtatcgtggcagataacttgcagcagcaaaacacggctcctcaaattggaactgtcaacagccagggggccttacccggtatggtctggcagaaccgggacgtgtacctgcagggtcccatctgggccaagattcctcacacggacggcaacttccacccgtctccgctgatgggcggctttggcctgaaacatcctccgcctcagatcctgatcaagaacacgcctgtacctgcggatcctccgaccaccttcaaccagtcaaagctgaactctttcatcacgcaatacagcaccggacaggtcagcgtggaaattgaatgggagctgcagaaggaaaacagcaagcgctggaaccccgagatccagtacacctccaactactacaaatctacaagtgtggactttgctgttaatacagaaggcgtgtactctgaaccccgccccattggcacccgttacctcacccgtaatctgtaa

SEQ ID NO: 1165 - protein, 733 aa, Artificial Sequence; identical to SEQ ID NO: 950
  Description of Artificial Sequence: Synthetic polypeptide

SEQ ID NO: 1166 - DNA, 2203 bp, Artificial Sequence
  Description of Artificial Sequence: Synthetic polynucleotide
atgtcttttgttgatcaccctccagattggttggaagaagttggtgaaggtcttcgcgagtttttgggccttgaagcgggcccaccgaaaccaaaacccaatcagcagcatcaagatcaagcccgtggtcttgtgctgcctggttataactatctcggacccggaaacggtctcgatcgaggagagcctgtcaacagggcagacgaggtcgcgcgagagcacgacatctcgtacaacgagcagcttgaggcgggagacaacccctacctcaagtacaaccacgcggacgccgagtttcaggagaagctcgccgacgacacatccttcgggggaaacctcggaaaggcagtctttcaggccaagaaaagggttctcgaaccttttggcctggttgaagagggtgctaagacggcccctaccggaaagcggatagacgaccactttccaaaaagaaagaaggctcggaccgaagaggactccaagccttccacctcgtcagacgccgaagctggacccagcggatcccagcagctgcaaatcccagcccaaccagcctcaagtttgggagctgatacaatgtctgcgggaggtggcggcccattgggcgacaataaccaaggtgccgatggagtgggcaatgcctcgggagattggcattgcgattccacgtggatgggggacagagtcgtcaccaagtccacccgaacctgggtgctgcccagctacaacaaccaccagtaccgagagatcaaaagcggctccgtcgacggaagcaacgccaacgcctactttggatacagcaccccctgggggtactttgactttaaccgcttccacagccactggagcccccgagactggcaaagactcatcaacaactactggggcttcagaccccggtccctcagagtcaaaatcttcaacattcaagtcaaagaggtcacggtgcaggactccaccaccaccatcgccaacaacctcacctccaccgtccaagtgtttacggacgacgactaccagctgccctacgtcgtcggcaacgggaccgagggatgcctgccggccttccctccgcaggtctttacgctgccgcagtacggttacgcgacgctgaaccgcgacaacacagaaaatcccaccgagaggagcagcttcttctgcctagagtactttcccagcaagatgctgagaacgggcaacaactttgagtttacctacaactttgaggaggtgcccttccactccagcttcgctcccagtcagaacctgttcaagctggccaacccgctggtggaccagtacttgtaccgcttcgtgagcacaaataacactggcggagtccagttcaacaagaacctggccgggagatacgccaacacctacaaaaactggttcccggggcccatgggccgaacccagggctggaacctgggctccggggtcaaccgcgccagtgtcagcgccttcgccacgaccaataggatggagctcgagggcgcgagttaccaggtgcccccgcagccgaacggcatgaccaacaacctccagggcagcaacacctatgccctggagaacactatgatcttcaacagccagccggcgaacccgggcaccaccgccacgtacctcgagggcaacatgctcatcaccagcgagagcgagacgcagccggtgaaccgcgtggcgtacaacgtcggcgggcaggtggccaccaacaaccagagctccaccactgcccccgcgaccggcacgtacaacctccaggaaatcgtgcccggcagcgtgtggatggagagggacgtgtacctccaaggacccatctgggccaagatcccagagacgggggcgcactttcacccctctccggccatgggcggattcggactcaaacacccaccgcccatgatgctcatcaagaacacgcctgtgcccggaaatatcaccagcttctcggacgtgcccgtcagcagcttcatcacccagtacagcaccgggcaggtcaccgtggagatggagtgggagctcaagaaggaaaactccaagaggtggaacccagagatccagtacacaaacaactacaacgacccccagtttgtggactttgccccggacagcaccggggaatacagaaccaccagacctatcggaacccgataccttacccgacccctttaacccattcatgtcgcataccctcaataaa

SEQ ID NO: 1167 - protein, 724 aa, Artificial Sequence
  Description of Artificial Sequence: Synthetic polypeptide
MSFVDHPPDWLEEVGEGLREFLGLEAGPPKPKPNQQHQDQARGLVLPGYNYLGPGNGLDRGEPVNRADEVAREHDISYNEQLEAGDNPYLKYNHADAEFQEKLADDTSFGGNLGKAVFQAKKRVLEPFGLVEEGAKTAPTGKRIDDHFPKRKKARTEEDSKPSTSSDAEAGPSGSQQLQIPAQPASSLGADTMSAGGGGPLGDNNQGADGVGNASGDWHCDSTWMGDRVVTKSTRTWVLPSYNNHQYREIKSGSVDGSNANAYFGYSTPWGYFDFNRFHSHWSPRDWQRLINNYWGFRPRSLRVKIFNIQVKEVTVQDSTTTIANNLTSTVQVFTDDDYQLPYVVGNGTEGCLPAFPPQVFTLPQYGYATLNRDNTENPTERSSFFCLEYFPSKMLRTGNNFEFTYNFEEVPFHSSFAPSQNLFKLANPLVDQYLYRFVSTNNTGGVQFNKNLAGRYANTYKNWFPGPMGRTQGWNLGSGVNRASVSAFATTNRMELEGASYQVPPQPNGMTNNLQGSNTYALENTMIFNSQPANPGTTATYLEGNMLITSESETQPVNRVAYNVGGQVATNNQSSTTAPATGTYNLQEIVPGSVWMERDVYLQGPIWAKIPETGAHFHPSPAMGGFGLKHPPPMMLIKNTPVPGNITSFSDVPVSSFITQYSTGQVTVEMEWELKKENSKRWNPEIQYTNNYNDPQFVDFAPDSTGEYRTTRPIGTRYLTRPL

SEQ ID NO: 1168 - DNA, 2203 bp, Artificial Sequence
  Description of Artificial Sequence: Synthetic polynucleotide
atgtcttttgttgatcaccctccagattggttggaagaagttggtgaaggtcttcgcgagtttttgggccttgaagcgggcccaccgaaaccaaaacccaatcagcagcatcaagatcaagcccgtggtcttgtgctgcctggttataactatctcggacccggaaacggtctcgatcgaggagagcctgtcaacagggcagacgaggtcgcgcgagagcacgacatctcgtacaacgagcagcttgaggcgggagacaacccctacctcaagtacaaccacgcggacgccgagtttcaggagaagctcgccgacgacacatccttcgggggaaacctcggaaaggcagtctttcaggccaagaaaagggttctcgaaccttttggcctggttgaagagggtgctaagacggcccctaccggaaagcggatagacgaccactttccaaaaagaaagaaggctcggaccgaagaggactccaagccttccacctcgtcagacgccgaagctggacccagcggatcccagcagctgcaaatcccagcccaaccagcctcaagtttgggagctgatacaatgtctgcgggaggtggcggcccattgggcgacaataaccaaggtgccgatggagtgggcaatgcctcgggagattggcattgcgattccacgtggatgggggacagagtcgtcaccaagtccacccgaacctgggtgctgcccagctacaacaaccaccagtaccgagagatcaaaagcggctccgtcgacggaagcaacgccaacgcctactttggatacagcaccccctgggggtactttgactttaaccgcttccacagccactggagcccccgagactggcaaagactcatcaacaactactggggcttcagaccccggtccctcagagtcaaaatcttcaacattcaagtcaaagaggtcacggtgcaggactccaccaccaccatcgccaacaacctcacctccaccgtccaagtgtttacggacgacgactaccagctgccctacgtcgtcggcaacgggaccgagggatgcctgccggccttccctccgcaggtctttacgctgccgcagtacggttacgcgacgctgaaccgcgacaacacagaaaatcccaccgagaggagcagcttcttctgcctagagtactttcccagcaagatgctgagaacgggcaacaactttgagtttacctacaactttgaggaggtgcccttccactccagcttcgctcccagtcagaacctgttcaagctggccaacccgctggtggaccagtacttgtaccgcttcgtgagcacaaataacactggcggagtccagttcaacaagaacctggccgggagatacgccaacacctacaaaaactggttcccggggcccatgggccgaacccagggctggaacctgggctccggggtcaaccgcgccagtgtcagcgccttcgccacgaccaataggatggagctcgagggcgcgagttaccaggtgcccccgcagccgaacggcatgaccaacaacctccagggcagcaacacctatgccctggagaacactatgatcttcaacagccagccggcgaacccgggcaccaccgccacgtacctcgagggcaacatgctcatcaccagcgagagcgagacgcagccggtgaaccgcgtggcgtacaacgtcggcgggcagatggccaccaacaaccagagctccaccactgcccccgcgaccggcacggtcaacctccaggaaatcgtgcccggcagcgtgtggatggagagggacgtgtacctccaaggacccatctgggccaagatcccagagacgggggcgcactttcacccctctccggccatgggcggattcggactcaaacacccaccgcccatgatgctcatcaagaacacgcctgtgcccggaaatatcaccagcttctcggacgtgcccgtcagcagcttcatcacccagtacagcaccgggcaggtcaccgtggagatggagtgggagctcaagaaggaaaactccaagaggtggaacccagagatccagtacacaaacaactacaacgacccccagtttgtggactttgccccggacagcaccggggaatacagaaccaccagacctatcggaacccgataccttacccgacccctttaacccattcatgtcgcataccctcaataaa

SEQ ID NO: 1169 - protein, 724 aa, Artificial Sequence
  Description of Artificial Sequence: Synthetic polypeptide
MSFVDHPPDWLEEVGEGLREFLGLEAGPPKPKPNQQHQDQARGLVLPGYNYLGPGNGLDRGEPVNRADEVAREHDISYNEQLEAGDNPYLKYNHADAEFQEKLADDTSFGGNLGKAVFQAKKRVLEPFGLVEEGAKTAPTGKRIDDHFPKRKKARTEEDSKPSTSSDAEAGPSGSQQLQIPAQPASSLGADTMSAGGGGPLGDNNQGADGVGNASGDWHCDSTWMGDRVVTKSTRTWVLPSYNNHQYREIKSGSVDGSNANAYFGYSTPWGYFDFNRFHSHWSPRDWQRLINNYWGFRPRSLRVKIFNIQVKEVTVQDSTTTIANNLTSTVQVFTDDDYQLPYVVGNGTEGCLPAFPPQVFTLPQYGYATLNRDNTENPTERSSFFCLEYFPSKMLRTGNNFEFTYNFEEVPFHSSFAPSQNLFKLANPLVDQYLYRFVSTNNTGGVQFNKNLAGRYANTYKNWFPGPMGRTQGWNLGSGVNRASVSAFATTNRMELEGASYQVPPQPNGMTNNLQGSNTYALENTMIFNSQPANPGTTATYLEGNMLITSESETQPVNRVAYNVGGQMATNNQSSTTAPATGTVNLQEIVPGSVWMERDVYLQGPIWAKIPETGAHFHPSPAMGGFGLKHPPPMMLIKNTPVPGNITSFSDVPVSSFITQYSTGQVTVEMEWELKKENSKRWNPEIQYTNNYNDPQFVDFAPDSTGEYRTTRPIGTRYLTRPL

SEQ ID NO: 1170 - DNA, 2203 bp, Artificial Sequence
  Description of Artificial Sequence: Synthetic polynucleotide
atgtcttttgttgatcaccctccagattggttggaagaagttggtgaaggtcttcgcgagtttttgggccttgaagcgggcccaccgaaaccaaaacccaatcagcagcatcaagatcaagcccgtggtcttgtgctgcctggttataactatctcggacccggaaacggtctcgatcgaggagagcctgtcaacagggcagacgaggtcgcgcgagagcacgacatctcgtacaacgagcagcttgaggcgggagacaacccctacctcaagtacaaccacgcggacgccgagtttcaggagaagctcgccgacgacacatccttcgggggaaacctcggaaaggcagtctttcaggccaagaaaagggttctcgaaccttttggcctggttgaagagggtgctaagacggcccctaccggaaagcggatagacgaccactttccaaaaagaaagaaggctcggaccgaagaggactccaagccttccacctcgtcagacgccgaagctggacccagcggatcccagcagctgcaaatcccagcccaaccagcctcaagtttgggagctgatacaatgtctgcgggaggtggcggcccattgggcgacaataaccaaggtgccgatggagtgggcaatgcctcgggagattggcattgcgattccacgtggatgggggacagagtcgtcaccaagtccacccgaacctgggtgctgcccagctacaacaaccaccagtaccgagagatcaaaagcggctccgtcgacggaagcaacgccaacgcctactttggatacagcaccccctgggggtactttgactttaaccgcttccacagccactggagcccccgagactggcaaagactcatcaacaactactggggcttcagaccccggtccctcagagtcaaaatcttcaacattcaagtcaaagaggtcacggtgcaggactccaccaccaccatcgccaacaacctcacctccaccgtccaagtgtttacggacgacgactaccagctgccctacgtcgtcggcaacgggaccgagggatgcctgccggccttccctccgcaggtctttacgctgccgcagtacggttacgcgacgctgaaccgcgacaacacagaaaatcccaccgagaggagcagcttcttctgcctagagtactttcccagcaagatgctgagaacgggcaacaactttgagtttacctacaactttgaggaggtgcccttccactccagcttcgctcccagtcagaacctgttcaagctggccaacccgctggtggaccagtacttgtaccgcttcgtgagcacaaataacactggcggagtccagttcaacaagaacctggccgggagatacgccaacacctacaaaaactggttcccggggcccatgggccgaacccagggctggaacctgggctccggggtcaaccgcgccagtgtcagcgccttcgccacgaccaataggatggagctcgagggcgcgagttaccaggtgcccccgcagccgaacggcatgaccaacaacctccagggcagcaacacctatgccctggagaacactatgatcttcaacagccagccggcgaacccgggcaccaccgccacgtacctcgagggcaacatgctcatcaccagcgagagcgagacgcagccggtgaaccgcgtggcgtacaacgtcggcgggcagatggccaccaacaaccagagctccaccactgcccccgcgaccggcacgtacaacacccaggaaatcgtgcccggcagcgtgtggatggagagggacgtgtacctccaaggacccatctgggccaagatcccagagacgggggcgcactttcacccctctccggccatgggcggattcggactcaaacacccaccgcccatgatgctcatcaagaacacgcctgtgcccggaaatatcaccagcttctcggacgtgcccgtcagcagcttcatcacccagtacagcaccgggcaggtcaccgtggagatggagtgggagctcaagaaggaaaactccaagaggtggaacccagagatccagtacacaaacaactacaacgacccccagtttgtggactttgccccggacagcaccggggaatacagaaccaccagacctatcggaacccgataccttacccgacccctttaacccattcatgtcgcataccctcaataaa

SEQ ID NO: 1171 - protein, 724 aa, Artificial Sequence
  Description of Artificial Sequence: Synthetic polypeptide
MSFVDHPPDWLEEVGEGLREFLGLEAGPPKPKPNQQHQDQARGLVLPGYNYLGPGNGLDRGEPVNRADEVAREHDISYNEQLEAGDNPYLKYNHADAEFQEKLADDTSFGGNLGKAVFQAKKRVLEPFGLVEEGAKTAPTGKRIDDHFPKRKKARTEEDSKPSTSSDAEAGPSGSQQLQIPAQPASSLGADTMSAGGGGPLGDNNQGADGVGNASGDWHCDSTWMGDRVVTKSTRTWVLPSYNNHQYREIKSGSVDGSNANAYFGYSTPWGYFDFNRFHSHWSPRDWQRLINNYWGFRPRSLRVKIFNIQVKEVTVQDSTTTIANNLTSTVQVFTDDDYQLPYVVGNGTEGCLPAFPPQVFTLPQYGYATLNRDNTENPTERSSFFCLEYFPSKMLRTGNNFEFTYNFEEVPFHSSFAPSQNLFKLANPLVDQYLYRFVSTNNTGGVQFNKNLAGRYANTYKNWFPGPMGRTQGWNLGSGVNRASVSAFATTNRMELEGASYQVPPQPNGMTNNLQGSNTYALENTMIFNSQPANPGTTATYLEGNMLITSESETQPVNRVAYNVGGQMATNNQSSTTAPATGTYNTQEIVPGSVWMERDVYLQGPIWAKIPETGAHFHPSPAMGGFGLKHPPPMMLIKNTPVPGNITSFSDVPVSSFITQYSTGQVTVEMEWELKKENSKRWNPEIQYTNNYNDPQFVDFAPDSTGEYRTTRPIGTRYLTRPL

SEQ ID NO: 1172 - DNA, 2203 bp, Artificial Sequence
  Description of Artificial Sequence: Synthetic polynucleotide
atgtcttttgttgatcaccctccagattggttggaagaagttggtgaaggtcttcgcgagtttttgggccttgaagcgggcccaccgaaaccaaaacccaatcagcagcatcaagatcaagcccgtggtcttgtgctgcctggttataactatctcggacccggaaacggtctcgatcgaggagagcctgtcaacagggcagacgaggtcgcgcgagagcacgacatctcgtacaacgagcagcttgaggcgggagacaacccctacctcaagtacaaccacgcggacgccgagtttcaggagaagctcgccgacgacacatccttcgggggaaacctcggaaaggcagtctttcaggccaagaaaagggttctcgaaccttttggcctggttgaagagggtgctaagacggcccctaccggaaagcggatagacgaccactttccaaaaagaaagaaggctcggaccgaagaggactccaagccttccacctcgtcagacgccgaagctggacccagcggatcccagcagctgcaaatcccagcccaaccagcctcaagtttgggagctgatacaatgtctgcgggaggtggcggcccattgggcgacaataaccaaggtgccgatggagtgggcaatgcctcgggagattggcattgcgattccacgtggatgggggacagagtcgtcaccaagtccacccgaacctgggtgctgcccagctacaacaaccaccagtaccgagagatcaaaagcggctccgtcgacggaagcaacgccaacgcctactttggatacagcaccccctgggggtactttgactttaaccgcttccacagccactggagcccccgagactggcaaagactcatcaacaactactggggcttcagaccccggtccctcagagtcaaaatcttcaacattcaagtcaaagaggtcacggtgcaggactccaccaccaccatcgccaacaacctcacctccaccgtccaagtgtttacggacgacgactaccagctgccctacgtcgtcggcaacgggaccgagggatgcctgccggccttccctccgcaggtctttacgctgccgcagtacggttacgcgacgctgaaccgcgacaacacagaaaatcccaccgagaggagcagcttcttctgcctagagtactttcccagcaagatgctgagaacgggcaacaactttgagtttacctacaactttgaggaggtgcccttccactccagcttcgctcccagtcagaacctgttcaagctggccaacccgctggtggaccagtacttgtaccgcttcgtgagcacaaataacactggcggagtccagttcaacaagaacctggccgggagatacgccaacacctacaaaaactggttcccggggcccatgggccgaacccagggctggaacctgggctccggggtcaaccgcgccagtgtcagcgccttcgccacgaccaataggatggagctcgagggcgcgagttaccaggtgcccccgcagccgaacggcatgaccaacaacctccagggcagcaacacctatgccctggagaacactatgatcttcaacagccagccggcgaacccgggcaccaccgccacgtacctcgagggcaacatgctcatcaccagcgagagcgagacgcagccggtgaaccgcgtggcgtacaacgtcggcgggcagatggccaccaacaaccagagctccaccactgcccccgcgaccggcacggtcaacacccaggaaatcgtgcccggcagcgtgtggatggagagggacgtgtacctccaaggacccatctgggccaagatcccagagacgggggcgcactttcacccctctccggccatgggcggattcggactcaaacacccaccgcccatgatgctcatcaagaacacgcctgtgcccggaaatatcaccagcttctcggacgtgcccgtcagcagcttcatcacccagtacagcaccgggcaggtcaccgtggagatggagtgggagctcaagaaggaaaactccaagaggtggaacccagagatccagtacacaaacaactacaacgacccccagtttgtggactttgccccggacagcaccggggaatacagaaccaccagacctatcggaacccgataccttacccgacccctttaacccattcatgtcgcataccctcaataaa

SEQ ID NO: 1173 - protein, 724 aa, Artificial Sequence
  Description of Artificial Sequence: Synthetic polypeptide
MSFVDHPPDWLEEVGEGLREFLGLEAGPPKPKPNQQHQDQARGLVLPGYNYLGPGNGLDRGEPVNRADEVAREHDISYNEQLEAGDNPYLKYNHADAEFQEKLADDTSFGGNLGKAVFQAKKRVLEPFGLVEEGAKTAPTGKRIDDHFPKRKKARTEEDSKPSTSSDAEAGPSGSQQLQIPAQPASSLGADTMSAGGGGPLGDNNQGADGVGNASGDWHCDSTWMGDRVVTKSTRTWVLPSYNNHQYREIKSGSVDGSNANAYFGYSTPWGYFDFNRFHSHWSPRDWQRLINNYWGFRPRSLRVKIFNIQVKEVTVQDSTTTIANNLTSTVQVFTDDDYQLPYVVGNGTEGCLPAFPPQVFTLPQYGYATLNRDNTENPTERSSFFCLEYFPSKMLRTGNNFEFTYNFEEVPFHSSFAPSQNLFKLANPLVDQYLYRFVSTNNTGGVQFNKNLAGRYANTYKNWFPGPMGRTQGWNLGSGVNRASVSAFATTNRMELEGASYQVPPQPNGMTNNLQGSNTYALENTMIFNSQPANPGTTATYLEGNMLITSESETQPVNRVAYNVGGQMATNNQSSTTAPATGTVNTQEIVPGSVWMERDVYLQGPIWAKIPETGAHFHPSPAMGGFGLKHPPPMMLIKNTPVPGNITSFSDVPVSSFITQYSTGQVTVEMEWELKKENSKRWNPEIQYTNNYNDPQFVDFAPDSTGEYRTTRPIGTRYLTRPL

SEQ ID NO: 1174 - DNA, 2203 bp, Artificial Sequence
  Description of Artificial Sequence: Synthetic polynucleotide
atgtcttttgttgatcaccctccagattggttggaagaagttggtgaaggtcttcgcgagtttttgggccttgaagcgggcccaccgaaaccaaaacccaatcagcagcatcaagatcaagcccgtggtcttgtgctgcctggttataactatctcggacccggaaacggtctcgatcgaggagagcctgtcaacagggcagacgaggtcgcgcgagagcacgacatctcgtacaacgagcagcttgaggcgggagacaacccctacctcaagtacaaccacgcggacgccgagtttcaggagaagctcgccgacgacacatccttcgggggaaacctcggaaaggcagtctttcaggccaagaaaagggttctcgaaccttttggcctggttgaagagggtgctaagacggcccctaccggaaagcggatagacgaccactttccaaaaagaaagaaggctcggaccgaagaggactccaagccttccacctcgtcagacgccgaagctggacccagcggatcccagcagctgcaaatcccagcccaaccagcctcaagtttgggagctgatacaatgtctgcgggaggtggcggcccattgggcgacaataaccaaggtgccgatggagtgggcaatgcctcgggagattggcattgcgattccacgtggatgggggacagagtcgtcaccaagtccacccgaacctgggtgctgcccagctacaacaaccaccagtaccgagagatcaaaagcggctccgtcgacggaagcaacgccaacgcctactttggatacagcaccccctgggggtactttgactttaaccgcttccacagccactggagcccccgagactggcaaagactcatcaacaactactggggcttcagaccccggtccctcagagtcaaaatcttcaacattcaagtcaaagaggtcacggtgcaggactccaccaccaccatcgccaacaacctcacctccaccgtccaagtgtttacggacgacgactaccagctgccctacgtcgtcggcaacgggaccgagggatgcctgccggccttccctccgcaggtctttacgctgccgcagtacggttacgcgacgctgaaccgcgacaacacagaaaatcccaccgagaggagcagcttcttctgcctagagtactttcccagcaagatgctgagaacgggcaacaactttgagtttacctacaactttgaggaggtgcccttccactccagcttcgctcccagtcagaacctgttcaagctggccaacccgctggtggaccagtacttgtaccgcttcgtgagcacaaataacactggcggagtccagttcaacaagaacctggccgggagatacgccaacacctacaaaaactggttcccggggcccatgggccgaacccagggctggaacctgggctccggggtcaaccgcgccagtgtcagcgccttcgccacgaccaataggatggagctcgagggcgcgagttaccaggtgcccccgcagccgaacggcatgaccaacaacctccagggcagcaacacctatgccctggagaacactatgatcttcaacagccagccggcgaacccgggcaccaccgccacgtacctcgagggcaacatgctcatcaccagcgagagcgagacgcagccggtgaaccgcgtggcgtacaacgtcggcgggcagatggccaccaacaaccagagctccaccactgcccccgcgaccggcacgtacaacctccaggaaatcgtgcccggcagcgtgtggatggagagggacgtgtacctccaaggacccatctgggccaagatcccagagacgggggcgcactttcacccctctccggccatgggcggattcggactcaaacacccaccgcccatgatgctcatcaagaacacgcctgtgcccggaaatatcaccagcttctcggccgtgcccgtcagcagcttcatcacccagtacagcaccgggcaggtcaccgtggagatggagtgggagctcaagaaggaaaactccaagaggtggaacccagagatccagtacacaaacaactacaacgacccccagtttgtggactttgccccggacagcaccggggaatacagaaccaccagacctatcggaacccgataccttacccgacccctttaacccattcatgtcgcataccctcaataaa

SEQ ID NO: 1175 - protein, 724 aa, Artificial Sequence
  Description of Artificial Sequence: Synthetic polypeptide
MSFVDHPPDWLEEVGEGLREFLGLEAGPPKPKPNQQHQDQARGLVLPGYNYLGPGNGLDRGEPVNRADEVAREHDISYNEQLEAGDNPYLKYNHADAEFQEKLADDTSFGGNLGKAVFQAKKRVLEPFGLVEEGAKTAPTGKRIDDHFPKRKKARTEEDSKPSTSSDAEAGPSGSQQLQIPAQPASSLGADTMSAGGGGPLGDNNQGADGVGNASGDWHCDSTWMGDRVVTKSTRTWVLPSYNNHQYREIKSGSVDGSNANAYFGYSTPWGYFDFNRFHSHWSPRDWQRLINNYWGFRPRSLRVKIFNIQVKEVTVQDSTTTIANNLTSTVQVFTDDDYQLPYVVGNGTEGCLPAFPPQVFTLPQYGYATLNRDNTENPTERSSFFCLEYFPSKMLRTGNNFEFTYNFEEVPFHSSFAPSQNLFKLANPLVDQYLYRFVSTNNTGGVQFNKNLAGRYANTYKNWFPGPMGRTQGWNLGSGVNRASVSAFATTNRMELEGASYQVPPQPNGMTNNLQGSNTYALENTMIFNSQPANPGTTATYLEGNMLITSESETQPVNRVAYNVGGQMATNNQSSTTAPATGTYNLQEIVPGSVWMERDVYLQGPIWAKIPETGAHFHPSPAMGGFGLKHPPPMMLIKNTPVPGNITSFSAVPVSSFITQYSTGQVTVEMEWELKKENSKRWNPEIQYTNNYNDPQFVDFAPDSTGEYRTTRPIGTRYLTRPL

SEQ ID NO: 1176 - DNA, 2203 bp, Artificial Sequence
  Description of Artificial Sequence: Synthetic polynucleotide
atgtcttttgttgatcaccctccagattggttggaagaagttggtgaaggtcttcgcgagtttttgggccttgaagcgggcccaccgaaaccaaaacccaatcagcagcatcaagatcaagcccgtggtcttgtgctgcctggttataactatctcggacccggaaacggtctcgatcgaggagagcctgtcaacagggcagacgaggtcgcgcgagagcacgacatctcgtacaacgagcagcttgaggcgggagacaacccctacctcaagtacaaccacgcggacgccgagtttcaggagaagctcgccgacgacacatccttcgggggaaacctcggaaaggcagtctttcaggccaagaaaagggttctcgaaccttttggcctggttgaagagggtgctaagacggcccctaccggaaagcggatagacgaccactttccaaaaagaaagaaggctcggaccgaagaggactccaagccttccacctcgtcagacgccgaagctggacccagcggatcccagcagctgcaaatcccagcccaaccagcctcaagtttgggagctgatacaatgtctgcgggaggtggcggcccattgggcgacaataaccaaggtgccgatggagtgggcaatgcctcgggagattggcattgcgattccacgtggatgggggacagagtcgtcaccaagtccacccgaacctgggtgctgcccagctacaacaaccaccagtaccgagagatcaaaagcggctccgtcgacggaagcaacgccaacgcctactttggatacagcaccccctgggggtactttgactttaaccgcttccacagccactggagcccccgagactggcaaagactcatcaacaactactggggcttcagaccccggtccctcagagtcaaaatcttcaacattcaagtcaaagaggtcacggtgcaggactccaccaccaccatcgccaacaacctcacctccaccgtccaagtgtttatggacgacgactaccagctgccctacgtcgtcggcaacgggaccgagggatgcctgccggccttccctccgcaggtctttacgctgccgcagtacggttacgcgacgctgaaccgcgacaacacagaaaatcccaccgagaggagcagcttcttctgcctagagtactttcccagcaagatgctgagaacgggcaacaactttgagtttacctacaactttgaggaggtgcccttccactccagcttcgctcccagtcagaacctgttcaagctggccaacccgctggtggaccagtacttgtaccgcttcgtgagcacaaataacactggcggagtccagttcaacaagaacctggccgggagatacgccaacacctacaaaaactggttcccggggcccatgggccgaacccagggctggaacctgggctccggggtcaaccgcgccagtgtcagcgccttcgccacgaccaataggatggagctcgagggcgcgagttaccaggtgcccccgcagccgaacggcatgaccaacaacctccagggcagcaacacctatgccctggagaacactatgatcttcaacagccagccggcgaacccgggcaccaccgccacgtacctcgagggcaacatgctcatcaccagcgagagcgagacgcagccggtgaaccgcgtggcgtacaacgtcggcgggcagatggccaccaacaaccagagctccaccactgcccccgcgaccggcacgtacaacctccaggaaatcgtgcccggcagcgtgtggatggagagggacgtgtacctccaaggacccatctgggccaagatcccagagacgggggcgcactttcacccctctccggccatgggcggattcggactcaaacacccaccgcccatgatgctcatcaagaacacgcctgtgcccggaaatatcaccagcttctcggacgtgcccgtcagcagcttcatcacccagtacagcaccgggcaggtcaccgtggagatggagtgggagctcaagaaggaaaactccaagaggtggaacccagagatccagtacacaaacaactacaacgacccccagtttgtggactttgccccggacagcaccggggaatacagaaccaccagacctatcggaacccgataccttacccgacccctttaacccattcatgtcgcataccctcaataaa

SEQ ID NO: 1177 - protein, 724 aa, Artificial Sequence
  Description of Artificial Sequence: Synthetic polypeptide
MSFVDHPPDWLEEVGEGLREFLGLEAGPPKPKPNQQHQDQARGLVLPGYNYLGPGNGLDRGEPVNRADEVAREHDISYNEQLEAGDNPYLKYNHADAEFQEKLADDTSFGGNLGKAVFQAKKRVLEPFGLVEEGAKTAPTGKRIDDHFPKRKKARTEEDSKPSTSSDAEAGPSGSQQLQIPAQPASSLGADTMSAGGGGPLGDNNQGADGVGNASGDWHCDSTWMGDRVVTKSTRTWVLPSYNNHQYREIKSGSVDGSNANAYFGYSTPWGYFDFNRFHSHWSPRDWQRLINNYWGFRPRSLRVKIFNIQVKEVTVQDSTTTIANNLTSTVQVFMDDDYQLPYVVGNGTEGCLPAFPPQVFTLPQYGYATLNRDNTENPTERSSFFCLEYFPSKMLRTGNNFEFTYNFEEVPFHSSFAPSQNLFKLANPLVDQYLYRFVSTNNTGGVQFNKNLAGRYANTYKNWFPGPMGRTQGWNLGSGVNRASVSAFATTNRMELEGASYQVPPQPNGMTNNLQGSNTYALENTMIFNSQPANPGTTATYLEGNMLITSESETQPVNRVAYNVGGQMATNNQSSTTAPATGTYNLQEIVPGSVWMERDVYLQGPIWAKIPETGAHFHPSPAMGGFGLKHPPPMMLIKNTPVPGNITSFSDVPVSSFITQYSTGQVTVEMEWELKKENSKRWNPEIQYTNNYNDPQFVDFAPDSTGEYRTTRPIGTRYLTRPL

SEQ ID NO: 1178 - DNA, 2203 bp, Artificial Sequence
  Description of Artificial Sequence: Synthetic polynucleotide
atgtcttttgttgatcaccctccagattggttggaagaagttggtgaaggtcttcgcgagtttttgggccttgaagcgggcccaccgaaaccaaaacccaatcagcagcatcaagatcaagcccgtggtcttgtgctgcctggttataactatctcggacccggaaacggtctcgatcgaggagagcctgtcaacagggcagacgaggtcgcgcgagagcacgacatctcgtacaacgagcagcttgaggcgggagacaacccctacctcaagtacaaccacgcggacgccgagtttcaggagaagctcgccgacgacacatccttcgggggaaacctcggaaaggcagtctttcaggccaagaaaagggttctcgaaccttttggcctggttgaagagggtgctaagacggcccctaccggaaagcggatagacgaccactttccaaaaagaaagaaggctcggaccgaagaggactccaagccttccacctcgtcagacgccgaagctggacccagcggatcccagcagctgcaaatcccagcccaaccagcctcaagtttgggagctgatacaatgtctgcgggaggtggcggcccattgggcgacaataaccaaggtgccgatggagtgggcaatgcctcgggagattggcattgcgattccacgtggatgggggacagagtcgtcaccaagtccacccgaacctgggtgctgcccagctacaacaaccaccagtaccgagagatcaaaagcggctccgtcgacggaagcaacgccaacgcctactttggatacagcaccccctgggggtactttgactttaaccgcttccacagccactggagcccccgagactggcaaagactcatcaacaactactggggcttcagaccccggtccctcagagtcaaaatcttcaacattcaagtcaaagaggtcacggtgcaggactccaccaccaccatcgccaacaacctcacctccaccgtcgatgtgtttacggacgacgactaccagctgccctacgtcgtcggcaacgggaccgagggatgcctgccggccttccctccgcaggtctttacgctgccgcagtacggttacgcgacgctgaaccgcgacaacacagaaaatcccaccgagaggagcagcttcttctgcctagagtactttcccagcaagatgctgagaacgggcaacaactttgagtttacctacaactttgaggaggtgcccttccactccagcttcgctcccagtcagaacctgttcaagctggccaacccgctggtggaccagtacttgtaccgcttcgtgagcacaaataacactggcggagtccagttcaacaagaacctggccgggagatacgccaacacctacaaaaactggttcccggggcccatgggccgaacccagggctggaacctgggctccggggtcaaccgcgccagtgtcagcgccttcgccacgaccaataggatggagctcgagggcgcgagttaccaggtgcccccgcagccgaacggcatgaccaacaacctccagggcagcaacacctatgccctggagaacactatgatcttcaacagccagccggcgaacccgggcaccaccgccacgtacctcgagggcaacatgctcatcaccagcgagagcgagacgcagccggtgaaccgcgtggcgtacaacgtcggcgggcagatggccaccaacaaccagagctccaccactgcccccgcgaccggcacgtacaacctccaggaaatcgtgcccggcagcgtgtggatggagagggacgtgtacctccaaggacccatctgggccaagatcccagagacgggggcgcactttcacccctctccggccatgggcggattcggactcaaacacccaccgcccatgatgctcatcaagaacacgcctgtgcccggaaatatcaccagcttctcggacgtgcccgtcagcagcttcatcacccagtacagcaccgggcaggtcaccgtggagatggagtgggagctcaagaaggaaaactccaagaggtggaacccagagatccagtacacaaacaactacaacgacccccagtttgtggactttgccccggacagcaccggggaatacagaaccaccagacctatcggaacccgataccttacccgacccctttaacccattcatgtcgcataccctcaataaa

SEQ ID NO: 1179 - protein, 724 aa, Artificial Sequence
  Description of Artificial Sequence: Synthetic polypeptide
MSFVDHPPDWLEEVGEGLREFLGLEAGPPKPKPNQQHQDQARGLVLPGYNYLGPGNGLDRGEPVNRADEVAREHDISYNEQLEAGDNPYLKYNHADAEFQEKLADDTSFGGNLGKAVFQAKKRVLEPFGLVEEGAKTAPTGKRIDDHFPKRKKARTEEDSKPSTSSDAEAGPSGSQQLQIPAQPASSLGADTMSAGGGGPLGDNNQGADGVGNASGDWHCDSTWMGDRVVTKSTRTWVLPSYNNHQYREIKSGSVDGSNANAYFGYSTPWGYFDFNRFHSHWSPRDWQRLINNYWGFRPRSLRVKIFNIQVKEVTVQDSTTTIANNLTSTVDVFTDDDYQLPYVVGNGTEGCLPAFPPQVFTLPQYGYATLNRDNTENPTERSSFFCLEYFPSKMLRTGNNFEFTYNFEEVPFHSSFAPSQNLFKLANPLVDQYLYRFVSTNNTGGVQFNKNLAGRYANTYKNWFPGPMGRTQGWNLGSGVNRASVSAFATTNRMELEGASYQVPPQPNGMTNNLQGSNTYALENTMIFNSQPANPGTTATYLEGNMLITSESETQPVNRVAYNVGGQMATNNQSSTTAPATGTYNLQEIVPGSVWMERDVYLQGPIWAKIPETGAHFHPSPAMGGFGLKHPPPMMLIKNTPVPGNITSFSDVPVSSFITQYSTGQVTVEMEWELKKENSKRWNPEIQYTNNYNDPQFVDFAPDSTGEYRTTRPIGTRYLTRPL

SEQ ID NO: 1180 - DNA, 2203 bp, Artificial Sequence
  Description of Artificial Sequence: Synthetic polynucleotide
atgtcttttgttgatcaccctccagattggttggaagaagttggtgaaggtcttcgcgagtttttgggccttgaagcgggcccaccgaaaccaaaacccaatcagcagcatcaagatcaagcccgtggtcttgtgctgcctggttataactatctcggacccggaaacggtctcgatcgaggagagcctgtcaacagggcagacgaggtcgcgcgagagcacgacatctcgtacaacgagcagcttgaggcgggagacaacccctacctcaagtacaaccacgcggacgccgagtttcaggagaagctcgccgacgacacatccttcgggggaaacctcggaaaggcagtctttcaggccaagaaaagggttctcgaaccttttggcctggttgaagagggtgctaagacggcccctaccggaaagcggatagacgaccactttccaaaaagaaagaaggctcggaccgaagaggactccaagccttccacctcgtcagacgccgaagctggacccagcggatcccagcagctgcaaatcccagcccaaccagcctcaagtttgggagctgatacaatgtctgcgggaggtggcggcccattgggcgacaataaccaaggtgccgatggagtgggcaatgcctcgggagattggcattgcgattccacgtggatgggggacagagtcgtcaccaagtccacccgaacctgggtgctgcccagctacaacaaccaccagtaccgagagatcaaaagcggctccgtcgacggaagcaacgccaacgcctactttggatacagcaccccctgggggtactttgactttaaccgcttccacagccactggagcccccgagactggcaaagactcatcaacaactactggggcttcagaccccggtccctcagagtcaaaatcttcaacattcaagtcaaagaggtcacggtgcaggactccaccaccaccatcgccaacaacctcacctccaccgtccaagtgtttacggacgacgactaccagctgccctacgtcgtcggcaacgggacccagggatgcctgccggccttccctccgcaggtctttacgctgccgcagtacggttacgcgacgctgaaccgcgacaacacagaaaatcccaccgagaggagcagcttcttctgcctagagtactttcccagcaagatgctgagaacgggcaacaactttgagtttacctacaactttgaggaggtgcccttccactccagcttcgctcccagtcagaacctgttcaagctggccaacccgctggtggaccagtacttgtaccgcttcgtgagcacaaataacactggcggagtccagttcaacaagaacctggccgggagatacgccaacacctacaaaaactggttcccggggcccatgggccgaacccagggctggaacctgggctccggggtcaaccgcgccagtgtcagcgccttcgccacgaccaataggatggagctcgagggcgcgagttaccaggtgcccccgcagccgaacggcatgaccaacaacctccagggcagcaacacctatgccctggagaacactatgatcttcaacagccagccggcgaacccgggcaccaccgccacgtacctcgagggcaacatgctcatcaccagcgagagcgagacgcagccggtgaaccgcgtggcgtacaacgtcggcgggcagatggccaccaacaaccagagctccaccactgcccccgcgaccggcacgtacaacctccaggaaatcgtgcccggcagcgtgtggatggagagggacgtgtacctccaaggacccatctgggccaagatcccagagacgggggcgcactttcacccctctccggccatgggcggattcggactcaaacacccaccgcccatgatgctcatcaagaacacgcctgtgcccggaaatatcaccagcttctcggacgtgcccgtcagcagcttcatcacccagtacagcaccgggcaggtcaccgtggagatggagtgggagctcaagaaggaaaactccaagaggtggaacccagagatccagtacacaaacaactacaacgacccccagtttgtggactttgccccggacagcaccggggaatacagaaccaccagacctatcggaacccgataccttacccgacccctttaacccattcatgtcgcataccctcaataaa

SEQ ID NO: 1181 - protein, 724 aa, Artificial Sequence
  Description of Artificial Sequence: Synthetic polypeptide
MSFVDHPPDWLEEVGEGLREFLGLEAGPPKPKPNQQHQDQARGLVLPGYNYLGPGNGLDRGEPVNRADEVAREHDISYNEQLEAGDNPYLKYNHADAEFQEKLADDTSFGGNLGKAVFQAKKRVLEPFGLVEEGAKTAPTGKRIDDHFPKRKKARTEEDSKPSTSSDAEAGPSGSQQLQIPAQPASSLGADTMSAGGGGPLGDNNQGADGVGNASGDWHCDSTWMGDRVVTKSTRTWVLPSYNNHQYREIKSGSVDGSNANAYFGYSTPWGYFDFNRFHSHWSPRDWQRLINNYWGFRPRSLRVKIFNIQVKEVTVQDSTTTIANNLTSTVQVFTDDDYQLPYVVGNGTQGCLPAFPPQVFTLPQYGYATLNRDNTENPTERSSFFCLEYFPSKMLRTGNNFEFTYNFEEVPFHSSFAPSQNLFKLANPLVDQYLYRFVSTNNTGGVQFNKNLAGRYANTYKNWFPGPMGRTQGWNLGSGVNRASVSAFATTNRMELEGASYQVPPQPNGMTNNLQGSNTYALENTMIFNSQPANPGTTATYLEGNMLITSESETQPVNRVAYNVGGQMATNNQSSTTAPATGTYNLQEIVPGSVWMERDVYLQGPIWAKIPETGAHFHPSPAMGGFGLKHPPPMMLIKNTPVPGNITSFSDVPVSSFITQYSTGQVTVEMEWELKKENSKRWNPEIQYTNNYNDPQFVDFAPDSTGEYRTTRPIGTRYLTRPL

SEQ ID NO: 1182 - DNA, 2203 bp, Artificial Sequence
  Description of Artificial Sequence: Synthetic polynucleotide
atgtcttttgttgatcaccctccagattggttggaagaagttggtgaaggtcttcgcgagtttttgggccttgaagcgggcccaccgaaaccaaaacccaatcagcagcatcaagatcaagcccgtggtcttgtgctgcctggttataactatctcggacccggaaacggtctcgatcgaggagagcctgtcaacagggcagacgaggtcgcgcgagagcacgacatctcgtacaacgagcagcttgaggcgggagacaacccctacctcaagtacaaccacgcggacgccgagtttcaggagaagctcgccgacgacacatccttcgggggaaacctcggaaaggcagtctttcaggccaagaaaagggttctcgaaccttttggcctggttgaagagggtgctaagacggcccctaccggaaagcggatagacgaccactttccaaaaagaaagaaggctcggaccgaagaggactccaagccttccacctcgtcagacgccgaagctggacccagcggatcccagcagctgcaaatcccagcccaaccagcctcaagtttgggagctgatacaatgtctgcgggaggtggcggcccattgggcgacaataaccaaggtgccgatggagtgggcaatgcctcgggagattggcattgcgattccacgtggatgggggacagagtcgtcaccaagtccacccgaacctgggtgctgcccagctacaacaaccaccagtaccgagagatcaaaagcggctccgtcgacggaagcaacgccaacgcctactttggatacagcaccccctgggggtactttgactttaaccgcttccacagccactggagcccccgagactggcaaagactcatcaacaactactggggcttcagaccccggtccctcagagtcaaaatcttcaacattcaagtcaaagaggtcacggtgcaggactccaccaccaccatcgccaacaacctcacctccaccgtccaagtgtttacggacgacgactaccagctgccctacgtcgtcggcaacgggaccgagggatgcctgccggccttccctccgcaggtctttacgctgccgcagtacggttacgcgacgctgaaccgcgacaacacagaaaatcccaccgagaggagcagcttcttctgcctagagtactttcccagcaagatgctgagaacgggcaacaactttgagtttacctacaactttgaggaggtgcccttccactccagcttcgctcccagtcagaacctgttcaagctggccaacccgctggtggaccagtacttgtaccgcttcgtgagcacaaataacactggcggagtccagttcaacaagaacctggccgggagatacgccaacacctacaaaaactggttcccggggcccatgggccgaacccagggctggaacctgggctccggggtcaaccgcgccagtgtcagcgccttcgccacgaccaataggatggagctcgagggcgcgagttaccaggtgcccccgcagccgaacggcatgaccaacaacctccagggcagcaacacctatgccctggagaacactatgatcttcaacagccagtcggcgaacccgggcaccaccgccacgtacctcgagggcaacatgctcatcaccagcgagagcgagacgcagccggtgaaccgcgtggcgtacaacgtcggcgggcagatggccaccaacaaccagagctccaccactgcccccgcgaccggcacgtacaacctccaggaaatcgtgcccggcagcgtgtggatggagagggacgtgtacctccaaggacccatctgggccaagatcccagagacgggggcgcactttcacccctctccggccatgggcggattcggactcaaacacccaccgcccatgatgctcatcaagaacacgcctgtgcccggaaatatcaccagcttctcggacgtgcccgtcagcagcttcatcacccagtacagcaccgggcaggtcaccgtggagatggagtgggagctcaagaaggaaaactccaagaggtggaacccagagatccagtacacaaacaactacaacgacccccagtttgtggactttgccccggacagcaccggggaatacagaaccaccagacctatcggaacccgataccttacccgacccctttaacccattcatgtcgcataccctcaataaa

SEQ ID NO: 1183 - protein, 724 aa, Artificial Sequence
  Description of Artificial Sequence: Synthetic polypeptide
MSFVDHPPDWLEEVGEGLREFLGLEAGPPKPKPNQQHQDQARGLVLPGYNYLGPGNGLDRGEPVNRADEVAREHDISYNEQLEAGDNPYLKYNHADAEFQEKLADDTSFGGNLGKAVFQAKKRVLEPFGLVEEGAKTAPTGKRIDDHFPKRKKARTEEDSKPSTSSDAEAGPSGSQQLQIPAQPASSLGADTMSAGGGGPLGDNNQGADGVGNASGDWHCDSTWMGDRVVTKSTRTWVLPSYNNHQYREIKSGSVDGSNANAYFGYSTPWGYFDFNRFHSHWSPRDWQRLINNYWGFRPRSLRVKIFNIQVKEVTVQDSTTTIANNLTSTVQVFTDDDYQLPYVVGNGTEGCLPAFPPQVFTLPQYGYATLNRDNTENPTERSSFFCLEYFPSKMLRTGNNFEFTYNFEEVPFHSSFAPSQNLFKLANPLVDQYLYRFVSTNNTGGVQFNKNLAGRYANTYKNWFPGPMGRTQGWNLGSGVNRASVSAFATTNRMELEGASYQVPPQPNGMTNNLQGSNTYALENTMIFNSQSANPGTTATYLEGNMLITSESETQPVNRVAYNVGGQMATNNQSSTTAPATGTYNLQEIVPGSVWMERDVYLQGPIWAKIPETGAHFHPSPAMGGFGLKHPPPMMLIKNTPVPGNITSFSDVPVSSFITQYSTGQVTVEMEWELKKENSKRWNPEIQYTNNYNDPQFVDFAPDSTGEYRTTRPIGTRYLTRPL

SEQ ID NO: 1184 - DNA, 2203 bp, Artificial Sequence
  Description of Artificial Sequence: Synthetic polynucleotide
atgtcttttgttgatcaccctccagattggttggaagaagttggtgaaggtcttcgcgagtttttgggccttgaagcgggcccaccgaaaccaaaacccaatcagcagcatcaagatcaagcccgtggtcttgtgctgcctggttataactatctcggacccggaaacggtctcgatcgaggagagcctgtcaacagggcagacgaggtcgcgcgagagcacgacatctcgtacaacgagcagcttgaggcgggagacaacccctacctcaagtacaaccacgcggacgccgagtttcaggagaagctcgccgacgacacatccttcgggggaaacctcggaaaggcagtctttcaggccaagaaaagggttctcgaaccttttggcctggttgaagagggtgctaagacggcccctaccggaaagcggatagacgaccactttccaaaaagaaagaaggctcggaccgaagaggactccaagccttccacctcgtcagacgccgaagctggacccagcggatcccagcagctgcaaatcccagcccaaccagcctcaagtttgggagctgatacaatgtctgcgggaggtggcggcccattgggcgacaataaccaaggtgccgatggagtgggcaatgcctcgggagattggcattgcgattccacgtggatgggggacagagtcgtcaccaagtccacccgaacctgggtgctgcccagctacaacaaccaccagtaccgagagatcaaaagcggctccgtcgacggaagcaacgccaacgcctactttggatacagcaccccctgggggtactttgactttaaccgcttccacagccactggagcccccgagactggcaaagactcatcaacaactactggggcttcagaccccggtccctcagagtcaaaatcttcaacattcaagtcaaagaggtcacggtgcaggactccaccaccaccatcgccaacaacctcacctccaccgtccaagtgtttacggacgacgactaccagctgccctacgtcgtcggcaacgggaccgagggatgcctgccggccttccctccgcaggtctttacgctgccgcagtacggttacgcgacgctgaaccgcgacaacacagaaaatcccaccgagaggagcagcttcttctgcctagagtactttcccagcaagatgctgagaacgggcaacaactttgagtttacctacaactttgaggaggtgcccttccactccagcttcgctcccagtcagaacctgttcaagctggccaacccgctggtggaccagtacttgtaccgcttcgtgagcacaaataacactggcggagtccagttcaacaagaacctggccgggagatacgccaacacctacaaaaactggttcccggggcccatgggccgaacccagggctggaacctgggctccggggtcaaccgcgccagtgtcagcgccttcgccacgaccaataggatggagctcgagggcgcgagttaccaggtgcccccgcagccgaacggcatgaccaacaacctccagggcagcaacacctatgccctggagaacactatgatcttcaacagccagggggcgaacccgggcaccaccgccacgtacctcgagggcaacatgctcatcaccagcgagagcgagacgcagccggtgaaccgcgtggcgtacaacgtcggcgggcagatggccaccaacaaccagagctccaccactgcccccgcgaccggcacgtacaacctccaggaaatcgtgcccggcagcgtgtggatggagagggacgtgtacctccaaggacccatctgggccaagatcccagagacgggggcgcactttcacccctctccggccatgggcggattcggactcaaacacccaccgcccatgatgctcatcaagaacacgcctgtgcccggaaatatcaccagcttctcggacgtgcccgtcagcagcttcatcacccagtacagcaccgggcaggtcaccgtggagatggagtgggagctcaagaaggaaaactccaagaggtggaacccagagatccagtacacaaacaactacaacgacccccagtttgtggactttgccccggacagcaccggggaatacagaaccaccagacctatcggaacccgataccttacccgacccctttaacccattcatgtcgcataccctcaataaa

SEQ ID NO: 1185 - protein, 724 aa, Artificial Sequence
  Description of Artificial Sequence: Synthetic polypeptide
MSFVDHPPDWLEEVGEGLREFLGLEAGPPKPKPNQQHQDQARGLVLPGYNYLGPGNGLDRGEPVNRADEVAREHDISYNEQLEAGDNPYLKYNHADAEFQEKLADDTSFGGNLGKAVFQAKKRVLEPFGLVEEGAKTAPTGKRIDDHFPKRKKARTEEDSKPSTSSDAEAGPSGSQQLQIPAQPASSLGADTMSAGGGGPLGDNNQGADGVGNASGDWHCDSTWMGDRVVTKSTRTWVLPSYNNHQYREIKSGSVDGSNANAYFGYSTPWGYFDFNRFHSHWSPRDWQRLINNYWGFRPRSLRVKIFNIQVKEVTVQDSTTTIANNLTSTVQVFTDDDYQLPYVVGNGTEGCLPAFPPQVFTLPQYGYATLNRDNTENPTERSSFFCLEYFPSKMLRTGNNFEFTYNFEEVPFHSSFAPSQNLFKLANPLVDQYLYRFVSTNNTGGVQFNKNLAGRYANTYKNWFPGPMGRTQGWNLGSGVNRASVSAFATTNRMELEGASYQVPPQPNGMTNNLQGSNTYALENTMIFNSQGANPGTTATYLEGNMLITSESETQPVNRVAYNVGGQMATNNQSSTTAPATGTYNLQEIVPGSVWMERDVYLQGPIWAKIPETGAHFHPSPAMGGFGLKHPPPMMLIKNTPVPGNITSFSDVPVSSFITQYSTGQVTVEMEWELKKENSKRWNPEIQYTNNYNDPQFVDFAPDSTGEYRTTRPIGTRYLTRPL

SEQ ID NO: 1186 - DNA, 2194 bp, Artificial Sequence
  Description of Artificial Sequence: Synthetic polynucleotide
atgtcttttgttgatcaccctccagattggttggaagaagttggtgaaggtcttcgcgagtttttgggccttgaagcgggcccaccgaaaccaaaacccaatcagcagcatcaagatcaagcccgtggtcttgtgctgcctggttataactatctcggacccggaaacggtctcgatcgaggagagcctgtcaacagggcagacgaggtcgcgcgagagcacgacatctcgtacaacgagcagcttgaggcgggagacaacccctacctcaagtacaaccacgcggacgccgagtttcaggagaagctcgccgacgacacatccttcgggggaaacctcggaaaggcagtctttcaggccaagaaaagggttctcgaaccttttggcctggttgaagagggtgctaagacggcccctaccggaaagcggatagacgaccactttccaaaaagaaagaaggctcggaccgaagaggactccaagccttccacctcgtcagacgccgaagctggacccagcggatcccagcagctgcaaatcccagcccaaccagcctcaagtttgggagctgatacaatgtctgcgggaggtggcggcccattgggcgacaataaccaaggtgccgatggagtgggcaatgcctcgggagattggcattgcgattccacgtggatgggggacagagtcgtcaccaagtccacccgaacctgggtgctgcccagctacaacaaccaccagtaccgagagatcaaaagcggctccgtcgacggaagcaacgccaacgcctactttggatacagcaccccctgggggtactttgactttaaccgcttccacagccactggagcccccgagactggcaaagactcatcaacaactactggggcttcagaccccggtccctcagagtcaaaatcttcaacattcaagtcaaagaggtcacggtgcaggactccaccaccaccatcgccaacaacctcacctccaccgtccaagtgtttacggacgacgactaccagctgccctacgtcgtcggcaacgggaccgagggatgcctgccggccttccctccgcaggtctttacgctgccgcagtacggttacgcgacgctgaaccgcgacaacacagaaaatcccaccgagaggagcagcttcttctgcctagagtactttcccagcaagatgctgagaacgggcaacaactttgagtttacctacaactttgaggaggtgcccttccactccagcttcgctcccagtcagaacctgttcaagctggccaacccgctggtggaccagtacttgtaccgcttcgtgagcacaaataacactggcggagtccagttcaacaagaacctggccgggagatacgccaacacctacaaaaactggttcccggggcccatgggccgaacccagggctggaacctgggctccggggtcaaccgcgccagtgtcagcgccttcgccacgaccaataggatggagctcgagggcgcgagttaccaggtgcccccgcagccgaacggcatgaccaacaacctccagggcagcaacacctatgccctggagaacactatgatcttcgggaagcaaggctcagagaaaacaaatgtggacattgaaaaggtcatgatcaccagcgagagcgagacgcagccggtgaaccgcgtggcgtacaacgtcggcgggcagatggccaccaacaaccagagctccaccactgcccccgcgaccggcacgtacaacctccaggaaatcgtgcccggcagcgtgtggatggagagggacgtgtacctccaaggacccatctgggccaagatcccagagacgggggcgcactttcacccctctccggccatgggcggattcggactcaaacacccaccgcccatgatgctcatcaagaacacgcctgtgcccggaaatatcaccagcttctcggacgtgcccgtcagcagcttcatcacccagtacagcaccgggcaggtcaccgtggagatggagtgggagctcaagaaggaaaactccaagaggtggaacccagagatccagtacacaaacaactacaacgacccccagtttgtggactttgccccggacagcaccggggaatacagaaccaccagacctatcggaacccgataccttacccgacccctttaacccattcatgtcgcataccctcaataaa

SEQ ID NO: 1187 - protein, 721 aa, Artificial Sequence
  Description of Artificial Sequence: Synthetic polypeptide
MSFVDHPPDWLEEVGEGLREFLGLEAGPPKPKPNQQHQDQARGLVLPGYNYLGPGNGLDRGEPVNRADEVAREHDISYNEQLEAGDNPYLKYNHADAEFQEKLADDTSFGGNLGKAVFQAKKRVLEPFGLVEEGAKTAPTGKRIDDHFPKRKKARTEEDSKPSTSSDAEAGPSGSQQLQIPAQPASSLGADTMSAGGGGPLGDNNQGADGVGNASGDWHCDSTWMGDRVVTKSTRTWVLPSYNNHQYREIKSGSVDGSNANAYFGYSTPWGYFDFNRFHSHWSPRDWQRLINNYWGFRPRSLRVKIFNIQVKEVTVQDSTTTIANNLTSTVQVFTDDDYQLPYVVGNGTEGCLPAFPPQVFTLPQYGYATLNRDNTENPTERSSFFCLEYFPSKMLRTGNNFEFTYNFEEVPFHSSFAPSQNLFKLANPLVDQYLYRFVSTNNTGGVQFNKNLAGRYANTYKNWFPGPMGRTQGWNLGSGVNRASVSAFATTNRMELEGASYQVPPQPNGMTNNLQGSNTYALENTMIFGKQGSEKTNVDIEKVMITSESETQPVNRVAYNVGGQMATNNQSSTTAPATGTYNLQEIVPGSVWMERDVYLQGPIWAKIPETGAHFHPSPAMGGFGLKHPPPMMLIKNTPVPGNITSFSDVPVSSFITQYSTGQVTVEMEWELKKENSKRWNPEIQYTNNYNDPQFVDFAPDSTGEYRTTRPIGTRYLTRPL

SEQ ID NO: 1188 - protein, 519 aa, Artificial Sequence
  Description of Artificial Sequence: Synthetic polypeptide
DGVGSSSGNWHCDSTWLGDRVITTSTRTWALPTYNNHLYKQISNGTSGGATNDNTYFGYSTPWGYFDFNRFHCHFSPRDWQRLINNNWGFRPKRLSFKLFNIQVKEVTQNEGTKTIANNLTSTIQVFTDSEYQLPYVLGSAHQGCLPPFPADVFMIPQYGYLTLNNGSQAVGRSSFYCLEYFPSQMLRTGNNFQFTYTFEDVPFHSSYAHSQSLDRLMNPLIDQYLYYLSRTQTTGGTANTQTLGFSQGGPNTMANQAKNWLPGPCYRQQRVSTTTGQNNNSNFAWTAGTKYHLNGRNSLANPGIAMATHKDDEERFFPSNGILIFGKQNAARDNADYSDVMLTSEEEIKTTNPVATEEYGIVADNLQQQNTAPQIGTVNSQGALPGMVWQNRDVYLQGPIWAKIPHTDGNFHPSPLMGGFGLKHPPPQILIKNTPVPADPPTTFNQSKLNSFITQYSTGQVSVEIEWELQKENSKRWNPEIQYTSNYYKSTSVDFAVNTEGVYSEPRPIGTRYLTRNL

SEQ ID NO: 1189 - protein, 738 aa, Artificial Sequence
  Description of Artificial Sequence: Synthetic polypeptide
MAADGYLPDWLEDNLSEGIREWWALQPGAPKPKANQQHQDNARGLVLPGYKYLGPGNGLDKGEPVNAADAAALEHDKAYDQQLKAGDNPYLKYNHADAEFQERLKEDTSFGGNLGRAVFQAKKRLLEPLGLVEEAAKTAPGKKRPVEPSPQRSPDSSTGIGKKGQQPARKRLNFGQTGDSESVPDPQPLGEPPAAPSGVGPNTMAAGGGAPMADNNEGADGVGSSSGNWHCDSTWLGDRVITTSTRTWALPTYNNHLYKQISNGTSGGATNDNTYFGYSTPWGYFDFNRFHCHFSPRDWQRLINNNWGFRPKRLSFKLFNIQVKEVTQNEGTKTIANNLTSTIQVFTDSEYQLPYVLGSAHQGCLPPFPADVFMIPQYGYLTLNNGSQAVGRSSFYCLEYFPSQMLRTGNNFQFTYTFEDVPFHSSYAHSQSLDRLMNPLIDQYLYYLSRTQTTGGTANTQTLGFSQGGPNTMANQAKNWLPGPCYRQQRVSTTTGQNNNSNFAWTAGTKYHLNGRNSLANPGIAMATHKDDEERFFPSNGILIFGKQNAARDNADYSDVMLTSEEEIKTTNPVATEEYGIVADNLQQQNTAPQIGTVNSQGALPGMVWQNRDVYLQGPIWAKIPHTDGNFHPSPLMGGFGLKHPPPQILIKNTPVPADPPTTFNQSKLNSFITQYSTGQVSVEIEWELQKENSKRWNPEIQYTSNYYKSTSVDFAVNTEGVYSEPRPIGTRYLTRNL

SEQ ID NO: 1190 - protein, 725 aa, Artificial Sequence
  Description of Artificial Sequence: Synthetic polypeptide
MAADGYLPDWLEDNLSEGIREWWALQPGAPKPKANQQHQDNARGLVLPGYKYLGPGNGLDKGEPVNAADAAALEHDKAYDQQLKAGDNPYLKYNHADAEFQERLKEDTSFGGNLGRAVFQAKKRLLEPLGLVEEAAKTAPTGKRIDDHFPKRKKARTEEDSKPSTSSDAEAGPSGSQQLQIPAQPASSLGADTMSAGGGGPLGDNNQGADGVGNASGDWHCDSTWMGDRVVTKSTRTWVLPSYNNHQYREIKSGSVDGSNANAYFGYSTPWGYFDFNRFHSHWSPRDWQRLINNYWGFRPRSLRVKIFNIQVKEVTVQDSTTTIANNLTSTVQVFTDDDYQLPYVVGNGTEGCLPAFPPQVFTLPQYGYATLNRDNTENPTERSSFFCLEYFPSKMLRTGNNFEFTYNFEEVPFHSSFAPSQNLFKLANPLVDQYLYRFVSTNNTGGVQFNKNLAGRYANTYKNWFPGPMGRTQGWNLGSGVNRASVSAFATTNRMELEGASYQVPPQPNGMTNNLQGSNTYALENTMIFNSQPANPGTTATYLEGNMLITSESETQPVNRVAYNVGGQMATNNQSSTTAPATGTYNLQEIVPGSVWMERDVYLQGPIWAKIPETGAHFHPSPAMGGFGLKHPPPMMLIKNTPVPGNITSFSDVPVSSFITQYSTGQVTVEMEWELKKENSKRWNPEIQYTNNYNDPQFVDFAPDSTGEYRTTRPIGTRYLTRPL

SEQ ID NO: 1191 - protein, 736 aa, Artificial Sequence
  Description of Artificial Sequence: Synthetic polypeptide
MAADGYLPDWLEDNLSEGIREWWALKPGAPKPKANQQKQDDGRGLVLPGYKYLGPFNGLDKGEPVNAADAAALEHDKAYDQQLQAGDNPYLRYNHADAEFQERLQEDTSFGGNLGRAVFQAKKRVLEPLGLVEEGAKTAPGKKRPVDQSPQEPDSSSGVGKSGKQPARKRLNFGQTGDSESVPDPQPLGEPPAAPTSLGSNTMASGGGAPMADNNEGADGVGNSSGNWHCDSQWLGDRVITTSTRTWALPTYNNHLYKQISSQSGASNDNHYFGYSTPWGYFDFNRFHCHFSPRDWQRLINNNWGFRPKKLSFKLFNIQVKEVTQNDGTTTIANNLTSTVQVFTDSEYQLPYVLGSAHQGCLPPFPADVFMVPQYGYLTLNNGSQAVGRSSFYCLEYFPSQMLRTGNNFQFSYTFEDVPFHSSYAHSQSLDRLMNPLIDQYLYYLNRTQGTTSGTTNQSRLLFSQAGPQSMSLQARNWLPGPCYRQQRLSKTANDNNNSNFPWTAASKYHLNGRDSLVNPGPAMASHKDDEEKFFPMHGNLIFGKEGTTASNAELDNVMITDEEEIRTTNPVATEQYGTVANNLQSSNTAPTTRTVNDQGALPGMVWQDRDVYLQGPIWAKIPHTDGHFHPSPLMGGFGLKHPPPQIMIKNTPVPANPPTTFSPAKFASFITQYSTGQVSVEIEWELQKENSKRWNPEIQYTSNYNKSVNVDFTVDTNGVYSEPRPIGTRYLTRNL

SEQ ID NO: 1192 - protein, 735 aa, Artificial Sequence
  Description of Artificial Sequence: Synthetic polypeptide
MSFVDHPPDWLEEVGEGLREFLGLEAGPPKPKPNQQHQDQARGLVLPGYNYLGPGNGLDRGEPVNRADEVAREHDISYNEQLEAGDNPYLKYNHADAEFQEKLADDTSFGGNLGKAVFQAKKRVLEPFGLVEEGAKTAPGKKRPVDQSPQEPDSSSGVGKSGKQPARKRLNFGQTGDSESVPDPQPLGEPPAAPTSLGSNTMASGGGAPMADNNEGADGVGNSSGNWHCDSQWLGDRVITTSTRTWALPTYNNHLYKQISSQSGASNDNHYFGYSTPWGYFDFNRFHCHFSPRDWQRLINNNWGFRPKKLSFKLFNIQVKEVTQNDGTTTIANNLTSTVQVFTDSEYQLPYVLGSAHQGCLPPFPADVFMVPQYGYLTLNNGSQAVGRSSFYCLEYFPSQMLRTGNNFQFSYTFEDVPFHSSYAHSQSLDRLMNPLIDQYLYYLNRTQGTTSGTTNQSRLLFSQAGPQSMSLQARNWLPGPCYRQQRLSKTANDNNNSNFPWTAASKYHLNGRDSLVNPGPAMASHKDDEEKFFPMHGNLIFGKEGTTASNAELDNVMITDEEEIRTTNPVATEQYGTVANNLQSSNTAPTTRTVNDQGALPGMVWQDRDVYLQGPIWAKIPHTDGHFHPSPLMGGFGLKHPPPQIMIKNTPVPANPPTTFSPAKFASFITQYSTGQVSVEIEWELQKENSKRWNPEIQYTSNYNKSVNVDFTVDTNGVYSEPRPIGTRYLTRPL

SEQ ID NO: 1193 - protein, 736 aa, Artificial Sequence
  Description of Artificial Sequence: Synthetic polypeptide
MAADGYLPDWLEDNLSEGIREWWALKPGAPKPKANQQKQDDGRGLVLPGYKYLGPFNGLDKGEPVNAADAAALEHDKAYDQQLQAGDNPYLRYNHADAEFQERLQEDTSFGGNLGRAVFQAKKRVLEPLGLVEEGAKTAPGKKRPVEPSPQRSPDSSTGIGKKGQQPARKRLNFGQTGDSESVPDPQPLGEPPAAPSGVGPNTMAAGGGAPMADNNEGADGVGSSSGNWHCDSTWLGDRVITTSTRTWALPTYNNHLYKQISSQSGASNDNHYFGYSTPWGYFDFNRFHCHFSPRDWQRLINNNWGFRPKRLSFKLFNIQVKEVTQNEGTKTIANNLTSTIQVFTDSEYQLPYVLGSAHQGCLPPFPADVFMIPQYGYLTLNNGSQAVGRSSFYCLEYFPSQMLRTGNNFQFTYTFEDVPFHSSYAHSQSLDRLMNPLIDQYLYYLSRTQTTGGTANTQTLGFSQGGPNTMANQAKNWLPGPCYRQQRVSTTTGQNNNSNFAWTAGTKYHLNGRNSLANPGIAMATHKDDEERFFPSNGILIFGKQGTTASNAELDNVMITDEEEIKTTNPVATEEYGIVADNLQQQNTAPQIGTVNSQGALPGMVWQNRDVYLQGPIWAKIPHTDGNFHPSPLMGGFGLKHPPPQILIKNTPVPADPPTTFNQSKLNSFITQYSTGQVSVEIEWELQKENSKRWNPEIQYTSNYNKSVNVDFTVDTNGVYSEPRPIGTRYLTRNL

SEQ ID NO: 1194 - protein, 736 aa, Artificial Sequence
  Description of Artificial Sequence: Synthetic polypeptide
MAADGYLPDWLEDNLSEGIREWWALKPGAPKPKANQQKQDDGRGLVLPGYKYLGPFNGLDKGEPVNAADAAALEHDKAYDQQLQAGDNPYLRYNHADAEFQERLQEDTSFGGNLGRAVFQAKKRVLEPLGLVEEGAKTAPGKKRPVEPSPQRSPDSSTGIGKKGQQPARKRLNFGQTGDSESVPDPQPLGEPPAAPSGVGPNTMAAGGGAPMADNNEGADGVGSSSGNWHCDSTWLGDRVITTSTRTWALPTYNNHLYKQISSQSGASNDNHYFGYSTPWGYFDFNRFHCHFSPRDWQRLINNNWGFRPKRLSFKLFNIQVKEVTQNEGTKTIANNLTSTIQVFTDSEYQLPYVLGSAHQGCLPPFPADVFMIPQYGYLTLNNGSQAVGRSSFYCLEYFPSQMLRTGNNFQFTYTFEDVPFHSSYAHSQSLDRLMNPLIDQYLYYLSRTQTTGGTANTQTLGFSQGGPNTMANQAKNWLPGPCYRQQRVSTTTGQNNNSNFAWTAGTKYHLNGRNSLANPGIAMATHKDDEERFFPSNGILIFGKQNAARDNADYSDVMLTSEEEIKTTNPVATEEYGIVADNLQQQNTAPQIGTVNSQGALPGMVWQNRDVYLQGPIWAKIPHTDGNFHPSPLMGGFGLKHPPPQILIKNTPVPADPPTTFNQSKLNSFITQYSTGQVSVEIEWELQKENSKRWNPEIQYTSNYYKSTSVDFAVNTEGVYSEPRPIGTRYLTRNL

SEQ ID NO: 1195 - protein, 736 aa, Artificial Sequence
  Description of Artificial Sequence: Synthetic polypeptide
MAADGYLPDWLEDNLSEGIREWWDLKPGAPKPKANQQKQDDGRGLVLPGYKYLGPFNGLDKGEPVNAADAAALEHDKAYDQQLKAGDNPYLRYNHADAEFQERLQEDTSFGGNLGRAVFQAKKRVLEPLGLVEEGAKTAPGKKRPVEQSPQEPDSSSGIGKTGQQPAKKRLNFGQTGDTESVPDPQPLGEPPAAPSGLGPNTMASGGGAPMADNNEGADGVGNSSGNWHCDSTWLGDRVITTSTRTWALPTYNNHLYKQISNGTSGGSTNDNTYFGYSTPWGYFDFNRFHCHFSPRDWQRLINNNWGFRPKRLNFKLFNIQVKEVTTNEGTKTIANNLTSTVQVFTDSEYQLPYVLGSAHQGCLPPFPADVFMVPQYGYLTLNNGSQALGRSSFYCLEYFPSQMLRTGNNFQFSYTFEDVPFHSSYAHSQSLDRLMNPLIDQYLYYLVRTQTTGTGGTQTLAFSQAGPSSMASQARNWVPGPSYRQQRVSTTTNQNNNSNFAWTGAAKFKLNGRDSLMNPGVAMASHKDDEDRFFPSSGVLIFGKQGAGNDGVDYSQVLITDEEEIKATNPVATEEYGAVAINNQAANTQAQTGLVHNQGVIPGMVWQNRDVYLQGPIWAKIPHTDGNFHPSPLMGGFGLKHPPPQILIKNTPVPADPPLTFNQAKLNSFITQYSTGQVSVEIEWELQKENSKRWNPEIQYTSNYYKSTNVDFAVNTEGVYSEPRPIGTRYLTRNL

SEQ ID NO: 1196 - DNA, 3695 bp, Artificial Sequence
  Description of Artificial Sequence: Synthetic polynucleotide
ctctttgcgcttgcgttttcccttgtccagatagcccagtagctgacattcatccggggtcagcaccgtttctgcggactggctttctacgtgaaaaggatctaggtgaagatcctttttgataatctcatgcctgacatttatattccccagaacatcaggttaatggcgtttttgatgtcattttcgcggtggctgagatcagccacttcttccccgataacggagaccggcacactggccatatcggtggtcatcatgcgccagctttcatccccgatatgcaccaccgggtaaagttcacgggagactttatctgacagcagacgtgcactggccagggggatcaccatccgtcgccccggcgtgtcaataatatcactctgtacatccacaaacagacgataacggctctctcttttataggtgtaaaccttaaactgccgtacgtataggctgcgcaactgttgggaagggcgatcggtgcgggcctcttcgctattacgccagctggcgaaagggggatgtgctgcaaggcgattaagttgggtaacgccagggttttcccagtcacgacgttgtaaaacgacggccagtgaattgtaatacgactcactatagggcgaattgaatttagcggccgcgaattcgcccttatgatatctggtgggaggagggcaagatgacggccaaggtcgtggagtccgccaaggccattctcggcggcagcaaagtgcgcgtggaccaaaagtgcaagtcgtccgcccagatcgatcccactcccgtcattgtcacctccaacaccaacatgtgcgccgtgattgacgggaacagcaccaccttcgagcaccagcagccgttgcaggaccggatgttcaaatttgaacttacccgccgtctggagcatgactttggcaaggtgacaaagcaggaagtcaaagagttcttccgctgggcgcaggatcacgtgaccgaggtggcgcatgagttccacgtcagaaagggtggagccaacaagagacccgcccccgatgacgctgataaaagcgagcccaagcgggcctgcccctcagtcgcagatccatcgacgtcagacgcggaaggagctccggtggactttgccgacaggtaccaaaacaaatgttctcgtcacgcgggcatgcttcagatgctgtttccctgcaagacatgcgagagaatgaatcagaatttcaacatttgcttcacgcacgggaccagggactgttcggagtgcttccccggcgtgtcagaatctcaaccggtcgtcagaaaaaggacgtatcggaaactctgtgccattcatcatctgctggggagggctcccgagattgcttgctcggcctgcgatctggtcaacgtggacctggatgactgtgtctctgagcaataaatgacttaaaccaggtatggctgccgatggttatcttccagattggctcgaggacaacctctctgagggcattcgcgagtggtgggacttgaaacctggagccccgaaacccaaagccaaccagcaaaagcaggacgacggccggggtctggtgcttcctggctacaagtacctcggacccttcaacggactcgacaagggggagcccgtcaacgcggcggacgcagcggccctcgagcacgacaaggcctacgaccagcagctcaaagcgggtgacaatccgtacctgcggtataaccacgccgacgccgagtttcaggagcgtctgcaagaagatacgtcttttgggggcaacctcgggcgagcagtcttccaggccaagaagcgggttctcgaacctctcggtctggttgaggaaggcgctaagacggctcctggaaagaagagaccggtagagcagtcaccccaagaaccagactcctcatcgggcatcggcaagacaggccagcagcccgctaaaaagagactcaattttggtcagactggcgacacagagtcagtccccgacccacaacctctcggagaacctccagcagccccctcaggtctgggacctaatacaatggcttcaggcggtggcgctccaatggcagacaataacgaaggcgccgacggagtgggtaattcctcgggaaattggcattgcgattccacatggctgggggacagagtcatcaccaccagcacccgaacctgggccctgcccacctacaacaaccacctctacaagcaaatctccaacggcacctcgggaggaagcaccaacgacaacacctactttggctacagcaccccctgggggtattttgacttcaacagattccactgccacttttcaccacgtgactggcagcgactcatcaacaacaattggggattccggcccaagagactcaacttcaagctcttcaacatccaggtcaaggaagtcacgacgaacgaaggcaccaagaccatcgccaataatctcaccagcaccgtgcaggtctttacggactcggagtaccagctaccgtacgtgctaggatcagctcaccagggatgtctgcctccgttcccggcggacgtcttcatggttcctcagtacggttatctaactctgaacaatggcagccaggccctgggacgttcctccttctactgcctggagtatttcccatcgcagatgctgagaaccggcaacaactttcagttcagctacaccttcgaggacgtgcctttccacagcagctacgcgcacagccaaagcctggacaggctgatgaatcccctcatcgaccagtacctgtattacctggtcagaacgcagacaaccgggactggagggacgcagactctggcattcagccaagcaggccctagctcaatggccagccaggctagaaactgggtgcccggaccgagctaccggcagcagcgcgtctccacgacaaccaaccagaacaacaacagcaactttgcctggacgggagctgccaaatttaaactgaacggccgagactctctaatgaaccccggcgtggccatggcttcacacaaggatgacgaggaccgcttcttcccttctagcggggtcctgattttcggcaagcaaggagccgggaatgatggagtggattacagccaagtgctgattacagatgaggaagaaatcaaggctaccaaccccgtggcaacagaggaatatggagcagtggccatcaacaaccaggccgctaatacgcaggcgcagaccggactcgtgcacaaccagggggtgattcccggcatggtgtggcagaacagagacgtgtacctgcagggtcccatctgggccaaaattcctcacacggacggcaactttcacccgtctcccctgatgggcggctttggactgaagcacccgcctcctcaaattctcatcaagaacacaccggttccagcggacccgccgcttaccttcaaccaggccaagctgaactctttcatcacgcagtacagcaccggacaggtcagcgtggaaatcgagtgggagctgcagaaagaaaacagcaaacgctggaatccagagattcagtacacttccaactactacaaatctacaaatgtggactttgctgtcaacacggaaggagtgtatagcgagcctcgccccattggcacccgttacctcacccgcaacctgtaattgcctgttaatcaataaaccggttaattcgtttcagtaaggaagaattcgtttaaa

SEQ ID NO: 1197 - protein, 736 aa, Artificial Sequence; identical to SEQ ID NO: 516
  Description of Artificial Sequence: Synthetic polypeptide

SEQ ID NO: 1198 - protein, 736 aa, Artificial Sequence
  Description of Artificial Sequence: Synthetic polypeptide
MAADGYLPDWLEDNLSEGIREWWDLKPGAPKPKANQQKQDDGRGLVLPGYKYLGPFNGLDKGEPVNAADAAALEHDKAYDQQLKAGDNPYLRYNHADAEFQERLQEDTSFGGNLGRAVFQAKKRVLEPLGLVEEGAKTAPGKKRPVEQSPQEPDSSSGIGKTGQQPAKKRLNFGQTGDTESVPDPQPLGEPPAAPSGLGPNTMASGGGAPMADNNEGADGVGNSSGNWHCDSTWLGDRVITTSTRTWALPTYNNHLYKQISNGTSGGSTNDNTYFGYSTPWGYFDFNRFHCHFSPRDWQRLINNNWGFRPKRLNFKLFNIQVKEVTTNEGTKTIANNLTSTVQVFTDSEYQLPYVLGSAHQGCLPPFPADVFMVPQYGYLTLNNGSQALGRSSFYCLEYFPSQMLRTGNNFQFSYTFEDVPFHSSYAHSQSLDRLMNPLIDQYLYYLVRTQTTGTGGTQTLAFSQAGPSNMASQARNWVPGPSYRQQRVSTTTNQNNNSNFAWTGAAKFKLNGRDSLMNPGVAMASHKDDEDRFFPSSGVLIFGKQGAGNDGVDYSQVLITDEEEIKATNPVATEEYGAVAINNQAANTQAQTGLVHNQGVIPGMVWQNRDVYLQGPIWAKIPHTDGNFHPSPLMGGFGLKHPPPQILIKNTPVPADPPLTFNQAKLNSFITQYSTGQVSVEIEWELQKENSKRWNPEIQYTSNYYKSTNVDFAVNTEGVYSEPRPIGTRYLTRNL

SEQ ID NO: 1199 - protein, 738 aa, Artificial Sequence; identical to SEQ ID NO: 893
  Description of Artificial Sequence: Synthetic polypeptide

SEQ ID NO: 1200 - protein, 736 aa, Artificial Sequence
  Description of Artificial Sequence: Synthetic polypeptide
MAADGYLPDWLEDNLSEGIREWWALQPGAPKPKANQQHQDNARGLVLPGYKYLGPGNGLDKGEPVNAADAAALEHDKAYDQQLKAGDNPYLKYNHADAEFQERLKEDTSFGGNLGRAVFQAKKRILEPLGLVEEAAKTAPGKKRPVDQSPQEPDSSSGVGKSGKQPARKRLNFGQTGDSESVPDPQPLGEPPAAPTSLGSNTMASGGGAPMADNNEGADGVGNSSGNWHCDSQWLGDRVITTSTRTWALPTYNNHLYKQISSQSGASNDNHYFGYSTPWGYFDFNRFHCHFSPRDWQRLINNNWGFRPKKLSFKLFNIQVKEVTQNDGTTTIANNLTSTVQVFTDSEYQLPYVLGSAHQGCLPPFPADVFMVPQYGYLTLNNGSQAVGRSSFYCLEYFPSQMLRTGNNFQFSYTFEDVPFHSSYAHSQSLDRLMNPLIDQYLYYLNRTQGTTSGTTNQSRLLFSQAGPQSMSLQARNWLPGPCYRQQRLSKTANDNNNSNFPWTAASKYHLNGRDSLVNPGPAMASHKDDEEKFFPMHGNLIFGKEGTTASNAELDNVMITDEEEIRTTNPVATEQYGTVANNLQSSNTAPTTRTVNDQGALPGMVWQDRDVYLQGPIWAKIPHTDGHFHPSPLMGGFGLKHPPPQIMIKNTPVPANPPTTFSPAKFASFITQYSTGQVSVEIEWELQKENSKRWNPEIQYTSNYNKSVNVDFTVDTNGVYSEPRPIGTRYLTRPL

SEQ ID NO: 1201 - protein, 736 aa, Artificial Sequence
  Description of Artificial Sequence: Synthetic polypeptide
MAADGYLPDWLEDNLSEGIREWWALQPGAPKPKANQQHQDNARGLVLPGYKYLGPGNGLDKGEPVNAADAAALEHDKAYDQQLKAGDNPYLKYNHADAEFQERLKEDTSFGGNLGRAVFQAKKRLLEPLGLVEEAAKTAPGKKRPVDQSPQEPDSSSGVGKSGKQPARKRLNFGQTGDSESVPDPQPLGEPPAAPTSLGSNTMASGGGAPMADNNEGADGVGNSSGNWHCDSQWLGDRVITTSTRTWALPTYNNHLYKQISSQSGASNDNHYFGYSTPWGYFDFNRFHCHFSPRDWQRLINNNWGFRPKKLSFKLFNIQVKEVTQNDGTTTIANNLTSTVQVFTDSEYQLPYVLGSAHQGCLPPFPADVFMVPQYGYLTLNNGSQAVGRSSFYCLEYFPSQMLRTGNNFQFSYTFEDVPFHSSYAHSQSLDRLMNPLIDQYLYYLNRTQGTTSGTTNQSRLLFSQAGPQSMSLQARNWLPGPCYRQQRLSKVANDNNNSNFPWTAASKYHLNGRDSLVNPGPAMASHKDDEEKFFPMHGNLIFGKEGTTASNAELDNVMITDEEEIRTTNPVATEQYGTVANNLQSSNTAPTTRTVNDQGALPGMVWQDRDVYLQGPIWAKIPHTDGHFHPSPLMGGFGLKHPPPQIMIKNTPVPANPPTTFVPAKFASFITQYSTGQVSVEIEWELQKENSKRWNPEIQYTSNYNKSVNVDFTVDTNGVYSEPRPIGTRYLTRPL

SEQ ID NO: 1202 - protein, 736 aa, Artificial Sequence
  Description of Artificial Sequence: Synthetic polypeptide
  MOD_RES (168)..(168): Lys or Arg
  MOD_RES (204)..(204): Ala or Ser
  MOD_RES (266)..(266): Ala or Gly
  MOD_RES (311)..(311): Arg or Lys
  MOD_RES (411)..(411): Glu or Gln
  MOD_RES (460)..(460): Thr or Glu
  MOD_RES (493)..(493): Ala or Thr
  MOD_RES (562)..(562): Ser or Asn
  MOD_RES (576)..(576): Gln or Glu
  MOD_RES (587)..(587): Ser or Ala
  MOD_RES (609)..(609): Asn or Asp
MAADGYLPDWLEDNLSEGIREWWDLKPGAPKPKANQQKQDDGRGLVLPGYKYLGPFNGLDKGEPVNAADAAALEHDKAYDQQLKAGDNPYLRYNHADAEFQERLQEDTSFGGNLGRAVFQAKKRVLEPLGLVEEGAKTAPGKKRPVEQSPQEPDSSSGIGKKGQQPAXKRLNFGQTGDSESVPDPQPLGEPPAAPSGVGSNTMXAGGGAPMADNNEGADGVGNASGNWHCDSTWLGDRVITTSTRTWALPTYNNHLYKQISSQSGXSTNDNTYFGYSTPWGYFDFNRFHCHFSPRDWQRLINNNWGFRPKXLNFKLFNIQVKEVTTNDGTTTIANNLTSTVQVFTDSEYQLPYVLGSAHQGCLPPFPADVFMIPQYGYLTLNNGSQAVGRSSFYCLEYFPSQMLRTGNNFXFSYTFEDVPFHSSYAHSQSLDRLMNPLIDQYLYYLSRTQTTSGTAGNRXLQFSQAGPSSMANQAKNWLPGPCYRQQRVSKTXNQNNNSNFAWTGATKYHLNGRDSLVNPGPAMATHKDDEDKFFPMSGVLIFGKQGAGNSNVDLDNVMITXEEEIKTTNPVATEXYGTVATNLQSXNTAPATGTVNSQGALPGMVWQXRDVYLQGPIWAKIPHTDGHFHPSPLMGGFGLKHPPPQILIKNTPVPANPPTTFSPAKFASFITQYSTGQVSVEIEWELQKENSKRWNPEIQYTSNYNKSTNVDFAVDTNGVYSEPRPIGTRYLTRNL

SEQ ID NO: 1203 - DNA, 2208 bp, Artificial Sequence
  Description of Artificial Sequence: Synthetic polynucleotide
  misc_feature (502)..(504): This region may encompass "aag" or "agg"
  misc_feature (610)..(612): This region may encompass "gca" or "agc"
  misc_feature (796)..(798): This region may encompass "gca" or "ggc"
  misc_feature (931)..(933): This region may encompass "aga" or "aag"
  misc_feature (1231)..(1233): This region may encompass "gag" or "cag"
  misc_feature (1378)..(1380): This region may encompass "acg" or "gag"
  misc_feature (1477)..(1479): This region may encompass "gcg" or "acc"
  misc_feature (1684)..(1686): This region may encompass "agt" or "aac"
  misc_feature (1726)..(1728): This region may encompass "cag" or "gag"
  misc_feature (1759)..(1761): This region may encompass "tca" or "gcc"
  misc_feature (1825)..(1827): This region may encompass "aac" or "gac"
atggctgccgatggttatcttccagattggctcgaggacaacctctctgagggcattcgcgagtggtgggacttgaaacctggagccccgaaacccaaagccaaccagcaaaagcaggacgacggccggggtctggtgcttcctggctacaagtacctcggacccttcaacggactcgacaagggggagcccgtcaacgcggcggacgcagcggccctcgagcacgacaaggcctacgaccagcagctcaaagcgggtgacaatccgtacctgcggtataaccacgccgacgccgagtttcaggagcgtctgcaagaagatacgtcttttgggggcaacctcgggcgagcagtcttccaggccaagaagcgggttctcgaacctctcggtctggttgaggaaggcgctaagacggctcctggaaagaagagaccggtagagcaatcaccccaggaaccagactcctcttcgggcatcggcaagaaaggccagcagcccgcgnnnaagagactcaactttgggcagacaggcgactcagagtcagtgcccgaccctcaaccactcggagaaccccccgcagccccctctggtgtgggatctaatacaatgnnngcaggcggtggcgctccaatggcagacaataacgaaggcgccgacggagtgggtaacgcctcaggaaattggcattgcgattccacatggctgggcgacagagtcatcaccaccagcacccgaacctgggccctccccacctacaacaaccacctctacaagcaaatctccagccaatcgggannnagcaccaacgacaacacctacttcggctacagcaccccctgggggtattttgactttaacagattccactgccacttctcaccacgtgactggcagcgactcatcaacaacaactggggattccggcccaagnnnctcaacttcaagctcttcaacatccaggtcaaggaggtcacgacgaatgatggcaccacgaccatcgccaataaccttaccagcacggttcaggtctttacggactcggaataccagctcccgtacgtcctcggctctgcgcaccagggctgcctgcctccgttcccggcggacgtcttcatgattcctcagtacgggtacctgactctgaacaatggcagtcaggccgtgggccgttcctccttctactgcctggagtactttccttctcaaatgctgagaacgggcaacaactttnnnttcagctacacgtttgaggacgtgccttttcacagcagctacgcgcacagccaaagcctggaccggctgatgaaccccctcatcgaccagtacctgtactacctgtctcggactcagaccacgagtggtaccgcaggaaatcggnnnttgcaattttctcaggccgggcctagtagcatggcgaatcaggccaaaaactggctacccgggccctgctaccggcagcaacgcgtctccaagacannnaatcaaaataacaacagcaactttgcctggaccggtgccaccaagtatcatctgaatggcagagactctctggtaaatcccggtcccgctatggcaacccacaaggacgacgaagacaaattttttccgatgagcggagtcttaatatttgggaaacagggagctggaaatagcaacgtggaccttgacaacgttatgataaccnnngaggaagaaattaaaaccaccaacccagtggccacagaannntacggcacggtggccactaacctgcaatcgnnnaacaccgctcctgctacagggaccgtcaacagtcaaggagccttacctggcatggtctggcagnnncgggacgtgtacctgcagggtcctatctgggccaagattcctcacacggacggacactttcatccctcgccgctgatgggaggctttggactgaaacacccgcctcctcagatcctgattaagaatacacctgttcccgcgaatcctccaactaccttcagtccagctaagtttgcgtcgttcatcacgcagtacagcaccggacaggtcagcgtggaaattgaatgggagctgcagaaagaaaacagcaaacgctggaacccagagattcaatacacttccaactacaacaaatctacaaatgtggactttgctgttgacacaaatggcgtttattctgagcctcgccccatcggcacccgttacctcacccgtaatctg

SEQ ID NO: 1204 - protein, 737 aa, Artificial Sequence
  Description of Artificial Sequence: Synthetic polypeptide
  MOD_RES (157)..(157): Thr or Ser
  MOD_RES (168)..(168): Lys or Arg
  MOD_RES (262)..(262): Asn or Ser
  MOD_RES (263)..(263): Ser or His
  MOD_RES (312)..(312): Arg or Lys
  MOD_RES (412)..(412): Glu or Gln
  MOD_RES (460)..(460): Arg or Gln
  MOD_RES (461)..(461): Thr or Glu
  MOD_RES (552)..(552): Asp or Ser
  MOD_RES (556)..(556): Leu or Tyr
  MOD_RES (557)..(557): Asp or Ser
  MOD_RES (563)..(563): Ser or Asn
  MOD_RES (580)..(580): Val or Ile
  MOD_RES (588)..(588): Asn or Ser
  MOD_RES (664)..(664): Ser or Thr
MAADGYLPDWLEDNLSEGIREWWDLKPGAPKPKANQQKQDDGRGLVLPGYKYLGPFNGLDKGEPVNAADAAALEHDKAYDQQLKAGDNPYLRYNHADAEFQERLQEDTSFGGNLGRAVFQAKKRVLEPLGLVEEGAKTAPGKKRPVEQSPQEPDSSXGIGKKGQQPAXKRLNFGQTGDSESVPDPQPLGEPPAAPSGVGSNTMAAGGGAPMADNNEGADGVGNASGNWHCDSTWLGDRVITTSTRTWALPTYNNHLYKQISXXQSGGSTNDNTYFGYSTPWGYFDFNRFHCHFSPRDWQRLINNNWGFRPKXLNFKLFNIQVKEVTTNDGTTTIANNLTSTVQVFTDSEYQLPYVLGSAHQGCLPPFPADVFMIPQYGYLTLNNGSQAVGRSSFYCLEYFPSQMLRTGNNFXFSYTFEDVPFHSSYAHSQSLDRLMNPLIDQYLYYLSRTQTTGGTAGNXXLQFSQAGPSSMANQAKNWLPGPCYRQQRVSKTTNQNNNSNFAWTGATKYHLNGRDSLVNPGVAMATHKDDEDRFFPSSGVLIFGKQGAGNXNVDXXNVMITXEEEIKTTNPVATEEYGXVATNLQSXNTAPQTGTVNSQGALPGMVWQNRDVYLQGPIWAKIPHTDGNFHPSPLMGGFGLKHPPPQILIKNTPVPANPPTTFXPAKFASFITQYSTGQVSVEIEWELQKENSKRWNPEIQYTSNYNKSTNVDFAVDTEGVYSEPRPIGTRYLTRNL

SEQ ID NO: 1205 - DNA, 2211 bp, Artificial Sequence
  Description of Artificial Sequence: Synthetic polynucleotide
  misc_feature (469)..(471): This region may encompass "acg" or "agc"
  misc_feature (502)..(504): This region may encompass "aaa" or "aga"
  misc_feature (784)..(786): This region may encompass "aac" or "agt"
  misc_feature (787)..(789): This region may encompass "agc" or "cac"
  misc_feature (934)..(936): This region may encompass "aga" or "aag"
  misc_feature (1234)..(1236): This region may encompass "gag" or "cag"
  misc_feature (1378)..(1380): This region may encompass "cgg" or "cag"
  misc_feature (1381)..(1383): This region may encompass "acg" or "gag"
  misc_feature (1654)..(1656): This region may encompass "gac" or "agc"
  misc_feature (1666)..(1668): This region may encompass "ctt" or "tac"
  misc_feature (1669)..(1671): This region may encompass "gac" or "agc"
  misc_feature (1687)..(1689): This region may encompass "agt" or "aac"
  misc_feature (1738)..(1740): This region may encompass "gtg" or "atc"
  misc_feature (1762)..(1764): This region may encompass "gca" or "agc"
  misc_feature (1990)..(1992): This region may encompass "agt" or "acc"
atggctgccgatggttatcttccagattggctcgaggacaacctctctgagggcattcgcgagtggtgggacttgaaacctggagccccgaaacccaaagccaaccagcaaaagcaggacgacggccggggtctggtgcttcctggctacaagtacctcggacccttcaacggactcgacaagggggagcccgtcaacgcggcggacgcagcggccctcgagcacgacaaggcctacgaccagcagctcaaagcgggtgacaatccgtacctgcggtataaccacgccgacgccgagtttcaggagcgtctgcaagaagatacgtcttttgggggcaacctcgggcgagcagtcttccaggccaagaagcgggttctcgaacctctcggtctggttgaggaaggcgctaagacggctcctggaaagaagagaccggtagagcaatcaccccaggaaccagactcctctnnnggcatcggcaagaaaggccagcagcccgcgnnnaagagactcaactttgggcagactggcgactcagagtcagtgcccgaccctcaaccactcggagaaccccccgcagccccctctggtgtgggatctaatacaatggctgcaggcggtggcgctccaatggcagacaataacgaaggcgccgacggagtgggtaatgcctcaggaaattggcattgcgattccacatggctgggcgacagagtcatcaccaccagcacccgaacctgggccctccccacctacaacaaccacctctacaagcaaatctccnnnnnncaatcgggaggaagcaccaacgacaacacctacttcggctacagcaccccctgggggtattttgactttaacagattccactgccacttctcaccacgtgactggcagcgactcatcaacaacaactggggattccggcccaagnnnctcaacttcaagctcttcaacatccaggtcaaggaggtcacgacgaatgatggcaccacgaccatcgccaataaccttaccagcacggttcaggtctttacggactcggaataccagctcccgtacgtcctcggctctgcgcaccagggctgcctgcctccgttcccggcggacgtcttcatgattcctcagtacgggtacctgactctgaacaatggcagtcaggccgtgggccgttcctccttctactgcctggagtactttccttctcaaatgctgagaacgggcaacaactttnnnttcagctacacgtttgaggacgtgccttttcacagcagctacgcgcacagccaaagcctggaccggctgatgaaccccctcatcgaccagtacctgtactacctgtctcggactcagaccacgggaggtaccgcaggaaatnnnnnnttgcaattttctcaggccgggcctagtagcatggcgaatcaggccaaaaactggctacccgggccctgctaccggcagcaacgcgtctccaagacaacgaatcaaaataacaacagcaactttgcctggaccggtgccaccaagtatcatctgaatggcagagactctctggtaaatcccggtgtcgctatggcaacccacaaggacgacgaagaccgattttttccgtccagcggagtcttaatatttgggaaacagggagctggaaatnnnaacgtggacnnnnnnaacgttatgataaccnnngaggaagaaattaaaaccaccaacccagtggccacagaagagtacggcnnngtggccactaacctgcaatcgnnnaacaccgctcctcaaacagggaccgtcaacagtcaaggagccttacctggcatggtctggcagaaccgggacgtgtacctgcagggtcctatctgggccaagattcctcacacggacggaaactttcatccctcgccgctgatgggaggctttggactgaaacacccgcctcctcagatcctgattaagaatacacctgttcccgcgaatcctccaactaccttcnnnccagctaagtttgcgtcgttcatcacgcagtacagcaccggacaggtcagcgtggaaattgaatgggagctgcagaaagaaaacagcaaacgctggaacccagagattcaatacacttccaactacaacaaatctacaaatgtggactttgctgttgacacagaaggcgtttattctgagcctcgccccatcggcacccgttacctcacccgtaatctg

SEQ ID NO: 1206 - protein, 738 aa, Artificial Sequence
  Description of Artificial Sequence: Synthetic polypeptide
  MOD_RES (158)..(158): Thr or Ser
  MOD_RES (169)..(169): Lys or Arg
  MOD_RES (564)..(564): Ser or Asn
MAADGYLPDWLEDNLSEGIREWWDLKPGAPKPKANQQKQDDGRGLVLPGYKYLGPFNGLDKGEPVNAADAAALEHDKAYDQQLKAGDNPYLRYNHADAEFQERLQEDTSFGGNLGRAVFQAKKRVLEPLGLVEEGAKTAPGKKRPVEQSPQREPDSSXGIGKKGQQPAXKRLNFGQTGDSESVPDPQPLGEPPAAPSGVGSNTMAAGGGAPMADNNEGADGVGNSSGNWHCDSTWLGDRVITTSTRTWALPTYNNHLYKQISNGTSGGSTNDNTYFGYSTPWGYFDFNRFHCHFSPRDWQRLINNNWGFRPKRLNFKLFNIQVKEVTTNEGTKTIANNLTSTVQVFTDSEYQLPYVLGSAHQGCLPPFPADVFMIPQYGYLTLNNGSQAVGRSSFYCLEYFPSQMLRTGNNFQFSYTFEDVPFHSSYAHSQSLDRLMNPLIDQYLYYLSRTQTTGGTAGTQTLQFSQAGPSSMANQAKNWLPGPCYRQQRVSTTTNQNNNSNFAWTGATKYHLNGRDSLVNPGVAMATHKDDEDRFFPSSGVLIFGKQGAGNDNVDYSNVMITXEEEIKTTNPVATEEYGVVATNLQSANTAPQTGTVNSQGALPGMVWQNRDVYLQGPIWAKIPHTDGNFHPSPLMGGFGLKHPPPQILIKNTPVPADPPTTFNQAKLNSFITQYSTGQVSVEIEWELQKENSKRWNPEIQYTSNYYKSTNVDFAVNTEGVYSEPRPIGTRYLTRNL

SEQ ID NO: 1207 - DNA, 2214 bp, Artificial Sequence
  Description of Artificial Sequence: Synthetic polynucleotide
  misc_feature (472)..(474): This region may encompass "acg" or "agc"
  misc_feature (505)..(507): This region may encompass "aaa" or "aga"
  misc_feature (1690)..(1692): This region may encompass "agc" or "aac"
atggctgccgatggttatcttccagattggctcgaggacaacctctctgagggcattcgcgagtggtgggacctgaaacctggagccccgaaacccaaagccaaccagcaaaagcaggacgacggccggggtctggtgcttcctggctacaagtacctcggacccttcaacggactcgacaagggggagcccgtcaacgcggcggacgcagcggccctcgagcacgacaaggcctacgaccagcagctcaaagcgggtgacaatccgtacctgcggtataatcacgccgacgccgagtttcaggagcgtctgcaagaagatacgtcttttgggggcaacctcgggcgagcagtcttccaggccaagaagcgggttctcgaacctctcggtctggttgaggaaggcgctaagacggctcctggaaagaagagaccggtagagcagtcaccacagcgtgagcccgactcctccnnnggcatcggcaagaaaggccagcagcccgccnnnaagagactcaatttcggtcagactggcgactcagagtcagtccccgaccctcaacctctcggagaacctccagcagcgccctctggtgtgggatctaatacaatggctgcaggcggtggcgcaccaatggcagacaataacgaaggtgccgacggagtgggtaattcctcgggaaattggcattgcgattccacatggctgggcgacagagtcatcaccaccagcacccgaacctgggccctgcccacctacaacaaccacctctacaagcaaatctccaacgggacctcgggaggcagcaccaacgacaacacctactttggctacagcaccccctgggggtattttgactttaacagattccactgccacttctcaccacgtgactggcagcgactcatcaacaacaactggggattccggcccaagagactcaacttcaagctcttcaacatccaggtcaaagaggtcacgacgaatgaaggcaccaagaccatcgccaataacctcaccagcaccgtccaggtgtttacggactcggaataccagctgccgtacgtcctcggctctgcccaccagggctgcctgcctccgttcccggcggacgtcttcatgattcctcagtacggctacctgactctcaacaacggtagtcaggccgtgggacgttcctccttctactgcctggagtacttcccctctcagatgctgagaacgggcaacaactttcaattcagctacactttcgaggacgtgcctttccacagcagctacgcgcacagccagagtttggacaggctgatgaatcctctcatcgaccagtacctgtactacctgtcaagaacccagactacgggaggcacagcgggaacccagacgttgcagttttctcaggccgggcctagcagcatggcgaatcaggccaaaaactggctgcctggaccctgctacagacagcagcgcgtctccacgacaacgaatcaaaacaacaacagcaactttgcctggactggtgccaccaagtatcatctgaacggcagagactctctggtgaatccgggcgtcgccatggcaacccacaaggacgacgaggaccgcttcttcccatccagcggcgtcctcatatttggcaagcagggagctggaaatgacaacgtggactatagcaacgtgatgataaccnnngaggaagaaatcaagaccaccaaccccgtggccacagaagagtatggcgtggtggctactaacctacagtcggcaaacaccgctcctcaaacggggaccgtcaacagccagggagccttacctggcatggtctggcagaaccgggacgtgtacctgcagggtcctatttgggccaagattcctcacacagatggcaactttcacccgtctcctttaatgggcggctttggacttaaacatccgcctcctcagatcctcatcaaaaacactcctgttcctgcggatcctccaacaacgttcaaccaggccaagctgaattctttcatcacgcagtacagcaccggacaagtcagcgtggagatcgagtgggagctgcagaaggagaacagcaagcgctggaacccagagattcagtatacttccaactactacaaatctacaaatgtggactttgctgttaatactgagggtgtttactctgagcctcgccccattggcactcgttacctcacccgtaatctg

SEQ ID NO: 1208 - protein, 738 aa, Artificial Sequence
  Description of Artificial Sequence: Synthetic polypeptide
  MOD_RES (158)..(158): Thr or Ser
  MOD_RES (169)..(169): Arg or Lys
  MOD_RES (315)..(315): Asn or Ser
  MOD_RES (413)..(413): Gln or Glu
  MOD_RES (472)..(472): Asn, Thr or Ser
  MOD_RES (534)..(534): Asp or Glu
  MOD_RES (542)..(542): Ile or Val
  MOD_RES (595)..(595): Ile or Val
MAADGYLPDWLEDNLSEGIREWWDLKPGAPKPKANQQKQDDGRGLVLPGYKYLGPFNGLDKGEPVNAADAAALEHDKAYDQQLKAGDNPYLRYNHADAEFQERLQEDTSFGGNLGRAVFQAKKRVLEPLGLVEEGAKTAPGKKRPVEQSPQREPDSSXGIGKKGQQPAXKRLNFGQTGDSESVPDPQPLGEPPAAPSGVGSNTMAAGGGAPMADNNEGADGVGSSSGNWHCDSTWLGDRVITTSTRTWALPTYNNHLYKQISNGTSGGSTNDNTYFGYSTPWGYFDFNRFHCHFSPRDWQRLINNNWGFRPKRLXFKLFNIQVKEVTQNEGTKTIANNLTSTIQVFTDSEYQLPYVLGSAHQGCLPPFPADVFMIPQYGYLTLNNGSQAVGRSSFYCLEYFPSQMLRTGNNFXFSYTFEDVPFHSSYAHSQSLDRLMNPLIDQYLYYLSRTQTTGGTAGTQTLQFSQAGPSXMANQAKNWLPGPCYRQQRVSTTTSQNNNSNFAWTGATKYHLNGRDSLVNPGVAMATHKDDEXRFFPSSGXLIFGKQGAGKDNVDYSNVMLTSEEEIKTTNPVATEEYGVVADNLQQQNTAPQXGTVNSQGALPGMVWQNRDVYLQGPIWAKIPHTDGNFHPSPLMGGFGLKHPPPQILIKNTPVPADPPTTFNQAKLNSFITQYSTGQVSVEIEWELQKENSKRWNPEIQYTSNYYKSTNVDFAVNTEGVYSEPRPIGTRYLTRNL

SEQ ID NO: 1209 - DNA, 2214 bp, Artificial Sequence
  Description of Artificial Sequence: Synthetic polynucleotide
  misc_feature (472)..(474): This region may encompass "acg" or "agc"
  misc_feature (505)..(507): This region may encompass "aga" or "aag"
  misc_feature (943)..(945): This region may encompass "aac" or "agc"
  misc_feature (1237)..(1239): This region may encompass "caa" or "gaa"
  misc_feature (1414)..(1416): This region may encompass "aac" or "acc" or "agc"
  misc_feature (1600)..(1602): This region may encompass "gac" or "gag"
  misc_feature (1624)..(1626): This region may encompass "atc" or "gtc"
  misc_feature (1783)..(1785): This region may encompass "ata" or "gta"
atggctgccgatggttatcttccagattggctcgaggacaacctctctgagggcattcgcgagtggtgggacctgaaacctggagccccgaaacccaaagccaaccagcaaaagcaggacgacggccggggtctggtgcttcctggctacaagtacctcggacccttcaacggactcgacaagggggagcccgtcaacgcggcggacgcagcggccctcgagcacgacaaggcctacgaccagcagctcaaagcgggtgacaatccgtacctgcggtataatcacgccgacgccgagtttcaggagcgtctgcaagaagatacgtcttttgggggcaacctcgggcgagcagtcttccaggccaagaagcgggttctcgaacctctcggtctggttgaggaaggcgctaagacggctcctggaaagaagagaccggtagagcagtcaccacagcgtgagcccgactcctccnnnggcatcggcaagaaaggccagcagcccgccnnnaagagactcaatttcggtcagactggcgactcagagtcagtccccgaccctcaacctctcggagaacctccagcagcgccctctggtgtgggatctaatacaatggctgcaggcggtggcgcaccaatggcagacaataacgaaggtgccgacggagtgggtagttcctcgggaaattggcattgcgattccacatggctgggcgacagagtcatcaccaccagcacccgaacctgggccctgcccacctacaacaaccacctctacaagcaaatctccaacgggacctcgggaggcagcaccaacgacaacacctactttggctacagcaccccctgggggtattttgactttaacagattccactgccacttctcaccacgtgactggcagcgactcatcaacaacaactggggattccggcccaagagactcnnnttcaagctcttcaacatccaggtcaaagaggtcacgcagaatgaaggcaccaagaccatcgccaataacctcaccagcaccatccaggtgtttacggactcggaataccagctgccgtacgtcctcggctctgcccaccagggctgcctgcctccgttcccggcggacgtcttcatgattcctcagtacggctacctgactctcaacaacggtagtcaggccgtgggacgttcctccttctactgcctggagtacttcccctctcagatgctgagaacgggcaacaactttnnnttcagctacactttcgaggacgtgcctttccacagcagctacgcgcacagccagagtttggacaggctgatgaatcctctcatcgaccagtacctgtactacctgtcaagaacccagactacgggaggcacagcgggaacccagacgttgcagttttctcaggccgggcctagcnnnatggcgaatcaggccaaaaactggctgcctggaccctgctacagacagcagcgcgtctccacgacaacgtcgcaaaacaacaacagcaactttgcctggactggtgccaccaagtatcatctgaacggcagagactctctggtgaatccgggcgtcgccatggcaacccacaaggacgacgagnnncgcttcttcccatccagcggcnnnctcatatttggcaagcagggagctggaaaagacaacgtggactatagcaacgtgatgctaaccagcgaggaagaaatcaagaccaccaaccccgtggccacagaagagtatggcgtggtggctgataacctacagcagcaaaacaccgctcctcaannngggaccgtcaacagccagggagccttacctggcatggtctggcagaaccgggacgtgtacctgcagggtcctatttgggccaagattcctcacacagatggcaactttcacccgtctcctttaatgggcggctttggacttaaacatccgcctcctcagatcctcatcaaaaacactcctgttcctgcggatcctccaacaacgttcaaccaggccaagctgaattctttcatcacgcagtacagcaccggacaagtcagcgtggagatcgagtgggagctgcagaaggagaacagcaagcgctggaacccagagattcagtatacttccaactactacaaatctacaaatgtggactttgctgttaatactgagggtgtttactctgagcctcgccccattggcactcgttacctcacccgtaatctg

SEQ ID NO: 1210 - protein, 738 aa, Artificial Sequence
  Description of Artificial Sequence: Synthetic polypeptide
  MOD_RES (169)..(169): Arg or Lys
  MOD_RES (315)..(315): Asn or Ser
  MOD_RES (534)..(534): Asp or Glu
  MOD_RES (542)..(542): Ile or Val
MAADGYLPDWLEDNLSEGIREWWDLKPGAPKPKANQQKQDDGRGLVLPGYKYLGPFNGLDKGEPVNAADAAALEHDKAYDQQLKAGDNPYLRYNHADAEFQERLQEDTSFGGNLGRAVFQAKKRVLEPLGLVEEGAKTAPGKKRPVEPSPQRSPDSSTGIGKKGQQPAXKRLNFGQTGDSESVPDPQPIGEPPAAPSGVGSGTMAAGGGAPMADNNEGADGVGSSSGNWHCDSTWLGDRVITTSTRTWALPTYNNHLYKQISNGTSGGSTNDNTYFGYSTPWGYFDFNRFHCHFSPRDWQRLINNNWGFRPKRLXFKLFNIQVKEVTQNEGTKTIANNLTSTIQVFTDSEYQLPYVLGSAHQGCLPPFPADVFMIPQYGYLTLNNGSQAVGRSSFYCLEYFPSQMLRTGNNFEFSYTFEDVPFHSSYAHSQSLDRLMNPLIDQYLYYLSRTQSTGGTAGTQQLLFSQAGPSNMSAQAKNWLPGPCYRQQRVSTTLSQNNNSNFAWTGATKYHLNGRDSLVNPGVAMATHKDDEXRFFPSSGXLMFGKQGAGKDNVDYSNVMLTSEEEIKTTNPVATEQYGVVADNLQQQNTAPIVGAVNSQGALPGMVWQNRDVYLQGPIWAKIPHTDGNFHPSPLMGGFGLKHPPPQILIKNTPVPADPPTTFNQAKLNSFITQYSTGQVSVEIEWELQKENSKRWNPEIQYTSNYYKSTNVDFAVNTEGVYSEPRPIGTRYLTRNL

SEQ ID NO: 1211 - DNA, 2214 bp, Artificial Sequence
  Description of Artificial Sequence: Synthetic polynucleotide
  misc_feature (505)..(507): This region may encompass "aga" or "aaa"
  misc_feature (943)..(945): This region may encompass "aac" or "agc"
  misc_feature (1600)..(1602): This region may encompass "gac" or "gag"
  misc_feature (1624)..(1626): This region may encompass "atc" or "gtc"
atggctgccgatggttatcttccagattggctcgaggacaacctctctgagggcattcgcgagtggtgggacctgaaacctggagccccgaaacccaaagccaaccagcaaaagcaggacgacggccggggtctggtgcttcctggctacaagtacctcggacccttcaacggactcgacaagggggagcccgtcaacgcggcggacgcagcggccctcgagcacgacaaggcctacgaccagcagctcaaagcgggtgacaatccgtacctgcggtataatcacgccgacgccgagtttcaggagcgtctgcaagaagatacgtcttttgggggcaacctcgggcgagcagtcttccaggccaagaagcgggttctcgaacctctcggtctggttgaggaaggcgctaagacggctcctggaaagaagagaccggtagagccgtcaccacagcgttcccccgactcctccacgggcatcggcaagaaaggccagcagcccgccnnnaagagactcaatttcggtcagactggcgactcagagtcagtccccgaccctcaacctatcggagaacctccagcagcgccctctggtgtgggatctggtacaatggctgcaggcggtggcgcaccaatggcagacaataacgaaggtgccgacggagtgggtagttcctcgggaaattggcattgcgattccacatggctgggcgacagagtcatcaccaccagcacccgaacctgggccctgcccacctacaacaaccacctctacaagcaaatctccaacgggacctcgggaggcagcaccaacgacaacacctactttggctacagcaccccctgggggtattttgactttaacagattccactgccacttctcaccacgtgactggcagcgactcatcaacaacaactggggattccggcccaagagactcnnnttcaagctcttcaacatccaggtcaaagaggtcacgcagaatgaaggcaccaagaccatcgccaataacctcaccagcaccatccaggtgtttacggactcggaataccagctgccgtacgtcctcggctctgcccaccagggctgcctgcctccgttcccggcggacgtcttcatgattcctcagtacggctacctgactctcaacaacggtagtcaggccgtgggacgttcctccttctactgcctggagtacttcccctctcagatgctgagaacgggcaacaactttgagttcagctacactttcgaggacgtgcctttccacagcagctacgcgcacagccagagtttggacaggctgatgaatcctctcatcgaccagtacctgtactacctgtcaagaacccagtctacgggaggcacagcgggaacccagcagttgctgttttctcaggccgggcctagcaacatgtcggctcaggccaaaaactggctgcctggaccctgctacagacagcagcgcgtctccacgacactgtcgcaaaacaacaacagcaactttgcctggactggtgccaccaagtatcatctgaacggcagagactctctggtgaatccgggcgtcgccatggcaacccacaaggacgacgagnnncgcttcttcccatccagcggcnnnctcatgtttggcaagcagggagctggaaaagacaacgtggactatagcaacgtgatgctaaccagcgaggaagaaatcaagaccaccaaccccgtggccacagaacagtatggcgtggtggctgataacctacagcagcaaaacaccgctcctattgtgggggccgtcaacagccagggagccttacctggcatggtctggcagaaccgggacgtgtacctgcagggtcctatttgggccaagattcctcacacagatggcaactttcacccgtctcctttaatgggcggctttggacttaaacatccgcctcctcagatcctcatcaaaaacactcctgttcctgcggatcctccaacaacgttcaaccaggccaagctgaattctttcatcacgcagtacagcaccggacaagtcagcgtggagatcgagtgggagctgcagaaggagaacagcaagcgctggaacccagagattcagtatacttccaactactacaaatctacaaatgtggactttgctgttaatactgagggtgtttactctgagcctcgccccattggcactcgttacctcacccgtaatctg

SEQ ID NO: 1212 - protein, 738 aa, Artificial Sequence
  Description of Artificial Sequence: Synthetic polypeptide
  MOD_RES (471)..(471): Ser or Asn
MAADGYLPDWLEDNLSEGIREWWDLKPGAPKPKANQQKQDDGRGLVLPGYKYLGPFNGLDKGEPVNAADAAALEHDKAYDQQLKAGDNPYLRYNHADAEFQERLQEDTSFGGNLGRAVFQAKKRVLEPLGLVEEGAKTAPGKKRPVEPSPQRSPDSSTGIGKKGQQPAKKRLNFGQTGDSESVPDPQPIGEPPAGPSGLGSGTMAAGGGAPMADNNEGADGVGSSSGNWHCDSTWLGDRVITTSTRTWALPTYNNHLYKQISNGTSGGSTNDNTYFGYSTPWGYFDFNRFHCHFSPRDWQRLINNNWGFRPKRLNFKLFNIQVKEVTQNEGTKTIANNLTSTIQVFTDSEYQLPYVLGSAHQGCLPPFPADVFMIPQYGYLTLNNGSQAVGRSSFYCLEYFPSQMLRTGNNFEFSYTFEDVPFHSSYAHSQSLDRLMNPLIDQYLYYLSRTQSTGGTAGTQQLLFSQAGPXNMSAQAKNWLPGPCYRQQRVSTTLSQNNNSNFAWTGATKYHLNGRDSLVNPGVAMATHKDDEERFFPSSGVLMFGKQGAGKDNVDYSSVMLTSEEEIKTTNPVATEQYGVVADNLQQQNTAPIVGAVNSQGALPGMVWQNRDVYLQGPIWAKIPHTDGNFHPSPLMGGFGLKHPPPQILIKNTPVPADPPTTFSQAKLASFITQYSTGQVSVEIEWELQKENSKRWNPEIQYTSNYYKSTNVDFAVNTEGTYSEPRPIGTRYLTRNL

SEQ ID NO: 1213 - DNA, 2214 bp, Artificial Sequence
  Description of Artificial Sequence: Synthetic polynucleotide
  misc_feature (1411)..(1413): This region may encompass "agt" or "aat"
atggctgccgatggttatcttccagattggctcgaggacaacctctctgagggcattcgcgagtggtgggacttgaaacctggagccccgaaacccaaagccaaccagcaaaagcaggacgacggccggggtctggtgcttcctggctacaagtacctcggacccttcaacggactcgacaagggggagcccgtcaacgcggcggacgcagcggccctcgagcacgacaaggcctacgaccagcagctcaaagcgggtgacaatccgtacctgcggtataaccacgccgacgccgagtttcaggagcgtctgcaagaagatacgtcttttgggggcaacctcgggcgagcagtcttccaggccaagaagcgggttctcgaacctctcggtctggttgaggaaggcgctaagacggctcctggaaagaagagaccggtagagccatcaccccagcgttctccagactcctctacgggcatcggcaagaaaggccagcagcccgcgaaaaagagactcaactttgggcagactggcgactcagagtcagtgcccgaccctcaaccaatcggagaaccccccgcaggcccctctggtctgggatctggtacaatggctgcaggcggtggcgctccaatggcagacaataacgaaggcgccgacggagtgggtagttcctcaggaaattggcattgcgattccacatggctgggcgacagagtcatcaccaccagcacccgaacctgggccctccccacctacaacaaccacctctacaagcaaatctccaacgggacttcgggaggaagcaccaacgacaacacctacttcggctacagcaccccctgggggtattttgactttaacagattccactgccacttctcaccacgtgactggcagcgactcatcaacaacaactggggattccggcccaagagactcaacttcaagctcttcaacatccaggtcaaggaggtcacgcagaatgaaggcaccaagaccatcgccaataaccttaccagcacgattcaggtctttacggactcggaataccagctcccgtacgtcctcggctctgcgcaccagggctgcctgcctccgttcccggcggacgtcttcatgattcctcagtacgggtacctgactctgaacaatggcagtcaggccgtgggccgttcctccttctactgcctggagtactttccttctcaaatgctgagaacgggcaacaactttgagttcagctacacgtttgaggacgtgccttttcacagcagctacgcgcacagccaaagcctggaccggctgatgaaccccctcatcgaccagtacctgtactacctgtctcggactcagtccacgggaggtaccgcaggaactcagcagttgctattttctcaggccgggcctnnnaacatgtcggctcaggccaaaaactggctacccgggccctgctaccggcagcaacgcgtctccacgacactgtcgcaaaataacaacagcaactttgcctggaccggtgccaccaagtatcatctgaatggcagagactctctggtaaatcccggtgtcgctatggcaacccacaaggacgacgaagagcgattttttccgtccagcggagtcttaatgtttgggaaacagggagctggaaaagacaacgtggactatagcagcgttatgctaaccagtgaggaagaaattaaaaccaccaacccagtggccacagaacagtacggcgtggtggccgataacctgcaacagcaaaacaccgctcctattgtaggggccgtcaacagtcaaggagccttacctggcatggtctggcagaaccgggacgtgtacctgcagggtcctatctgggccaagattcctcacacggacggaaactttcatccctcgccgctgatgggaggctttggactgaaacacccgcctcctcagatcctgattaagaatacacctgttcccgcggatcctccaactaccttcagtcaagctaagctggcgtcgttcatcacgcagtacagcaccggacaggtcagcgtggaaattgaatgggagctgcagaaagaaaacagcaaacgctggaacccagagattcaatacacttccaactactacaaatctacaaatgtggactttgctgttaacacagaaggcacttattctgagcctcgccccatcggcacccgttacctcacccgtaatctg

SEQ ID NO: 1214 - protein, 737 aa, Artificial Sequence
  Description of Artificial Sequence: Synthetic polypeptide
  MOD_RES (148)..(148): Pro or Gln
  MOD_RES (169)..(169): Lys or Arg
  MOD_RES (314)..(314): Arg or Asn
  MOD_RES (466)..(466): Tyr or His
  MOD_RES (563)..(563): Asn or Ser
  MOD_RES (580)..(580): Val or Ile
  MOD_RES (588)..(588): Ala or Ser
MAADGYLPDWLEDNLSEGIREWWDLKPGAPKPKANQQKQDDGRGLVLPGYKYLGPFNGLDKGEPVNAADAAALEHDKAYDQQLKAGDNPYLRYNHADAEFQERLQEDTSFGGNLGRAVFQAKKRVLEPLGLVEEGAKTAPGKKRPVEXSPQRSPDSSTGIGKKGQQPAXKRLNFGQTGDSESVPDPQPLGEPPAAPSGVGSGTMAAGGGAPMADNNEGADGVGNASGNWHCDSTWLGDRVITTSTRTWALPTYNNHLYKQISSQSAGSTNDNTYFGYSTPWGYFDFNRFHCHFSPRDWQRLINNNWGFRPKKLXFKLFNIQVKEVTTNDGVTTIANNLTSTVQVFSDSEYQLPYVLGSAHQGCLPPFPADVFMIPQYGYLTLNNGSQSVGRSSFYCLEYFPSQMLRTGNNFEFSYTFEDVPFHSSYAHSQSLDRLMNPLIDQYLYYLARTQSTTGGTAGNRELQFXQAGPSTMAEQAKNWLPGPCYRQQRVSKTLDQNNNSNFAWTGATKYHLNGRNSLVNPGVAMATHKDDEDRFFPSSGVLIFGKTGAANKTTLENVLMTXEEEIKTTNPVATEEYGXVSSNLQSXNTAPQTQTVNSQGALPGMVWQNRDVYLQGPIWAKIPHTDGNFHPSPLMGGFGLKHPPPQILIKNTPVPANPPEVFTPAKFASFITQYSTGQVSVEIEWELQKENSKRWNPEIQYTSNYDKSTNVDFAVDSEGVYSEPRPIGTRYLTRNL

SEQ ID NO: 1215 - DNA, 2211 bp, Artificial Sequence
  Description of Artificial Sequence: Synthetic polynucleotide
  misc_feature (442)..(444): This region may encompass "ccg" or "cag"
  misc_feature (505)..(507): This region may encompass "aaa" or "aga"
  misc_feature (940)..(942): This region may encompass "cgg" or "aac"
  misc_feature (1396)..(1398): This region may encompass "tac" or "cac"
  misc_feature (1687)..(1689): This region may encompass "aat" or "agt"
  misc_feature (1738)..(1740): This region may encompass "gta" or "ata"
  misc_feature (1762)..(1764): This region may encompass "gct" or "tct"
atggctgccgatggttatcttccagattggctcgaggacaacctctctgagggcattcgcgagtggtgggacctgaaacctggagccccgaaacccaaagccaaccagcaaaagcaggacgacggccggggtctggtgcttcctggctacaagtacctcggacccttcaacggactcgacaagggggagcccgtcaacgcggcggacgcagcggccctcgagcacgacaaggcctacgaccagcagctcaaagcgggtgacaatccgtacctgcggtataaccacgccgacgccgagtttcaggagcgtctgcaagaagatacgtcatttgggggcaacctcgggcgagcagtcttccaggccaagaagcgggttctcgaacctctcggtctggttgaggaaggcgctaagacggctcctggaaagaagagaccggtagagnnntcacctcagcgttcccccgactcctccacgggcatcggcaagaaaggccagcagcccgccnnnaagagactcaatttcggtcagactggcgactcagagtcagtccccgaccctcaacctctcggagaacctccagcagcgccctctggtgtgggatctggtacaatggctgcaggcggtggcgcaccaatggcagacaataacgaaggtgccgacggagtgggtaatgcctcaggaaattggcattgcgattccacatggctgggcgacagagtcattaccaccagcacccgaacctgggccctgcccacctacaacaaccacctctacaagcaaatctccagtcaaagtgcaggtagtaccaacgacaacacctacttcggctacagcaccccctgggggtattttgactttaacagattccactgccacttctcaccacgtgactggcagcgactcatcaacaacaactggggattccggcccaagaagctgnnnttcaagctcttcaacatccaggtcaaggaggtcacgacgaatgacggcgttacgaccatcgctaataaccttaccagcacggttcaggtattctcggactcggaataccagctgccgtacgtcctcggctctgcgcaccagggctgcctgcctccgttcccggcggacgtcttcatgattcctcagtacggctacctgactctcaacaatggcagtcagtctgtgggacgttcctccttctactgcctggagtacttcccctctcagatgctgagaacgggcaacaactttgagttcagctacaccttcgaggacgtgcctttccacagcagctacgcacacagccagagcctggaccggctgatgaatcccctcatcgaccagtacttgtactacctggccagaacacagagtaccacaggaggcacagctggcaatcgggaactgcagtttnnncaggccgggccttcaactatggccgaacaagccaagaattggttacctggaccttgctaccggcaacaaagagtctccaaaacgctggatcaaaacaacaacagcaactttgcttggactggtgccaccaaatatcacctgaacggcagaaactcgttggttaatcccggcgtcgccatggcaactcacaaggacgacgaggaccgctttttcccatccagcggagtcctgatttttggaaaaactggagcagctaacaaaactacattggaaaatgtgttaatgacannngaagaagaaattaaaactactaatcctgtagccacggaagaatacgggnnngtcagcagcaacttacaatcgnnnaatactgcaccccagacacaaactgtcaacagccagggagccttacctggcatggtctggcagaaccgggacgtgtacctgcagggtcccatctgggccaagattcctcacacggatggcaactttcacccgtctcctttgatgggcggctttggacttaaacatccgcctcctcagatcctgatcaagaacactcccgttcccgctaatcctccggaggtgtttactcctgccaagtttgcttcgttcatcacacagtacagcaccggacaagtcagcgtggaaatcgagtgggagctgcagaaggaaaacagcaagcgctggaacccggagattcagtacacctccaactatgataagtcgactaatgtggactttgccgttgacagcgagggtgtttactctgagcctcgccctattggcactcgttacctcacccgtaatctg

SEQ ID NO: 1216 - protein, 735 aa, Artificial Sequence
  Description of Artificial Sequence: Synthetic polypeptide
  MOD_RES (162)..(162): Ser or Thr
  MOD_RES (168)..(168): Lys or Arg
  MOD_RES (224)..(224): Ala or Ser
  MOD_RES (310)..(310): Arg or Lys
  MOD_RES (410)..(410): Thr or Gln
  MOD_RES (446)..(446): Ser or Asn
  MOD_RES (461)..(461): Gln or Leu
  MOD_RES (471)..(471): Ala or Ser
  MOD_RES (708)..(708): Ala or Thr
MAADGYLPDWLEDNLSEGIREWWDLKPGAPKPKANQQKQDDGRGLVLPGYKYLGPFNGLDKGEPVNAADAAALEHDKAYDQQLKAGDNPYLRYNHADAEFQERLQEDTSFGGNLGRAVFQAKKRVLEPLGLVEEGAKTAPGKKRPVEQSPQEPDSSSGIGKXGQQPAXKRLNFGQTGDSESVPDPQPLGEPPAAPSGVGSNTMASGGGAPMADNNEGADGVGNXSGNWHCDSTWLGDRVITTSTRTWALPTYNNHLYKQISSQSGASNDNHYFGYSTPWGYFDFNRFHCHFSPRDWQRLINNNWGFRPKXLNFKLFNIQVKEVTTNDGTTTIANNLTSTVQVFTDSEYQLPYVLGSAHQGCLPPFPADVFMIPQYGYLTLNNGSQAVGRSSFYCLEYFPSQMLRTGNNFXFSYTFEDVPFHSSYAHSQSLDRLMNPLIDQYLYYLXRTQTTSGTAQNRELXFSQAGPSSMXNQAKNWLPGPCYRQQRVSKTANDNNNSNFAWTGATKYHLNGRDSLVNPGPAMASHKDDEDKFFPMSGVLIFGKQGAGASNVDLDNVMITDEEEIKTTNPVATEQYGTVATNLQSSNTAPATGTVNSQGALPGMVWQDRDVYLQGPIWAKIPHTDGHFHPSPLMGGFGLKHPPPQILIKNTPVPANPPTTFSPAKFASFITQYSTGQVSVEIEWELQKENSKRWNPEIQYTSNYNKSXNVDFTVDTNGVYSEPRPIGTRYLTRNL

SEQ ID NO: 1217 - DNA, 2205 bp, Artificial Sequence
  Description of Artificial Sequence: Synthetic polynucleotide
  misc_feature (484)..(486): This region may encompass "tca" or "aca"
  misc_feature (502)..(504): This region may encompass "aaa" or "aga"
  misc_feature (670)..(672): This region may encompass "gcc" or "tcc"
  misc_feature (928)..(930): This region may encompass "aga" or "aaa"
  misc_feature (1228)..(1230): This region may encompass "acc" or "cag"
  misc_feature (1336)..(1338): This region may encompass "agc" or "aac"
  misc_feature (1381)..(1383): This region may encompass "cag" or "ctg"
  misc_feature (1411)..(1413): This region may encompass "gct" or "tct"
  misc_feature (2122)..(2124): This region may encompass "gcc" or "acc"
atggctgccgatggttatcttccagattggctcgaggacaacctctctgagggcattcgcgagtggtgggacttgaaacctggagccccgaaacccaaagccaaccagcaaaagcaggacgacggccggggtctggtgcttcctggctacaagtacctcggacccttcaacggactcgacaagggggagcccgtcaacgcggcggatgcagcggccctcgagcacgacaaggcctacgaccagcagctcaaagcgggtgacaatccgtacctgcggtataaccacgccgacgccgagtttcaggagcgtctgcaagaagatacgtcttttgggggcaacctcgggcgagcagtcttccaggccaagaagagggttctcgaacctcttggtctggttgaggaaggtgctaagacggctcctggaaagaaacgtccggtagagcagtcgccacaagagccagactcctcctcgggcattggcaagnnnggccagcagcccgctnnnaagagactcaattttggtcagactggcgactcagagtcagtccccgacccacaacctctcggagaacctccagcagccccctctggtgtgggatctaatacaatggcttcaggcggtggcgcaccaatggcagacaataacgaaggcgccgacggagtgggtaatnnntcaggaaattggcattgcgattccacatggctgggcgacagagtcatcaccaccagcacccgaacatgggccttgcccacctataacaaccacctctacaagcaaatctccagtcaatcaggggccagcaacgacaaccactacttcggctacagcaccccctgggggtattttgatttcaacagattccactgccatttctcaccacgtgactggcagcgactcatcaacaacaattggggattccggcccaagnnnctcaacttcaagctcttcaacatccaagtcaaggaggtcacgacgaatgatggcaccacgaccatcgctaataaccttaccagcacggttcaagtcttcacggactcggagtaccagttgccgtacgtcctcggctctgcgcaccagggctgcctccctccgttcccggcggacgtgttcatgattccgcagtacggctacctaacgctcaacaatggcagccaggcagtgggacggtcatccttttactgcctggaatatttcccatcgcagatgctgagaacgggcaataactttnnnttcagctacaccttcgaggacgtgcctttccacagcagctacgcgcacagccagagcctggaccggctgatgaatcctctcatcgaccagtacctgtattacctgnnnagaactcagactacgtccggaactgcccaaaacagggagttgnnntttagccaggcgggtccatctagcatgnnnaatcaggccaaaaactggctacctggaccctgttaccggcagcagcgcgtttctaaaacagcaaatgacaacaacaacagcaactttgcctggactggtgctacaaaatatcaccttaatgggcgtgattctttagtcaaccctggccctgctatggcctcacacaaagacgacgaagacaagttctttcccatgagcggtgtcttgatttttggaaagcagggcgccggagcttcaaacgttgatttggacaatgtcatgatcacagacgaagaggaaatcaaaaccactaaccccgtggccaccgaacaatatgggactgtggcaaccaatctccagagcagcaacacagcccctgcgaccggaactgtgaattctcagggagccttacctggaatggtgtggcaagacagagacgtatacctgcagggtcctatttgggccaaaattcctcacacggatggacactttcacccgtctcctctcatgggcggctttggacttaagcacccgcctcctcagatcctcatcaaaaacacgcctgttcctgcgaatcctccgacaacgttttcgcctgcaaagtttgcttcattcatcacccagtattccacaggacaagtgagcgtggagattgaatgggagctgcagaaagaaaacagcaaacgctggaatcccgaaatacagtatacatctaactataataaatctnnnaacgttgatttcactgtggacaccaatggagtttatagtgagcctcgccccattggcacccgttacctcacccgtaacctg

SEQ ID NO: 1218 - protein, 735 aa, Artificial Sequence
  Description of Artificial Sequence: Synthetic polypeptide
  MOD_RES (42)..(42): Gly or Ser
  MOD_RES (168)..(168): Arg or Lys
  MOD_RES (310)..(310): Lys or Arg
  MOD_RES (410)..(410): Thr or Gln
  MOD_RES (446)..(446): Ser or Arg
  MOD_RES (461)..(461): Gln or Leu
  MOD_RES (471)..(471): Ala or Ser
  MOD_RES (475)..(475): Lys or Arg
  MOD_RES (504)..(504): Gly or Ala
  MOD_RES (539)..(539): Val or Asn
MAADGYLPDWLEDNLSEGIREWWDLKPGAPQPKANQQHQDDXRGLVLPGYKYLGPFNGLDKGEPVNEADAAALEHDKAYDQQLKAGDNPYLKYNHADAEFQERLQEDTSFGGNLGRAVFQAKKRVLEPLGLVEEAAKTAPGKKRPVEQSPQEPDSSSGIGKSGQQPAXKRLNFGQTGDSESVPDPQPLGEPPAAPSGVGSNTMASGGGAPMADNNEGADGVGNSSGNWHCDSTWLGDRVITTSTRTWALPTYNNHLYKQISSQSGASNDNHYFGYSTPWGYFDFNRFHCHFSPRDWQRLINNNWGFRPKXLNFKLFNIQVKEVTQNDGTTTIANNLTSTVQVFTDSEYQLPYVLGSAHQGCLPPFPADVFMIPQYGYLTLNNGSQAVGRSSFYCLEYFPSQMLRTGNNFXFSYTFEDVPFHSSYAHSQSLDRLMNPLIDQYLYYLXRTQTTSGTTQQSRLXFSQAGPSSMXQQAXNWLPGPCYRQQRVSKTANDNNNSNFAWTXATKYHLNGRDSLVNPGPAMASHKDDEEKFFPMHGXLIFGKQGTGASNVDLDNVMITDEEEIRTTNPVATEQYGTVATNLQSSNTAPATGTVNSQGALPGMVWQDRDVYLQGPIWAKIPHTDGHFHPSPLMGGFGLKHPPPQILIKNTPVPANPPTTFSPAKFASFITQYSTGQVSVEIEWELQKENSKRWNPEIQYTSNYNKSVNVDFTVDTNGVYSEPRPIGTRYLTRNL

SEQ ID NO: 1219 - DNA, 2205 bp, Artificial Sequence
  Description of Artificial Sequence: Synthetic polynucleotide
  misc_feature (124)..(126): This region may encompass "ggt" or "agt"
  misc_feature (502)..(504): This region may encompass "aga" or "aaa"
  misc_feature (928)..(930): This region may encompass "aaa" or "aga"
  misc_feature (1228)..(1230): This region may encompass "aca" or "cag"
  misc_feature (1336)..(1338): This region may encompass "agc" or "aga"
  misc_feature (1381)..(1383): This region may encompass "caa" or "ctc"
  misc_feature (1411)..(1413): This region may encompass "gct" or "tct"
  misc_feature (1423)..(1425): This region may encompass "aaa" or "aga"
  misc_feature (1510)..(1512): This region may encompass "ggg" or "gcg"
  misc_feature (1615)..(1617): This region may encompass "gtt" or "gac"
atggctgctgacggttatcttccagattggctcgaggacaacctttctgaaggcattcgtgagtggtgggatctgaaacctggagcccctcaacccaaagcgaaccaacaacaccaggacgacnnncggggtcttgtgcttccgggttacaaatacctcggaccctttaacggactcgacaaaggagagccggtcaacgaggcggacgcggcagccctcgaacacgacaaagcttacgaccagcagctcaaggccggtgacaacccgtacctcaagtacaaccacgccgacgccgagtttcaggagcgtcttcaagaagatacgtcttttgggggcaaccttggcagagcagtcttccaggccaaaaagagggtccttgagcctcttggtctggttgaggaagcagctaaaacggctcctggaaagaagaggcctgtagaacagtctcctcaggaaccggactcatcatctggtattggcaaatcgggccaacagcctgccnnnaaaagactaaatttcggtcagactggagactcagagtcagtcccagaccctcaacctctcggagaaccaccagcagccccctcaggtgtgggatctaatacaatggcttcaggcggtggcgcaccaatggcagacaataacgagggtgccgatggagtgggtaattcctcaggaaattggcattgcgattccacatggctgggcgacagagtcatcaccaccagcaccagaacctgggccctgcccacttacaacaaccatctctacaagcaaatctccagccaatcaggagcttcaaacgacaaccactactttggctacagcaccccttgggggtattttgactttaacagattccactgccacttctcaccacgtgactggcagcgactcattaacaacaactggggattccggcccaagnnnctcaacttcaagctcttcaacatccaagttaaagaggtcacgcagaacgatggcacgacgactattgccaataaccttaccagcacggttcaagtgtttacggactcggagtatcagctcccgtacgtgctcgggtcggcgcaccaaggctgtctcccgccgtttccagcggacgtcttcatgatccctcagtatggatacctcaccctgaacaacggaagtcaagcggtgggacgctcatccttttactgcctggagtacttcccttcgcagatgctaaggactggaaataacttcnnnttcagctataccttcgaggatgtaccttttcacagcagctacgctcacagccagagtttggatcgcttgatgaatcctcttattgatcagtatctgtactacctgnnnagaacgcaaacaacctctggaacaacccaacaatcacggctgnnntttagccaggctgggccttcgtctatgnnncagcaggccnnnaattggctacctgggccctgctaccggcaacagagagtttcaaagactgctaacgacaacaacaacagtaactttgcttggacannngccaccaaatatcatctcaatggccgcgactcgctggtgaatccaggaccagctatggccagtcacaaggacgatgaagaaaaatttttccctatgcacggcnnnctaatatttggcaaacaagggacaggggcaagtaacgtagatttagataatgtaatgattacggatgaagaagagattcgtaccaccaatcctgtggcaacagagcagtatggaactgtggcaactaacttgcagagctcaaatacagctcccgcgactggaactgtcaatagtcagggggccttacctggcatggtgtggcaagatcgtgacgtgtaccttcaaggacctatctgggcaaagattcctcacacggatggacactttcatccttctcctctgatgggaggctttggactgaaacatccgcctcctcaaatcttgatcaaaaatactccggtaccggcaaatcctccgacgactttcagcccggccaagtttgcttcatttatcactcagtactccactggacaggtcagcgtggaaattgagtgggagctacagaaagaaaacagcaaacgttggaatccagagattcagtacacttccaactacaacaagtctgttaatgtggactttactgtagacactaatggtgtttatagtgaacctcgccctattggaacccggtatctcacacgaaacttg

SEQ ID NO: 1220 - protein, 736 aa, Artificial Sequence; identical to SEQ ID NO: 928
  Description of Artificial Sequence: Synthetic polypeptide

SEQ ID NO: 1221 - protein, 736 aa, Artificial Sequence; identical to SEQ ID NO: 929
  Description of Artificial Sequence: Synthetic polypeptide

SEQ ID NO: 1222 - protein, 736 aa, Artificial Sequence; identical to SEQ ID NO: 930
  Description of Artificial Sequence: Synthetic polypeptide

SEQ ID NO: 1223 - protein, 736 aa, Artificial Sequence; identical to SEQ ID NO: 931
  Description of Artificial Sequence: Synthetic polypeptide

SEQ ID NO: 1224 - protein, 736 aa, Artificial Sequence; identical to SEQ ID NO: 932
  Description of Artificial Sequence: Synthetic polypeptide

SEQ ID NO: 1225 - protein, 736 aa, Artificial Sequence; identical to SEQ ID NO: 933
  Description of Artificial Sequence: Synthetic polypeptide

SEQ ID NO: 1226 - protein, 736 aa, Artificial Sequence; identical to SEQ ID NO: 934
  Description of Artificial Sequence: Synthetic polypeptide

SEQ ID NO: 1227 - protein, 736 aa, Artificial Sequence; identical to SEQ ID NO: 935
  Description of Artificial Sequence: Synthetic polypeptide

SEQ ID NO: 1228 - DNA, 2211 bp, Artificial Sequence; identical to SEQ ID NO: 936
  Description of Artificial Sequence: Synthetic polynucleotide

SEQ ID NO: 1229 - protein, 738 aa, Artificial Sequence; identical to SEQ ID NO: 16
  Description of Artificial Sequence: Synthetic polypeptide

SEQ ID NO: 1230 - protein, 738 aa, Artificial Sequence; identical to SEQ ID NO: 16
  Description of Artificial Sequence: Synthetic polypeptide

SEQ ID NO: 1231 - protein, 738 aa, Artificial Sequence
  Description of Artificial Sequence: Synthetic polypeptide
  MOD_RES (157)..(157): Ser or Thr
  MOD_RES (169)..(169): Lys or Arg
  MOD_RES (457)..(457): Ala or Gly
  MOD_RES (463)..(463): Gln or Ala
  MOD_RES (508)..(508): Thr or Ala
  MOD_RES (510)..(510): Tyr or Phe
  MOD_RES (511)..(511): His or Lys
  MOD_RES (558)..(558): Gln or Asn
  MOD_RES (585)..(585): Asn or His
  MOD_RES (587)..(587): Ser or Ala
MAADGYLPDWLEDNLSEGIREWWDLKPGAPKPKANQQKQDDGRGLVLPGYKYLGPFNGLDKGEPVNAADAAALEHDKAYDQQLKAGDNPYLRYNHADAEFQERLQEDTSFGGNLGRAVFQAKKRVLEPLGLVEEGAKTAPGKKRPVEQSPQEPDSSXLGIGKTGQQPAXKRLNFGQTGDSESVPDPQPLGEPPAAPSGVGSNTMASGGGAPMADNNEGADGVGNSSGNWHCDSTWLGDRVITTSTRTWALPTYNNHLYKQISNGTSGGSTNDNTYFGYSTPWGYFDFNRFHCHFSPRDWQRLINNNWGFRPKRLNFKLFNIQVKEVTTNEGTKTIANNLTSTVQVFTDSEYQLPYVLGSAHQGCLPPFPADVFMIPQYGYLTLNNGSQAVGRSSFYCLEYFPSQMLRTGNNFQFSYTFEDVPFHSSYAHSQSLDRLMNPLIDQYLYYLSRTQTTGTXGTQTLXFSQAGPSSMANQARNWVPGPCYRQQRVSTTTNQNNNSNFAWTGAXKXXLNGRDSLMNPGVAMASHKDDEDRFFPSSGVLIFGKQGAGNDNVDYSXVMITNEEEIKTTNPVATEEYGAVATNXQXLANTQAQTGLVHNQGVLPGMVWQNRDVYLQGPIWAKIPHTDGNFHPSPLMGGFGLKHPPPQILIKNTPVPADPPTTFNQAKLNSFITQYSTGQVSVEIEWELQKENSKRWNPEIQYTSNYYKSTNVDFAVNTEGVYSEPRPIGTRYLTRNL

SEQ ID NO: 1232 - DNA, 2211 bp, Artificial Sequence
  Description of Artificial Sequence: Synthetic polynucleotide
  misc_feature (469)..(471): This region may encompass "tcg" or "acg"
  misc_feature (502)..(504): This region may encompass "aaa" or "aga"
  misc_feature (1366)..(1368): This region may encompass "gca" or "gga"
  misc_feature (1384)..(1386): This region may encompass "caa" or "gca"
  misc_feature (1519)..(1521): This region may encompass "acc" or "gcc"
  misc_feature (1525)..(1527): This region may encompass "tat" or "ttt"
  misc_feature (1528)..(1530): This region may encompass "cac" or "aaa"
  misc_feature (1669)..(1671): This region may encompass "caa" or "aac"
  misc_feature (1750)..(1752): This region may encompass "aac" or "cac"
  misc_feature (1756)..(1758): This region may encompass "tcc" or "gcc"
atggctgccgatggttatcttccagattggctcgaggacaacctctctgagggcattcgcgagtggtgggacttgaaacctggagccccgaaacccaaagccaaccagcaaaagcaggacgacggccggggtctggtgcttcctggctacaagtacctcggacccttcaacggactcgacaagggggagcccgtcaacgcggcggacgcagcggccctcgagcacgacaaagcctacgaccagcagctcaaagcgggtgacaatccgtacctgcggtataatcacgccgacgccgagtttcaggagcgtctgcaagaagatacgtcttttgggggcaacctcgggcgagcagtcttccaggccaagaagcgggttctcgaacctctcggtctggttgaggaaggcgctaagacggctcctggaaagaagaggccggtagagcagtcgccacaagagccagactcctccnnnggcatcggcaagacaggccagcagcccgctnnnaagagactcaattttggtcagactggcgactcagagtcagtccccgacccacaacctctcggagaacctccagcagccccctcaggtgtgggatctaatacaatggcttcaggcggtggcgctccaatggcagacaataacgaaggcgccgacggagtgggtaattcctcgggaaattggcattgcgattccacatggctgggggacagagtcatcaccaccagcacccgaacctgggccctgcccacctacaacaaccacctctacaagcaaatctccaacggcacctcgggaggaagcaccaacgacaacacctattttggctacagcaccccctgggggtattttgacttcaacagattccactgtcacttttcaccacgtgactggcaacgactcatcaacaacaattggggattccggcccaaaagactcaacttcaagctgttcaacatccaggtcaaggaagtcacgacgaacgaaggcaccaagaccatcgccaataatctcaccagcaccgtgcaggtctttacggactcggagtaccagttaccgtacgtgctaggatccgctcaccagggatgtctgcctccgttcccggcggacgtcttcatgattcctcagtacggctatttaactttaaacaatggaagccaagccgtgggacgttcctccttctactgtctggagtatttcccatcgcagatgctgagaaccggcaacaactttcagttcagctacaccttcgaggacgtgcctttccacagcagctacgcgcacagccagagcctggacaggctgatgaatcccctcatcgaccagtacctgtactacctgtccagaacgcaaacgactggaactnnngggacgcagactctgnnnttcagccaagcgggtcctagctcaatggccaaccaggctagaaattgggtgcccggaccttgctaccggcagcagcgcgtctccacgacaaccaaccagaacaacaacagcaactttgcctggacgggagctnnnaagnnnnnnctgaacggccgagactctctaatgaatccgggcgtggcaatggcttcccacaaggatgacgaggaccgcttcttcccttcgagcggggtcctgatttttggcaagcaaggagccgggaacgataatgtggattacagcnnngtgatgattacaaatgaggaagaaatcaagactaccaaccccgtggccacagaagaatatggagcagtggccaccaacnnncagnnngccaatacgcaggcgcagaccggactcgtgcacaaccagggggtgcttcccggcatggtgtggcagaatagagacgtgtacctgcagggtcccatctgggccaaaattcctcacacggacggcaactttcacccgtctcccctgatgggcggctttggactgaagcacccgcctcctcaaattctcatcaagaacacaccggttccagcggacccgccgactaccttcaaccaggccaagctgaactctttcatcacgcagtacagcaccggacaggtcagcgtggaaatcgagtgggagctgcagaaagaaaacagcaaacgctggaatccagagattcaatacacttccaactactacaaatctacaaatgtggactttgctgtcaacacggagggggtttatagcgagcctcgccccattggcacccgttacctcacccgcaacctgtaa

SEQ ID NO: 1233 - protein, 733 aa, Artificial Sequence; identical to SEQ ID NO: 432
  Description of Artificial Sequence: Synthetic polypeptide

SEQ ID NO: 1234 - DNA, 4472 bp, Artificial Sequence
  Description of Artificial Sequence: Synthetic polynucleotide
ctccatcactaggggtaaccgcgaagcgcctcccacgctgccgcgtcagcgctgacgtaaattacgtcataggggagtggtcctgtattagctgtcacgtgagtgcttttgcgacattttgcgacaccacgtggccattcatggtatatatggccgagtgagcgagcaggatctccattttgaccgcgaaatttgaacgagcagcagccatgccgggcttctacgagatcgtgcttaaggtgccgagcgacctggacgagcacctgccgggcatttctgactcgtttgtgaactgggtggcagagaaggaatgggagctgcccccggattctgacatggatcggaatctgattgagcaggcacccctgaccgtggccgagaagctacagcgcgacttcctggtccaatggcgccgcgtgagtaaggccccggaggccctcttctttgttcagttcgagaagggcgagtcctacttccacctccatattctggtagagaccacgggggtcaaatccatggtgctgggccgcttcctgagtcagattcgggacaagctggtgcagaccatctaccgcgggatcgagccgaccctgcccaactggttcgcggtgacaaagacgcgtaatggcgccggaggggggaacaaggtggtggacgagtgctacatccccaactacctgctgcccaagactcagcccgagctgcagtgggcgtggactaacatggaggagtatataagcgcgtgcttgaacctggccgagcgcaaacggctcgtggcgcagcacctgacccacgtcagccagacccaggagcagaacaaggagaatctgaacccgaattctgacgcgcctgtcatccggtcaaaaacctccgcgcgctacatggagctggtcgggtggctggtggaccggggcatcacctccgagaagcagtggatccaggaggaccaggcctcgtacatctccttcaacgccgcctccaactcgcggtctcagatcaaggccgcgctggacaatgccggcaagatcatggcgctgaccaaatccgcgcccgactacctggtaggccccgctctgcccgcggacattaaatccaaccgcatctaccgcatcctggagctgaatggctacgaccctgcctacgccggttccgtctttctcggctgggcccagaaaaagtttggcaaaaggaacaccatctggctgtttgggccggccaccacgggcaagaccaacatcgcggaagccatcgcccacgccgtgcccttctacggctgcgtcaactggaccaatgagaactttcccttcaacgattgcgtcgacaagatggtgatctggtgggaggagggcaagatgacggccaaggtcgtggagtccgccaaggccattctcggcggcagcaaggtgcgcgtggaccaaaagtgcaagtcgtccgcccagatcgatcccacccccgtgatcgtcacctccaacaccaacatgtgcgccgtgattgacgggaacagcaccaccttcgagcaccagcagccgttgcaggaccggatgttcaaatttgaacttacccgccgtctggagcacgactttggcaaggtgacaaagcaggaagtcaaagagttcttccgctgggcgcaggatcacgtgaccgaggtggcgcatgagttctacgtcagaaagggtggagctaacaaaagacccgcccccgatgacgcggatataagcgagcccaagcgggcctgcccctcagtcgcggatccatcgacgtcagacgcggaaggagctccggtggactttgccgacaggtaccaaaacaaatgttctcgtcacgcgggcatgcttcagatgctgtttccctgcaaaacatgcgagagaatgaatcagaatttcaacatttgcttcacgcacgggaccagagactgttcagaatgtttccctggcgtgtcagaatctcaaccggtcgtcagaaaaaagacgtatcggaaactctgtgcgattcatcatctgctggggcgggcacccgagattgcttgctcggcctgcgacctggtcaacgtggacctggatgactgtgtttctgagcaataaatgacttaaaccaggtatggctgccgatggttatcttccagattggctcgaggacaacctctctgagggcattcgcgagtggtgggacctgaaacctggagccccgaaacccaaagccaaccagcaaaagcaggacaacggccggggtctggtgcttcctggctacaagtacctcggacccttcaacggactcgacaagggggagcccgtcaacgcggcggacgcagcggccctcgagcacgacaaggcctacgaccagcagctccaagcgggtgacaatccgtacctgcggtataatcacgccgacgccgagtttcaggagcgtctgcaagaagatacgtcttttgggggcaacctcgggcgcgcagtcttccaggccaaaaagcgggttctcgaacctctgggcctggttgaatcgccggttaagacggctcctggaaagaagagaccggtagagccatcaccccagcgctctccagactcctctacgggcatcggcaagaaaggccagcagcccgcaaaaaagagactcaattttgggcagactggcgactcagagtcagtccccgaccctcaaccaatcggagaaccaccagcaggcccctctggtctgggatctggtacaatggctgcaggcggtggcgctccaatggcagacaataacgaaggcgccgacggagtgggtagttcctcaggaaattggcattgcgattccacatggctgggcgacagagtcatcaccaccagcacccgcacctgggccctgcccacctacaacaaccacctctacaagcaaatctccaacgggacctcgggaggaagcaccaacgacaacacctacttcggctacagcaccccctgggggtattttgacttcaacagattccactgccacttttcaccacgtgactggcagcgactcatcaacaacaactggggattccggcccaagaggctcaacttcaagctcttcaacatccaagtcaaggaggtcacgcagaatgaaggcaccaagaccatcgccaataaccttaccagcacgattcaggtctttacggactcggaataccagctcccgtacgtgctcggctcggcgcaccagggctgcctgcctccgttcccggcggacgtcttcatgattcctcagtacgggtacctgactctgaacaatggcagtcaggctgtgggccggtcgtccttctactgcctggagtactttccttctcaaatgctgagaacgggcaacaactttgaattcagctacaacttcgaggacgtgcccttccacagcagctacgcgcacagccagagcctggaccggctgatgaaccctctcatcgaccagtacttgtactacctgtcccggactcaaagcacgggcggtactgcaggaactcagcagttgctattttctcaggccgggcctaacaacatgtcggctcaggccaagaactggctacccggtccctgctaccggcagcaacgcgtctccacgacactgtcgcagaacaacaacagcaactttgcctggacgggtgccaccaagtatcatctgaatggcagagactctctggtgaatcctggcgttgccatggctacccacaaggacgacgaagagcgattttttccatccagcggagtcttaatgtttgggaaacagggagctggaaaagacaacgtggactatagcagcgtgatgctaaccagcgaggaagaaataaagaccaccaacccagtggccacagaacagtacggcgtggtggccgataacctgcaacagcaaaacgccgctcctattgtaggggccgtcaatagtcaaggagccttacctggcatggtgtggcagaaccgggacgtgtacctgcagggtcccatctgggccaagattcctcatacggacggcaactttcatccctcgccgctgatgggaggctttggactgaagcatccgcctcctcagatcctgattaaaaacacacctgttcccgcggatcctccgaccaccttcactaaggccaagctggcttctttcatcacgcagtacagtaccggccaggtcagcgtggagatcgagtgggagctgcagaaggagaacagcaaacgctggaacccagagattcagtacacttccaactactacaaatctacaaatgtggactttgctgtcaatactgagggtacttattccgagcctcgccccattggcacccgttacctcacccgtaatctgtaattacatgttaatcaataaaccggttaattcgtttcagttgaactttggtctcctgtccttcttatcttatcggttaccatagaaactggttacttattaactgcttggtgcgcttcgcgataaaagacttacgtcatcgggttacccctagtgatgga

SEQ ID NO: 1235 - DNA, 2208 bp, Artificial Sequence
  Description of Artificial Sequence: Synthetic polynucleotide
atggctgccgatggttatcttccagattggctcgaggacactctctctgaaggaataagacagtggtggaagctcaaacctggcccaccaccaccaaagcccgcagagcggcataaggacgacagcaggggtcttgtgcttcctgggtacaagtacctcggacccttcaacggactcgacaagggagagccggtcaacgaggcagacgccgcggccctcgagcacgacaaagcctacgaccggcagctcgacagcggagacaacccgtacctcaagtacaaccacgccgacgcggagtttcaggagcgccttaaagaagatacgtcttttgggggcaacctcggacgagcagtcttccaggcgaaaaagagggttcttgaacctctgggcctggttgaggaacctgttaagaaggctccgggaaaaaagaggccggtagagcactctcctgtggagccagactcctcctcgggaaccggaaaggcgggccagcagcctgcaagaaaaagattgaattttggtcagactggagacgcagactcagtacctgacccccagcctctcggacagccaccagcagccccctctggtctgggaactaataccatggctacaggcagtggcgcaccaatggcagacaataacgagggtgccgacggagtgggtaattcctcgggaaattggcattgcgattccacatggatgggcgacagagtcatcaccaccagcacccgaacctgggccctgcccacctacaacaaccacctctacaaacaaatttccagccaatcaggagcctcgaacgacaatcactactttggctacagcaccccttgggggtattttgacttcaacagattccactgccacttttcaccacgtgactggcaaagactcatcaacaacaactggggattccgacccaagagactcaacttcaagctctttaacattcaagtcaaagaggtcacgcagaatgacggtacgacgacgattgccaataaccttaccagcacggttcaggtgtttactgactcggagtaccagctcccgtacgtcctcggctcggcgcatcaaggatgcctcccgccgttcccagcagacgtcttcatggtgccacagtatggatacctcaccctgaacaacgggagtcaggcagtaggacgctcttcattttactgcctggagtactttccttctcagatgctgcgtaccggaaacaactttaccttcagctacacttttgaggacgttcctttccacagcagctacgctcacagccagagtctggaccgtctcatgaatcctctcatcgaccagtacctgtattacttgagcagaacaaacactccaagtggaaccaccacgcagtcaaggcttcagttttctcaggccggagcgagtgacattcgggaccagtctaggaactggcttcctggaccctgttaccgccagcagcgagtatcaaagacatctgcggataacaacaacagtgaatactcgtggactggagctaccaagtaccacctcaatggcagagactctctggtgaatccgggcccggctatggcaagccacaaggacgatgaagaaaagttttttcctcagagcggggttctcatctttgggaagcaaggctcagagaaaacaaatgtggacattgaaaaggtcatgattacagacgaagaggaaatcaggacaaccaatcccgtggctacggagcagtatggttctgtatctaccaacctccagagaggcaacagacaagcagctaccgcagatgtcaacacacaaggcgttcttccaggcatggtctggcaggacagagatgtgtaccttcaggggcccatctgggcaaagattccacacacggacggacattttcacccctctcccctcatgggtggattcggacttaaacaccctcctccacagattctcatcaagaacaccccggtgcctgcgaatccttcgaccaccttcagtgcggcaaagtttgcttccttcatcacacagtactccacgggacaggtcagcgtggagatcgagtgggagctgcagaaggaaaacagcaaacgctggaatcccgaaattcagtacacttccaactacaacaagtctgttaatgtggactttactgtggacactaatggcgtgtattcagagcctcgccccattggcaccagatacctgactcgtaatctgtaa

SEQ ID NO: 1236 - protein, 735 aa, Artificial Sequence
  Description of Artificial Sequence: Synthetic polypeptide
MAADGYLPDWLEDTLSEGIRQWWKLKPGPPPPKPAERHKDDSRGLVLPGYKYLGPFNGLDKGEPVNEADAAALEHDKAYDRQLDSGDNPYLKYNHADAEFQERLKEDTSFGGNLGRAVFQAKKRVLEPLGLVEEPVKKAPGKKRPVEHSPVEPDSSSGTGKAGQQPARKRLNFGQTGDADSVPDPQPLGQPPAAPSGLGTNTMATGSGAPMADNNEGADGVGNSSGNWHCDSTWMGDRVITTSTRTWALPTYNNHLYKQISSQSGASNDNHYFGYSTPWGYFDFNRFHCHFSPRDWQRLINNNWGFRPKRLNFKLFNIQVKEVTQNDGTTTIANNLTSTVQVFTDSEYQLPYVLGSAHQGCLPPFPADVFMVPQYGYLTLNNGSQAVGRSSFYCLEYFPSQMLRTGNNFTFSYTFEDVPFHSSYAHSQSLDRLMNPLIDQYLYYLSRTNTPSGTTTQSRLQFSQAGASDIRDQSRNWLPGPCYRQQRVSKTSADNNNSEYSWTGATKYHLNGRDSLVNPGPAMASHKDDEEKFFPQSGVLIFGKQGSEKTNVDIEKVMITDEEEIRTTNPVATEQYGSVSTNLQRGNRQAATADVNTQGVLPGMVWQDRDVYLQGPIWAKIPHTDGHFHPSPLMGGFGLKHPPPQILIKNTPVPANPSTTFSAAKFASFITQYSTGQVSVEIEWELQKENSKRWNPEIQYTSNYNKSVNVDFTVDTNGVYSEPRPIGTRYLTRNL

SEQ ID NO: 1237 - DNA, 8376 bp, Artificial Sequence
  Description of Artificial Sequence: Synthetic polynucleotide
aattcccatcatcaataatataccttattttggattgaagccaatatgataatgagggggtggagtttgtgacgtggcgcggggcgtgggaacggggcgggtgacgtagtagtctctagagtcctgtattagaggtcacgtgagtgttttgcgacattttgcgacaccatgtggtcacgctgggtatttaagcccgagtgagcacgcagggtctccattttgaagcgggaggtttgaacgcgcagccaccacgccggggttttacgagattgtgattaaggtccccagcgaccttgacgggcatctgcccggcatttctgacagctttgtgaactgggtggccgagaaggaatgggagttgccgccagattctgacatggatctgaatctgattgagcaggcacccctgaccgtggccgagaagctgcagcgcgactttctgacggaatggcgccgtgtgagtaaggccccggaggcccttttctttgtgcaatttgagaagggagagagctacttccacatgcacgtgctcgtggaaaccaccggggtgaaatccatggttttgggacgtttcctgagtcagattcgcgaaaaactgattcagagaatttaccgcgggatcgagccgactttgccaaactggttcgcggtcacaaagaccagaaatggcgccggaggcgggaacaaggtggtggatgagtgctacatccccaattacttgctccccaaaacccagcctgagctccagtgggcgtggactaatatggaacagtatttaagcgcctgtttgaatctcacggagcgtaaacggttggtggcgcagcatctgacgcacgtgtcgcagacgcaggagcagaacaaagagaatcagaatcccaattctgatgcgccggtgatcagatcaaaaacttcagccaggtacatggagctggtcgggtggctcgtggacaaggggattacctcggagaagcagtggatccaggaggaccaggcctcatacatctccttcaatgcggcctccaactcgcggtcccaaatcaaggctgccttggacaatgcgggaaagattatgagcctgactaaaaccgcccccgactacctggtgggccagcagcccgtggaggacatttccagcaatcggatttataaaattttggaactaaacgggtacgatccccaatatgcggcttccgtctttctgggatgggccacgaaaaagttcggcaagaggaacaccatctggctgtttgggcctgcaactaccgggaagaccaacatcgcggaggccatagcccacactgtgcccttctacgggtgcgtaaactggaccaatgagaactttcccttcaacgactgtgtcgacaagatggtgatctggtgggaggaggggaagatgaccgccaaggtcgtggagtcggccaaagccattctcggaggaagcaaggtgcgcgtggaccagaaatgcaagtcctcggcccagatagacccgactcccgtgatcgtcacctccaacaccaacatgtgcgccgtgattgacgggaactcaacgaccttcgaacaccagcagccgttgcaagaccggatgttcaaatttgaactcacccgccgtctggatcatgactttgggaaggtcaccaagcaggaagtcaaagactttttccggtgggcaaaggatcacgtggttgaggtggagcatgaattctacgtcaaaaagggtggagccaagaaaagacccgcccccagtgacgcagatataagtgagcccaaacgggtgcgcgagtcagttgcgcagccatcgacgtcagacgcggaagcttcgatcaactacgcagacaggtaccaaaacaaatgttctcgtcacgtgggcatgaatctgatgctgtttccctgcagacaatgcgagagaatgaatcagaattcaaatatctgcttcactcacggacagaaagactgtttagagtgctttcccgtgtcagaatctcaacccgtttctgtcgtcaaaaaggcgtatcagaaactgtgctacattcatcatatcatgggaaaggtgccagacgcttgcactgcctgcgatctggtcaatgtggatttggatgactgcatctttgaacaataaatgatttaaatcaggtatggctgccgatggttatcttccagattggctcgaggacactctctctgaaggaataagacagtggtggaagctcaaacctggcccaccaccaccaaagcccgcagagcggcataaggacgacagcaggggtcttgtgcttcctgggtacaagtacctcggacccttcaacggactcgacaagggagagccggtcaacgaggcagacgccgcggccctcgagcacgacaaagcctacgaccggcagctcgacagcggagacaacccgtacctcaagtacaaccacgccgacgcggagtttcaggagcgccttaaagaagatacgtcttttgggggcaacctcggacgagcagtcttccaggcgaaaaagagggttcttgaacctctgggcctggttgaggaacctgttaagacggctccgggaaaaaagaggccggtagagcactctcctgtggagccagactcctcctcgggaaccggaaaggcgggccagcagcctgcaagaaaaagattgaattttggtcagactggagacgcagactcagtacctgacccccagcctctcggacagccaccagcagccccctctggtctgggaactaatacgatggctacaggcagtggcgcaccaatggcagacaataacgagggcgccgacggagtgggtaattcctcgggaaattggcattgcgattccacatggatgggcgacagagtcatcaccaccagcacccgaacctgggccctgcccacctacaacaaccacctctacaaacaaatttccagccaatcaggagcctcgaacgacaatcactactttggctacagcaccccttgggggtattttgacttcaacagattccactgccacttttcaccacgtgactggcaaagactcatcaacaacaactggggattccgacccaagagactcaacttcaagctctttaacattcaagtcaaagaggtcacgcagaatgacggtacgacgacgattgccaataaccttaccagcacggttcaggtgtttactgactcggagtaccagctcccgtacgtcctcggctcggcgcatcaaggatgcctcccgccgttcccagcagacgtcttcatggtgccacagtatggatacctcaccctgaacaacgggagtcaggcagtaggacgctcttcattttactgcctggagtactttccttctcagatgctgcgtaccggaaacaactttaccttcagctacacttttgaggacgttcctttccacagcagctacgctcacagccagagtctggaccgtctcatgaatcctctcatcgaccagtacctgtattacttgagcagaacaaacactccaagtggaaccaccacgcagtcaaggcttcagttttctcaggccggagcgagtgacattcgggaccagtctaggaactggcttcctggaccctgttaccgccagcagcgagtatcaaagacatctgcggataacaacaacagtgaatactcgtggactggagctaccaagtaccacctcaatggcagagactctctggtgaatccgggcccggccatggcaagccacaaggacgatgaagaaaagttttttcctcagagcggggttctcatctttgggaagcaaggctcagagaaaacaaatgtggacattgaaaaggtcatgattacagacgaagaggaaatcaggacaaccaatcccgtggctacggagcagtatggttctgtatctaccaacctccagagaggcaacagacaagcagctaccgcagatgtcaacacacaaggcgttcttccaggcatggtctggcaggacagagatgtgtaccttcaggggcccatctgggcaaagattccacacacggacggacattttcacccctctcccctcatgggtggattcggacttaaacaccctcctccacagattctcatcaagaacaccccggtacctgcgaatccttcgaccaccttcagtgcggcaaagtttgcttccttcatcacacagtactccacgggacaggtcagcgtggagatcgagtgggagctgcagaaggaaaacagcaaacgctggaatcccgaaattcagtacacttccaactacaacaagtctgttaatgtggactttactgtggacactaatggcgtgtattcagagcctcgccccattggcaccagatacctgactcgtaatctgtaattgcttgttaatcaataaaccgtttaattcgtttcagttgaactttggtctctgcgtatttctttcttatctagtttccatgctctagagtcctgtattagaggtcacgtgagtgttttgcgacattttgcgacaccatgtggtcacgctgggtatttaagcccgagtgagcacgcagggtctccattttgaagcgggaggtttgaacgcgcagccaccacggcggggttttacgagattgtgattaaggtccccagcgaccttgacgggcatctgcccggcatttctgacagctttgtgaactgggtggccgagaaggaatgggagttgccgccagattctgacatggatctgaatctgattgagcaggcacccctgaccgtggccgagaagctgcatcgctggcgtaatagcgaagaggcccgcaccgatcgcccttcccaacagttgcgcagcctgaatggcgaatggaattccagacgattgagcgtcaaaatgtaggtatttccatgagcgtttttcctgttgcaatggctggcggtaatattgttctggatattaccagcaaggccgatagtttgagttcttctactcaggcaagtgatgttattactaatcaaagaagtattgcgacaacggttaatttgcgtgatggacagactcttttactcggtggcctcactgattataaaaacacttctcaggattctggcgtaccgttcctgtctaaaatccctttaatcggcctcctgtttagctcccgctctgattctaacgaggaaagcacgttatacgtgctcgtcaaagcaaccatagtacgcgccctgtagcggcgcattaagcgcggcgggtgtggtggttacgcgcagcgtgaccgctacacttgccagcgccctagcgcccgctcctttcgctttcttcccttcctttctcgccacgttcgccggctttccccgtcaagctctaaatcgggggctccctttagggttccgatttagtgctttacggcacctcgaccccaaaaaacttgattagggtgatggttcacgtagtgggccatcgccctgatagacggtttttcgccctttgacgttggagtccacgttctttaatagtggactcttgttccaaactggaacaacactcaaccctatctcggtctattcttttgatttataagggattttgccgatttcggcctattggttaaaaaatgagctgatttaacaaaaatttaacgcgaattttaacaaaatattaacgtttacaatttaaatatttgcttatacaatcttcctgtttttggggcttttctgattatcaaccggggtacatatgattgacatgctagttttacgattaccgttcatcgattctcttgtttgctccagactctcaggcaatgacctgatagcctttgtagagacctctcaaaaatagctaccctctccggcatgaatttatcagctagaacggttgaatatcatattgatggtgatttgactgtctccggcctttctcacccgtttgaatctttacctacacattactcaggcattgcatttaaaatatatgagggttctaaaaatttttatccttgcgttgaaataaaggcttctcccgcaaaagtattacagggtcataatgtttttggtacaaccgatttagctttatgctctgaggctttattgcttaattttgctaattctttgccttgcctgtatgatttattggatgttggaattcctgatgcggtattttctccttacgcatctgtgcggtatttcacaccgcatatggtgcactctcagtacaatctgctctgatgccgcatagttaagccagccccgacacccgccaacacccgctgacgcgccctgacgggcttgtctgctcccggcatccgcttacagacaagctgtgaccgtctccgggagctgcatgtgtcagaggttttcaccgtcatcaccgaaacgcgcgagacgaaagggcctcgtgatacgcctatttttataggttaatgtcatgataataatggtttcttagacgtcaggtggcacttttcggggaaatgtgcgcggaacccctatttgtttatttttctaaatacattcaaatatgtatccgctcatgagacaataaccctgataaatgcttcaataatattgaaaaaggaagagtatgagtattcaacatttccgtgtcgcccttattcccttttttgcggcattttgccttcctgtttttgctcacccagaaacgctggtgaaagtaaaagatgctgaagatcagttgggtgcacgagtgggttacatcgaactggatctcaacagcggtaagatccttgagagttttcgccccgaagaacgttttccaatgatgagcacttttaaagttctgctatgtggcgcggtattatcccgtattgacgccgggcaagagcaactcggtcgccgcatacactattctcagaatgacttggttgagtactcaccagtcacagaaaagcatcttacggatggcatgacagtaagagaattatgcagtgctgccataaccatgagtgataacactgcggccaacttacttctgacaacgatcggaggaccgaaggagctaaccgcttttttgcacaacatgggggatcatgtaactcgccttgatcgttgggaaccggagctgaatgaagccataccaaacgacgagcgtgacaccacgatgcctgtagcaatggcaacaacgttgcgcaaactattaactggcgaactacttactctagcttcccggcaacaattaatagactggatggaggcggataaagttgcaggaccacttctgcgctcggcccttccggctggctggtttattgctgataaatctggagccggtgagcgtgggtctcgcggtatcattgcagcactggggccagatggtaagccctcccgtatcgtagttatctacacgacggggagtcaggcaactatggatgaacgaaatagacagatcgctgagataggtgcctcactgattaagcattggtaactgtcagaccaagtttactcatatatactttagattgatttaaaacttcatttttaatttaaaaggatctaggtgaagatcctttttgataatctcatgaccaaaatcccttaacgtgagttttcgttccactgagcgtcagaccccgtagaaaagatcaaaggatcttcttgagatcctttttttctgcgcgtaatctgctgcttgcaaacaaaaaaaccaccgctaccagcggtggtttgtttgccggatcaagagctaccaactctttttccgaaggtaactggcttcagcagagcgcagataccaaatactgtccttctagtgtagccgtagttaggccaccacttcaagaactctgtagcaccgcctacatacctcgctctgctaatcctgttaccagtggctgctgccagtggcgataagtcgtgtcttaccgggttggactcaagacgatagttaccggataaggcgcagcggtcgggctgaacggggggttcgtgcacacagcccagcttggagcgaacgacctacaccgaactgagatacctacagcgtgagctatgagaaagcgccacgcttcccgaagggagaaaggcggacaggtatccggtaagcggcagggtcggaacaggagagcgcacgagggagcttccagggggaaacgcctggtatctttatagtcctgtcgggtttcgccacctctgacttgagcgtcgatttttgtgatgctcgtcaggggggcggagcctatggaaaaacgccagcaacgcggcctttttacggttcctggccttttgctggccttttgctcacatgttctttcctgcgttatcccctgattctgtggataaccgtattaccgcctttgagtgagctgataccgctcgccgcagccgaacgaccgagcgcagcgagtcagtgagcgaggaagcggaagagcgcccaatacgcaaaccgcctctccccgcgcgttggccgattcattaatgca

SEQ ID NO: 1238 - DNA, 1085 bp, Artificial Sequence
  Description of Artificial Sequence: Synthetic polynucleotide
  modified_base (611)..(611): a, c, g, or t
  modified_base (640)..(640): a, c, g, or t
  modified_base (1039)..(1039): a, c, g, or t
tgcccacttacaacaaccatctctacaagcaaatctccagcvvmdcaggagctascaacgacaaccactactttggctacagcaccccttgggggtattttgactttaacagattccactgccacttctcaccacgtgactggcagcgactcattaacaacaactggggattccggcccaagaaactcagcttcaagctcttcaacatccaagttagaggggtcacgcagaacgatggcacgacgactattgccaataaccttaccagcacggttcaagtgtttacggactcggagtatcagctcccgtacgtgctcgggtcggcgcaccaaggctgtctcccgccgtttccagcggacgtcttcatggtccctcagtatggatacctcaccctgaacaacggaagtcaagcggtgggacgctcatccttttactgcctggagtacttcccttcgcagatgctaaggactggaaataacttccaattcagctataccttcgaggatgtaccttttcacagcagctacgctcacagccagagtttggatcgcttgatgaatcctcttattgatcagtatctgtactacctgaacagaacgcaargcamcvcnrgcggaacarccrvcmhsmrsvvsctgvngtttagccaggctgggcctcagtctatgtctttgcaggccagaaattggctacctgggccctgctaccggcaacagagactttcaamarycbmcrvcsrsaacaacaacagtrastttccttggmcagcggccagcamatatcatctcaatggccgcgactcgctggtgaatccaggaccagctatggccagtcacrrggacgatrmsgrsaratttttccctatgcacggcaatctaatatttggcaaasaarrcrscrvsrvarvcratrycgmsdwcgrsvrsgtaatgattacggatgaagaagagattcgtaccaccaatcctgtggcaacagagcagtatggaactgtggcaaataacttgcagrvsvvsmrsrvcvvscccacgdhtvvsrnsgtcvmscatcagggggccttacctggcatggtgtggcaagatcgt

SEQ ID NO: 1239 - protein, 620 aa, Artificial Sequence
  Description of Artificial Sequence: Synthetic polypeptide
  MOD_RES (263)..(264): Any naturally occurring amino acid
  MOD_RES (267)..(267): Any naturally occurring amino acid
  MOD_RES (450)..(453): Any naturally occurring amino acid
  MOD_RES (456)..(460): Any naturally occurring amino acid
  MOD_RES (462)..(462): Any naturally occurring amino acid
  MOD_RES (491)..(495): Any naturally occurring amino acid
  MOD_RES (500)..(500): Any naturally occurring amino acid
  MOD_RES (504)..(504): Any naturally occurring amino acid
  MOD_RES (508)..(508): Any naturally occurring amino acid
  MOD_RES (528)..(528): Any naturally occurring amino acid
  MOD_RES (531)..(533): Any naturally occurring amino acid
  MOD_RES (546)..(557): Any naturally occurring amino acid
  MOD_RES (586)..(590): Any naturally occurring amino acid
  MOD_RES (593)..(595): Any naturally occurring amino acid
  MOD_RES (597)..(597): Any naturally occurring amino acid
MAADGYLPDWLEDNLSEGIREWWALKPGVPQPKANQQHQDNRRGLVLPGYKYLGPGNGLDKGEPVNEADAAALEHDKAYDQQLKAGDNPYLKYNHADAEFQERLQEDTSFGGNLGRAVFQAKKRILEPLGLVEEAAKTAPGKKGAVDQSPQEPDSSSGVGKSGKQPARKRLNFGQTGDSESVPDPQPLGEPPAAPTSLGSNTMASGGGAPMADNNEGADGVGNSSGNWHCDSQWLGDRVITTSTRTWALPTYNNHLYKQISSXXGAXNDNHYFGYSTPWGYFDFNRFHCHFSPRDWQRLINNNWGFRPKKLSFKLFNIQVRGVTQNDGTTTIANNLTSTVQVFTDSEYQLPYVLGSAHQGCLPPFPADVFMVPQYGYLTLNNGSQAVGRSSFYCLEYFPSQMLRTGNNFQFSYTFEDVPFHSSYAHSQSLDRLMNPLIDQYLYYLNRTQXXXXGTXXXXXLXFSQAGPQSMSLQARNWLPGPCYRQQRLSXXXXXNNNSXFPWXAASXYHLNGRDSLVNPGPAMASHXDDXXXFFPMHGNLIFGKXXXXXXXXXXXXVMITDEEEIRTTNPVATEQYGTVANNLQXXXXXPTXXXVXHQGALPGMVWQDRDVYLQGPIWA

SEQ ID NO: 1240 - DNA, 1491 bp, Artificial Sequence
  Description of Artificial Sequence: Synthetic polynucleotide
accaccagcaccagaacctgggccctgcccacttacaacaaccatctctacaagcaaatctccagccaatcaggagcttcaaacgacaaccactactttggctacagcaccccttgggggtattttgactttaacagattccactgccacttctcaccacgtgactggcagcgactcattaacaacaactggggattccggcccaagaaactcagcttcaagctcttcaacatccaagttagaggggtcacgcagaacgatggcacgacgactattgccaataaccttaccagcacggttcaagtgtttacggactcggagtatcagctcccgtacgtgctcgggtcggcgcaccaaggctgtctcccgccgtttccagcggacgtcttcatggtccctcagtatggatacctcaccctgaacaacggaagtcaagcggtgggacgctcatccttttactgcctggagtacttcccttcgcagatgctaaggactggaaataacttccaattcagctataccttcgaggatgtaccttttcacagcagctacgctcacagccagagtttggatcgcttgatgaatcctcttattgatcagtatctgtactacctgaacagaacgcaaggaacaacctctggaacaaccaaccaatcacggctgctttttagccaggctgggcctcagtctatgtctttgcaggccagaaattggctacctgggccctgctaccggcaacagagactttcaaagactgctaacgacaacaacaacagtaactttccttggacagcggccagcaaatatcatctcaatggccgcgactcgctggtgaatccaggaccagctatggccagtcacaaggacgatgaagaaaaatttttccctatgcacggcaatctaatatttggcaaagaagggacaacggcaagtaacgcagaattagataatgtaatgattacggatgaagaagagattcgtaccaccaatcctgtggcaacagagcagtatggaactgtggcaaataacttgcagagctcaaatacagctcccacgactggaactgtcaatcatcagggggccttacctggcatggtgtggcaagatcgtgacgtctaccttcaaggacctatctgggcaaagattcctcacacggatggacactttcatccttctcctctgatgggaggctttggactgaaacatccgcctcctcaaatcatgatcaaaaatactccggtaccggcaaatcctccgacgactttcagcccggccaagtttgcttcatttatcactcagtactccactggacaggtcagcgtggaaattgagtgggagctacagaaagaaaacagcaaacgttggaatccagagattcagtacacttccaactacaacaagtctgttaatgtggactttactgtagacactaatggtgtttatagtgaacctcgccctattggaacccggtatctcacacgaaacttgtga

SEQ ID NO: 1241 - protein, 482 aa, Artificial Sequence
  Description of Artificial Sequence: Synthetic polypeptide
TTSTRTWALPTYNNHLYKQISSQSGASNDNHYFGYSTPWYFDFNRFHCHFSPRDWQRLNNNWGFRPKKLSFKLFNIQRGVTQNDGTTTIANNLTSTQVFTDSEYQLPYVLGSAHQCLPPFPADVFMVPQYGYLTNNGSQAVGRSSFYCLEYFPQMLRTGNNFQFSYTFEDVPHSSYAHSQSLDRLMNPLIDYLYYLNRTQGTTSGTTNQSLLFSQAGPQSMSLQARNWLGPCYRQQRLSKTANDNNNSFPWTAASKYHLNGRDSLVNGPAMASHKDDEEKFFPMHGLIFGKEGTTASNAELDNVMITDEEEIRTTNPVATEQYGTVANNLQSSNTAPTTGTVNHQGALPGMVWQDRDVYLQGPIWAKIPHTDGHFHPSPLMGGFGLKHPPPQIMIKNTPVPANPPTTFSPAKFASFITQYSTGQVSVEIEWELQKENSKRWNPEIQYTSNYNKSVNVDFTVDTNGVYSEPRPIGTRYLTRNL

SEQ ID NO: 1242 - DNA, 1140 bp, Artificial Sequence
  Description of Artificial Sequence: Synthetic polynucleotide
  modified_base (636)..(636): a, c, g, or t
  modified_base (665)..(665): a, c, g, or t
  modified_base (1064)..(1064): a, c, g, or t
accaccagcaccagaacctgggccctgcccacttacaacaaccatctctacaagcaaatctccagcvvmdcaggagctascaacgacaaccactactttggctacagcaccccttgggggtattttgactttaacagattccactgccacttctcaccacgtgactggcagcgactcattaacaacaactggggattccggcccaagaaactcagcttcaagctcttcaacatccaagttagaggggtcacgcagaacgatggcacgacgactattgccaataaccttaccagcacggttcaagtgtttacggactcggagtatcagctcccgtacgtgctcgggtcggcgcaccaaggctgtctcccgccgtttccagcggacgtcttcatggtccctcagtatggatacctcaccctgaacaacggaagtcaagcggtgggacgctcatccttttactgcctggagtacttcccttcgcagatgctaaggactggaaataacttccaattcagctataccttcgaggatgtaccttttcacagcagctacgctcacagccagagtttggatcgcttgatgaatcctcttattgatcagtatctgtactacctgaacagaacgcaargcamcvcnrgcggaacarccrvcmhsmrsvvsctgvngtttagccaggctgggcctcagtctatgtctttgcaggccagaaattggctacctgggccctgctaccggcaacagagactttcaamarycbmcrvcsrsaacaacaacagtrastttccttggmcagcggccagcamatatcatctcaatggccgcgactcgctggtgaatccaggaccagctatggccagtcacrrggacgatrmsgrsaratttttccctatgcacggcaatctaatatttggcaaasaarrcrscrvsrvarvcratrycgmsdwcgrsvrsgtaatgattacggatgaagaagagattcgtaccaccaatcctgtggcaacagagcagtatggaactgtggcaaataacttgcagrvsvvsmrsrvcvvscccacgdhtvvsrnsgtcvmscatcagggggccttacctggcatggtgtggcaagatcgtgacgtctaccttcaaggacctatctgggca

SEQ ID NO: 1243 - protein, 620 aa, Artificial Sequence; identical to SEQ ID NO: 1239
  Description of Artificial Sequence: Synthetic polypeptide
  MOD_RES (263)..(264): Any naturally occurring amino acid
  MOD_RES (267)..(267): Any naturally occurring amino acid
  MOD_RES (450)..(453): Any naturally occurring amino acid
  MOD_RES (456)..(460): Any naturally occurring amino acid
  MOD_RES (462)..(462): Any naturally occurring amino acid
  MOD_RES (491)..(495): Any naturally occurring amino acid
  MOD_RES (500)..(500): Any naturally occurring amino acid
  MOD_RES (504)..(504): Any naturally occurring amino acid
  MOD_RES (508)..(508): Any naturally occurring amino acid
  MOD_RES (528)..(528): Any naturally occurring amino acid
  MOD_RES (531)..(533): Any naturally occurring amino acid
  MOD_RES (546)..(557): Any naturally occurring amino acid
  MOD_RES (586)..(590): Any naturally occurring amino acid
  MOD_RES (593)..(595): Any naturally occurring amino acid
  MOD_RES (597)..(597): Any naturally occurring amino acid

SEQ ID NO: 1244 - protein, 738 aa, Artificial Sequence; identical to SEQ ID NO: 16
  Description of Artificial Sequence: Synthetic polypeptide

SEQ ID NO: 1245 - DNA, 2258 bp, Artificial Sequence
  Description of Artificial Sequence: Synthetic polynucleotide
tcgaggacaacctctctgagggcattcgcgagtggtgggacttgaaacctggagccccgaaacccaaagccaaccagcaaaagcaggacgacggccggggtctggtgcttcctggctacaagtacctcggacccttcaacggactcgacaagggggagcccgtcaacgcggcggacgcagcggccctcgagcacgacaaggcctacgaccagcagctcaaagcgggtgacaatccgtacctgcggtataaccacgccgacgccgagtttcaggagcgtctgcaagaagatacgtcttttgggggcaacctcgggcgagcagtcttccaggccaagaagcgggttctcgaacctctcggtctggttgaggaaggcgctaagacggctcctggaaagaagagaccggtagagccatcaccccagcgttctccagactcctctacgggcatcggcaagaaaggccagcagcccgcgaaaaagagactcaactttgggcagactggcgactcagagtcagtgcccgaccctcaaccaatcggagaaccccccgcaggcccctctggtctgggatctggtacaatggctgcaggcggtggcgctccaatggcagacaataacgaaggcgccgacggagtgggtagttcctcaggaaattggcattgcgattccacatggctgggcgacagagtcatcaccaccagcacccgaacctgggccctccccacctacaacaaccacctctacaagcaaatctccaacgggacttcgggaggaagcaccaacgacaacacctacttcggctacagcaccccctgggggtattttgactttaacagattccactgccacttctcaccacgtgactggcagcgactcatcaacaacaactggggattccggcccaagagactcaacttcaagctcttcaacatccaggtcaaggaggtcacgcagaatgaaggcaccaagaccatcgccaataaccttaccagcacgattcaggtctttacggactcggaataccagctcccgtacgtcctcggctctgcgcaccagggctgcctgcctccgttcccggcggacgtcttcatgattcctcagtacgggtacctgactctgaacaatggcagtcaggccgtgggccgttcctccttctactgcctggagtactttccttctcaaatgctgagaacgggcaacaactttgagttcagctaccagtttgaggacgtgccttttcacagcagctacgcgcacagccaaagcctggaccggctgatgaaccccctcatcgaccagtacctgtactacctgtctcggactcagtccacgggaggtaccgcaggaactcagcagttgctattttctcaggccgggcctaataacatgtcggctcaggccaaaaactggctacccgggccctgctaccggcagcaacgcgtctccacgacactgtcgcaaaataacaacagcaactttgcctggaccggtgccaccaagtatcatctgaatggcagagactctctggtaaatcccggtgtcgctatggcaacccacaaggacgacgaagagcgattttttccgtccagcggagtcttaatgtttgggaaacagggagctggaaaagacaacgtggactatagcagcgttatgctaaccagtgaggaagaaattaaaaccaccaacccagtggccacagaacagtacggcgtggtggccgataacctgcaacagcaaaacgccgctcctattgtaggggccgtcaacagtcaaggagccttacctggcatggtctggcagaaccgggacgtgtacctgcagggtcctatctgggccaagattcctcacacggacggaaactttcatccctcgccgctgatgggaggctttggactgaaacacccgcctcctcagatcctgattaagaatacacctgttcccgcggatcctccaactaccttcagtcaagctaagctggcgtcgttcatcacgcagtacagcaccggacaggtcagcgtggaaattgaatgggagctgcagaaagaaaacagcaaacgctggaacccagagattcaatacacttccaactactacaaatctacaaatgtggactttgctgttaacacagatggcacttattctgagcctcgccccatcggcacccgttacctcacccgtaatctgtaattgcttgttaatcaataaaccggttgattcgtttcagttgaactttggtctctgcgaagggcgaattcgttt

SEQ ID NO: 1246 - DNA, 2208 bp, Artificial Sequence
  Description of Artificial Sequence: Synthetic polynucleotide
atggctgccgatggttatcttccagattggctcgaggacactctctctgaaggaataagacagtggtggaagctcaaacctggcccaccaccaccaaagcccgcagagcggcataaggacgacagcaggggtcttgtgcttcctgggtacaagtacctcggacccttcaacggactcgacaagggagagccggtcaacgaggcagacgccgcggccctcgagcacgacaaagcctacgaccggcagctcgacagcggagacaacccgtacctcaagtacaaccacgccgacgcggagtttcaggagcgccttaaagaagatacgtcttttgggggcaacctcggacgagcagtcttccaggcgaaaaagagggttcttgaacctctgggcctggttgaggaacctgttaagacggctccgggaaaaaagaggccggtagagcactctcctgtggagccagactcctcctcgggaaccggaaaggcgggccagcagcctgcaagaaaaagattgaattttggtcagactggagacgcagactcagtacctgacccccagcctctcggacagccaccagcagccccctctggtctgggaactaatacgatggctacaggcagtggcgcaccaatggcagacaataacgagggcgccgacggagtgggtaattcctcgggaaattggcattgcgattccacatggatgggcgacagagtcatcaccaccagcacccgaacctgggccctgcccacctacaacaaccacctctacaaacaaatttccagccaatcaggagcctcgaacgacaatcactactttggctacagcaccccttgggggtattttgacttcaacagattccactgccacttttcaccacgtgactggcaaagactcatcaacaacaactggggattccgacccaagagactcaacttcaagctctttaacattcaagtcaaagaggtcacgcagaatgacggtacgacgacgattgccaataaccttaccagcacggttcaggtgtttactgactcggagtaccagctcccgtacgtcctcggctcggcgcatcaaggatgcctcccgccgttcccagcagacgtcttcatggtgccacagtatggatacctcaccctgaacaacgggagtcaggcagtaggacgctcttcattttactgcctggagtactttccttctcagatgctgcgtaccggaaacaactttaccttcagctacacttttgaggacgttcctttccacagcagctacgctcacagccagagtctggaccgtctcatgaatcctctcatcgaccagtacctgtatttcttaagcagaacaaacactccaagtggaaccaccacgcagtcaaggcttcagttttctcaggccggagcgagtgacattcgggaccagtctaggaactggcttcctggaccctgttaccgccagcagcgagtatcaaagacatctgcggataacaacaacagtgaattctcgtggaccggtgctaccaagtaccacctcaatggcagagactctctggtgaatccgggcccggccatggcaagccacaaggacgatgaagaaaagttttttcctcagagcggggttctcatctttgggaagcaaggctcagagaaaacaaatgtggacattgaaaaggtcatgattacagacgaagaggaaatcaggacaaccaatcccgtggctacggagcagtatggttctgtatctaccaacctccagagaggcaacagacaagcagctaccgcagatgtcaacacacaaggcgttcttccaggcatggtctggcaggacagagatgtgtaccttcaggggcccatctgggcaaagattccacacacggacggacattttcacccctctcccctcatgggtggattcggacttaaacaccctcctccacagattctcatcaagaacaccccggtacctgcgaatccttcgaccaccttcagtgcggcaaagtttgcttccttcatcacacagtactccacgggacaggtcagcgtggagatcgagtgggagctgcagaaggaaaacagcaaacgctggaatcccgaaattcagtacacttccaactacaacaagtctgttaatgtggactttactgtggacactaatggcgtgtattcagagcctcgccccattggtaccagattcctgactcgtaatctgtaa

SEQ ID NO: 1247 - protein, 737 aa, Artificial Sequence
  Description of Artificial Sequence: Synthetic polypeptide
MAADGYLPDWLEDNLSEGIREWWDLKPGAPKPKANQQKQDNGRGLVLPGYKYLGPFNGLDKGEPVNAADAAALEHDKAYDQQLQAGDNPYLRYNHADAEFQERLQEDTSFGGNLGRAVFQAKKRVLEPLGLVESPVKTAPGKKRPVEPSPQRSPDSSTGIGKKGQQPAKKRLNFGQTGDSESVPDPQPIGEPPAAPSGVGPNTMAAGGGAPMADNNEGADGVGSSSGNWHCDSTWLGDRVITTSTRTWALPTYNNHLYKQISNGTSGGSTNDNTYFGYSTPWGYFDFNRFHCHFSPRDWQRLINNNWGFRPKRLNFKLFNIQVKEVTQNEGTKTIANNLTSTIQVFTDSEYQLPYVLGSAHQGCLPPFPADVFMIPQYGYLTLNNGSQAVGRSSFYCLEYFPSQMLRTGNNFEFSYNFEDVPFHSSYAHSQSLDRLMNPLIDQYLYYLSRTQSTGGTAGTQQLLFSQAGPNNMSAQAKNWLPGPCYRQQRVSTTLSQNNNSNFAWTGATKYHLNGRDSLVNPGVAMATHKDDEERFFPSSGVLMFGKQGAGKDNVDYSSVMLTSEEEIKTTNPVATEQYGWADNLQQQNAAPIVGAVNSQGALPGMVWQNRDVYLQGPIWAKIPHTDGNFHPSPLMGGFGLKHPPPQILIKNTPVPADPPTTFNQAKLASFITQYSTGQVSVEIEWELQKENSKRWNPEIQYTSNYYKSTNVDFAVNTEGTYSEPRPIGTRYLTRNL

SEQ ID NO: 1248 - DNA, 2211 bp, Artificial Sequence
  Description of Artificial Sequence: Synthetic polynucleotide
atggctgccgatggttatcttccagattggctcgaggacactctctctgaaggaataagacagtggtggaagctcaaacctggcccaccaccaccaaagcccgcagagcggcataaggacgacagcaggggtcttgtgcttcctgggtacaagtacctcggacccttcaacggactcgacaagggagagccggtcaacgaggcagacgccgcggccctcgagcacgacaaagcctacgaccggcagctcgacagcggagacaacccgtacctcaagtacaaccacgccgacgcggagtttcaggagcgccttaaagaagatacgtcttttgggggcaacctcggacgagcagtcttccaggcgaaaaagagggttcttgaacctctgggcctggttgaggaacctgttaagacggctccgggaaaaaagaggccggtagagcactctcctgtggagccagactcctcctcgggaaccggaaaggcgggccagcagcctgcaagaaaaagattgaattttggtcagactggagacgcagactcagtacctgacccccagcctctcggacagccaccagcagccccctctggtctgggaactaatacgatggctacaggcagtggcgcaccaatggcagacaataacgagggcgccgacggagtgggtaattcctcgggaaattggcattgcgattccacatggatgggcgacagagtcatcaccaccagcacccgaacctgggccctgcccacctacaacaaccacctctacaaacaaatttccagcgcttcaacgggagcctcgaacgacaatcactactttggctacagcaccccttgggggtattttgacttcaacagattccactgccacttttcaccacgtgactggcaaagactcatcaacaacaactggggattccgacccaagagactcaacttcaagctctttaacattcaagtcaaagaggtcacgcagaatgacggtacgacgacgattgccaataaccttaccagcacggttcaggtgtttactgactcggagtaccagctcccgtacgtcctcggctcggcgcatcaaggatgcctcccgccgttcccagcagacgtcttcatggtgccacagtatggatacctcaccctgaacaacgggagtcaggcagtaggacgctcttcattttactgcctggagtactttccttctcagatgctgcgtaccggaaacaactttaccttcagctacacttttgaggacgttcctttccacagcagctacgctcacagccagagtctggaccgtctcatgaatcctctcatcgaccagtacctgtattacttgagcagaacaaacactccaagtggaaccaccacgcagtcaaggcttcagttttctcaggccggagcgagtgacattcgggaccagtctaggaactggcttcctggaccctgttaccgccagcagcgagtatcaaagacatctgcggataacaacaacagtgaatactcgtggactggagctaccaagtaccacctcaatggcagagactctctggtgaatccgggcccggccatggcaagccacaaggacgatgaagaaaagttttttcctcagagcggggttctcatctttgggaagcaaggctcagagaaaacaaatgtggacattgaaaaggtcatgattacagacgaagaggaaatcaggacaaccaatcccgtggctacggagcagtatggttctgtatctaccaacctccagagaggcaacagacaagcagctaccgcagatgtcaacacacaaggcgttcttccaggcatggtctggcaggacagagatgtgtaccttcaggggcccatctgggcaaagattccacacacggacggacattttcacccctctcccctcatgggtggattcggacttaaacaccctcctccacagattctcatcaagaacaccccggtacctgcgaatccttcgaccaccttcagtgcggcaaagtttgcttccttcatcacacagtactccacgggacaggtcagcgtggagatcgagtgggagctgcagaaggaaaacagcaaacgctggaatcccgaaattcagtacacttccaactacgccaagtctgtcaatgtggactttactgtggacaataatggcgtgtattcagagcctcgccccattggcaccagatacctgactcgtaatctgtaa

SEQ ID NO: 1249 - DNA, 2208 bp, Artificial Sequence
  Description of Artificial Sequence: Synthetic polynucleotide
atggctgccgatggttatcttccagattggctcgaggacaacctctctgagggcattcgcgagtggtgggacttgaaacctggagccccgaagcccaaagccaaccagcaaaagcaggacgacggccggggtctggtgcttcctggctacaagtacctcggacccttcaacggactcgacaagggggagcccgtcaacgcggcggacgcagcggccctcgagcacgacaaggcctacgaccagcagctcaaagcgggtgacaatccgtacctgcggtataaccacgccgacgccgagtttcaggagcgtctgcaagaagatacgtcttttgggggcaacctcgggcgagcagtcttccaggccaagaagcgggttctcgaacctctcggtctggttgaggaaggcgctaagacggctcctggaaagaaacgtccggtagagcagtcgccacaagagccagactcctcctcgggcatcggcaagacaggccagcagcccgctaaaaagagactcaattttggtcagactggcgactcagagtcagtccccgatccacaacctctcggagaacctccagcaacccccgctgctgtgggacctactacaatggcttcaggcggtggcgcaccaatggcagacaataacgaaggcgccgacggagtgggtaatgcctcaggaaattggcattgcgattccacatggctgggcgacagagtcatcaccaccagcacccgcacctgggccttgcccacctacaataaccacctctacaagcaaatctccagtgcttcaggggccagcaacgacaaccactacttcggctacagcaccccctgggggtattttgatttcaacagattccactgccacttttcaccacgtgactggcagcgactcatcaacaacaattggggattccggcccaagagactcaacttcaaactcttcaacatccaagtcaaggaggtcacgacgaatgatggcgtcacaaccatcgctaataaccttaccagcacggttcaagtcttctcggactcggagtaccagcttccgtacgtcctcggctctgcgcaccagggctgcctccctccgttcccggcggacgtgttcatgattccgcaatacggctacctgacgctcaacaatggcagccaagccgtgggacgttcatccttttactgcctggaatatttcccttctcagatgctgagaacgggcaacaactttaccttcagctacacctttgaggaagtgcctttccacagcagctacgcgcacagccagagcctggaccggctgatgaatcctctcatcgaccaatacctgtattacctgaacagaactcaaaatcagtccggaagtgcccaaaacaaggacttgctgtttagccgtgggtctccagctggcatgtctgttcagcccaaaaactggctacctggaccctgttatcggcagcagcgcgtttctaaaacaaaaacagacaacaacaacagcaattttacctggactggtgcttcaaaatataacctcaatgggcgtgaatccatcatcaaccctggcactgctatggcctcacacaaagacgacgaagacaagttctttcccatgagcggtgtcatgatttttggaaaagagagcgccggagcttcaaacactgcattggacaatgtcatgattacagacgaagaggaaattaaagccactaaccctgtggccaccgaaagatttgggaccgtggcagtcaatttccagagcagcagcacagaccctgcgaccggagatgtgcatgctatgggagcattacctggcatggtgtggcaagatagagacgtgtacctgcagggtcccatttgggccaaaattcctcacacagatggacactttcacccgtctcctcttatgggcggctttggactcaagaacccgcctcctcagatcctcatcaaaaacacgcctgttcctgcgaatcctccggcggagttttcagctacaaagtttgcttcattcatcacccaatactccacaggacaagtgagtgtggaaattgaatgggagctgcagaaagaaaacagcaagcgctggaatcccgaagtgcagtacacatccaattatgcaaaatctgccaacgttgattttactgtggacaacaatggactttatactgagcctcgccccattggcacccgttaccttacccgtcccctgtaa

SEQ ID NO: 1250 - DNA, 2205 bp, Artificial Sequence
  Description of Artificial Sequence: Synthetic polynucleotide
atggctgccgatggttatcttccagattggctcgaggacaacctctdgagggcattcgcgagtggtgggacttgaaacctggagccccgaaacccaaagccaaccagcaaaagcaggacgacggccggggtdggtgcttcctggctacaagtacctcggacccttcaacggactcgacaagggggagcccgtcaacgcggcggatgcagcggccctcgagcacgacaaggcctacgaccagcagctcaaagcgggtgacaatccgtacctgcggtataaccacgccgacgccgagtttcaggagcgtctgcaagaagatacgtcttttgggggcaacctcgggcgagcagtcttccaggccaagaagagggttctcgaaccttttggtdggttgaggaaggtgctaagacggctcctggaaagaaacgtccggtagagcagtcgccacaagagccagactcctcctcgggcattggcaagacaggccagcagcccgctaaaaagagactcaattttggtcagactggcgactcagagtcagtccccgacccacaacctctcggagaacctccagcaacccccgctgctgtgggacctactacaatggcttcaggcggtggcgcaccaatggcagacaataacgaaggcgccgacggagtgggtaatgcctcaggaaattggcattgcgattccacatggctgggcgacagagtcatcaccaccagcacccgaacatgggccttgcccacctataacaaccacctctacaagcaaatctccagtgcttcaggggccagcaacgacaaccactacttcggctacagcaccccctgggggtattttgatttcaacagattccactgccatttctcaccacgtgactggcagcgactcatcaacaacaattggggattccggcccaagagactcaacttcaagctcttcaacatccaagtcaaggaggtcacgacgaatgatggcgtcacgaccatcgctaataaccttaccagcacggttcaagtcttctcggactcggagtaccagttgccgtacgtcctcggctctgcgcaccagggctgcctccctccgttcccggcggacgtgttcatgattccgcagtacggctacctaacgctcaacaatggcagccaggcagtgggacggtcatccttttactgcctggaatatttcccatcgcagatgctgagaacgggcaataactttaccttcagctacaccttcgaggacgtgcctttccacagcagctacgcgcacagccagagcctggaccggctgatgaatcctctcatcgaccagtacctgtattacctgaacagaactcagaatcagtccggaagtgcccaaaacaaggacttgctgtttagccgggggtctccagctggcatgtctgttcagcccaaaaactggctacctggaccctgttaccggcagcagcgcgtttctaaaacaaaaacagacaacaacaacagcaactttacctggactggtgcttcaaaatataaccttaatgggcgtgaatctataatcaaccctggcactgctatggcctcacacaaagacgacaaagacaagttctttcccatgagcggtgtcatgatttttggaaaggagagcgccggagcttcaaacactgcattggacaatgtcatgatcacagacgaagaggaaatcaaagccactaaccccgtggccaccgaaagatttgggactgtggcagtcaatctccagagcagcagcacagaccctgcgaccggagatgtgcatgttatgggagccttacctggaatggtgtggcaagacagagacgtatacctgcagggtcctatttgggccaaaattcctcacacggatggacactttcacccgtctcctctcatgggcggctttggacttaagcacccgcctcctcagatcctcatcaaaaacacgcctgttcctgcgaatcctccggcagagttttcggctacaaagtttgcttcattcatcacccagtattccacaggacaagtgagcgtggagattgaatgggagctgcagaaagaaaacagcaaacgctggaatcccgaagtgcagtatacatctaactatgcaaaatctgccaacgttgatttcactgtggacaacaatggactttatactgagcctcgccccattggcacccgttacctcacccgtcccctgtaa

SEQ ID NO: 1251 - DNA, 2208 bp, Artificial Sequence
  Description of Artificial Sequence: Synthetic polynucleotide
atggctgccgatggttatcttccagattggctcgaggacaacctctctgagggcattcgcgagtggtgggacttgaaacctggagccccgaaacccaaagccaaccagcaaaagcaggacgacggccggggtctggtgcttcctggctacaagtacctcggacccttcaacggactcgacaagggggagcccgtcaacgcggcggatgcagcggccctcgagcacgacaaggcctacgaccagcagctcaaagcgggtgacaatccgtacctgcggtataaccacgccgacgccgagtttcaggagcgtctgcaagaagatacgtcttttgggggcaacctcgggcgagcagtcttccaggccaagaagagggttctcgaaccttttggtctggttgaggaaggtgctaagacggctcctggaaagaaacgtccggtagagcagtcgccacaagagccagactcctcctcgggcattggcaagacaggccagcagcccgctaaaaagagactcaattttggtcagactggcgactcagagtcagtccccgacccacaacctctcggagaacctccagcaacccccgctgctgtgggacctactacaatggcttcaggcggtggcgcaccaatggcagacaataacgaaggcgccgacggagtgggtaatgcctcaggaaattggcattgcgattccacatggctgggcgacagagtcatcaccaccagcacccgaacatgggccttgcccacctataacaaccacctctacaagcaaatctccagtgcttcaggggccagcaacgacaaccactacttcggctacagcaccccctgggggtattttgatttcaacagattccactgccatttctcaccacgtgactggcagcgactcatcaacaacaattggggattccggcccaagagactcaacttcaagctcttcaacatccaagtcaaggaggtcacgacgaatgatggcgtcacgaccatcgctaataaccttaccagcacggttcaagtcttctcggactcggagtaccagttgccgtacgtcctcggctctgcgcaccagggctgcctccctccgttcccggcggacgtgttcatgattccgcagtacggctacctaacgctcaacaatggcagccaggcagtgggacggtcatccttttactgcctggaatatttcccatcgcagatgctgagaacgggcaataactttaccttcagctacaccttcgaggacgtgcctttccacagcagctacgcgcacagccagagcctggaccggctgatgaatcctctcatcgaccagtacctgtattacctgaacagaactcagaatcagtccggaagtgcccaaaacaaggacttgctgtttagccgggggtctccagctggcatgtctgttcagcccaaaaactggctacctggaccctgttaccggcagcagcgcgtttctaaaacaaaaacagacaacaacaacagcaactttacctggactggtgcttcaaaatataaccttaatgggcgtgaatctataatcaaccctggcactgctatggcctcacacaaagacgacgaagacaagttctttcccatgagcggtgtcatgatttttggaaaggagagcgccggagcttcaaacactgcattggacaatgtcatgatcacagacgaagaggaaatcaaagccactaaccccgtggccaccgaaagatttgggactgtggcagtcaatctccagagcagcagcacagaccctgcgaccggagatgtgcatgttatgggagccttacctggaatggtgtggcaagacagagacgtatacctgcagggtcctatttgggccaaaattcctcacacggatggacactttcacccgtctcctctcatgggcggctttggacttaagcacccgcctcctcagatcctcatcaaaaacacgcctgttcctgcgaatcctccggcagagttttcggctacaaagtttgcttcattcatcacccagtattccacaggacaagtgagcgtggagattgaatgggagctgcagaaagaaaacagcaaacgctggaatcccgaagtgcagtatacatctaactatgcaaaatctgccaacgttgatttcactgtggacaacaatggactttatactgagcctcgccccattggcacccgttacctcacccgtcccctgtaa

SEQ ID NO: 1252 - DNA, 2208 bp, Artificial Sequence
  Description of Artificial Sequence: Synthetic polynucleotide
atggctgccgatggttatcttccagattggctcgaggacactctctctgaaggaataagacagtggtggaagctcaaacctggcccaccaccaccaaagcccgcagagcggcataaggacgacagcaggggtcttgtgcttcctgggtacaagtacctcggacccttcaacggactcgacaagggagagccggtcaacgaggcagacgccgcggccctcgagcacgacaaagcctacgaccggcagctcgacagcggagacaacccgtacctcaagtacaaccacgccgacgcggagtttcaggagcgccttaaagaagatacgtcttttgggggcaacctcggacgagcagtcttccaggcgaaaaagagggttcttgaacctctgggcctggttgaggaacctgttaagacggctccgggaaaaaagaggccggtagagcactctcctgtggagccagactcctcctcgggaaccggaaaggcgggccagcagcctgcaagaaaaagattgaattttggtcagactggagacgcagactcagtacctgacccccagcctctcggacagccaccagcagccccctctggtctgggaactaatacgatggctacaggcagtggcgcaccaatggcagacaataacgagggcgccgacggagtgggtaattcctcgggaaattggcattgcgattccacatggatgggcgacagagtcatcaccaccagcacccgaacctgggccctgcccacctacaacaaccacctctacaaacaaatttccagccaatcaggagcctcgaacgacaatcactactttggctacagcaccccttgggggtattttgacttcaacagattccactgccacttttcaccacgtgactggcaaagactcatcaacaacaactggggattccgacccaagagactcaacttcaagctctttaacattcaagtcaaagaggtcacgcagaatgacggtacgacgacgattgccaataaccttaccagcacggttcaggtgtttactgactcggagtaccagctcccgtacgtcctcggctcggcgcatcaaggatgcctcccgccgttcccagcagacgtcttcatggtgccacagtatggatacctcaccctgaacaacgggagtcaggcagtaggacgctcttcattttactgcctggagtactttccttctcagatgctgcgtaccggaaacaactttaccttcagctacacttttgaggacgttcctttccacagcagctacgctcacagccagagtctggaccgtctcatgaatcctctcatcgaccagtacctgtattacttgagcagaacaaacactccaagtggaaccaccacgcagtcaaggcttcagttttctgtggccggacccagtaacatggctgtccagggaaggaactggcttcctggaccctgttaccgccagcagcgagtatcaaagacatctgcggataacaacaacagtgaatttgcttggactggagctaccaagtaccacctcaatggcagagactctctggtgaatccgggcccggccatggcaagccacaaggacgatgaagaaaagttttttcctcagagcggggttctcatctttgggaagcaaggctcagagaaaacaaatgtggacattgaaaaggtcatgattacagacgaagaggaaatcaggacaaccaatcccgtggctacggagcagtatggttctgtatctaccaacctccagcaacagaacacagcaccagctaccgcagatgtcaacacacaaggcgttcttccaggcatggtctggcaggacagagatgtgtaccttcaggggcccatctgggcaaagattccacacacggacggacattttcacccctctcccctcatgggtggattcggacttaaacaccctcctccacagattctcatcaagaacaccccggtacctgcgaatccttcgaccaccttcagtgcggcaaagtttgcttccttcatcacacagtactccacgggacaggtcagcgtggagatcgagtgggagctgcagaaggaaaacagcaaacgctggaatcccgaaattcagtacacttccaactacaacaagtctgttaatgtggactttactgtggacactaatggcgtgtattcagagcctcgccccattggcaccagatacctgactcgtaatctgtaa

SEQ ID NO: 1253 - protein, 735 aa, Artificial Sequence
  Description of Artificial Sequence: Synthetic polypeptide
MAADGYLPDWLEDTLSEGIRQWWKLKPGPPPPKPAERHKDDSRGLVLPGYKYLGPFNGLDKGEPVNEADAAALEHDKAYDRQLDSGDNPYLKYNHADAEFQERLKEDTSFGGNLGRAVFQAKKRVLEPLGLVEEPVKTAPGKKRPVEHSPVEPDSSSGTGKAGQQPARKRLNFGQTGDADSVPDPQPLGQPPAAPSGLGTNTMATGSGAPMADNNEGADGVGNSSGNWHCDSTWMGDRVITTSTRTWALPTYNNHLYKQISSQSGASNDNHYFGYSTPWGYFDFNRFHCHFSPRDWQRLINNNWGFRPKRLNFKLFNIQVKEVTQNDGTTTIANNLTSTVQVFTDSEYQLPYVLGSAHQGCLPPFPADVFMVPQYGYLTLNNGSQAVGRSSFYCLEYFPSQMLRTGNNFTFSYTFEDVPFHSSYAHSQSLDRLMNPLIDQYLYYLSRTNTPSGTTTQSRLQFSVAGPSNMAVQGRNWLPGPCYRQQRVSKTSADNNNSEFAWTGATKYHLNGRDSLVNPGPAMASHKDDEEKFFPQSGVLIFGKQGSEKTNVDIEKVMITDEEEIRTTNPVATEQYGSVSTNLQQQNTAPATADVNTQGVLPGMVWQDRDVYLQGPIWAKIPHTDGHFHPSPLMGGFGLKHPPPQILIKNTPVPANPSTTFSAAKFASFITQYSTGQVSVEIEWELQKENSKRWNPEIQYTSNYNKSVNVDFTVDTNGVYSEPRPIGTRYLTRNL

SEQ ID NO: 1254 - DNA, 2208 bp, Artificial Sequence
  Description of Artificial Sequence: Synthetic polynucleotide
atggctgccgatggttatcttccagattggctcgaggacactctctctgaaggaataagacagtggtggaagctcaaacctggcccaccaccaccaaagcccgcagagcggcataaggacgacagcaggggtcttgtgcttcctgggtacaagtacctcggacccttcaacggactcgacaagggagagccggtcaacgaggcagacgccgcggccctcgagcacgacaaagcctacgaccggcagctcgacagcggagacaacccgtacctcaagtacaaccacgccgacgcggagtttcaggagcgccttaaagaagatacgtcttttgggggcaacctcggacgagcagtcttccaggcgaaaaagaggattcttgaacctctgggcctggttgaggaacctgttaagacggctccgggaaaaaagaggccggtagagcactctcctgcggagccagactcctcctcgggaaccggaaagtcgggccagcagcctgcaagaaaaagattgaattttggtcagactggagacgcagactcagtacctgacccccagcctctcggacagccaccagcagccccctctggtctgggaactaatacgatggcttcaggcagtggcgcaccaatggcagacaataacgagggcgccgacggagtgggtaattcctcgggaaattggcattgcgattccacatggatgggcgacagagtcatcaccaccagcacccgaacctgggccctgcccacctacaacaaccacctctacaaacaaatttccagccaatcaggagcctcgaacgacaatcactactttggctacagcaccccttgggggtattttgacttcaacagattccactgccacttttcaccacgtgactggcaaagactcatcaacaacaactggggattccgacccaagagactcagcttcaagctctttaacattcaagtcaaagaggtcacgcagaatgacggtacgacgacgattgccaataaccttaccagcacggttcaggtgtttactgactcggagtaccagctcccgtacgtcctcggctcggcgcatcaaggatgcctcccgccgttcccagcagacgtcttcatggtgccacagtatggatacctcaccctgaacaacgggagtcaggcagtaggacgctcttcattttactgcctggagtactttccttctcagatgctgcgtaccggaaacaactttaccttcagctacacttttgaggacgttcctttccacagcagctacgctcacagccagagtctggaccgtctcatgaatcctctcatcgaccagtacctgtattacttgagcagaacaaacactccaagtggaaccaccacgatgtcaaggcttcagttttctcaggccggagcgagtgacattcgggaccagtctaggaactggcttcctggaccctgttaccgccagcagcgagtatcaaagacagctgcggataacaacaacagtgattactcgtggactggagctaccaagtaccacctcaatggcagagactctctggtgaatccgggcccggccatggcaagccacaaggacgatgaagaaaagtattttcctcagagcggggttctcatctttgggaagcaagactcaggaaaaacaaatgtggacattgaaaaggtcatgattacagacgaagaggaaatcaggacaaccaatcccgtggctacggagcagtatggttctgtatctaccaacctccagagcggcaacacacaagcagctacctcagatgtcaacacacaaggcgttcttccaggcatggtctggcaggacagagatgtgtaccttcaggggcccatctgggcaaagattccacacacggacggacattttcacccctctcccctcatgggtggattcggacttaaacaccctcctccacagattctcatcaagaacaccccggtacctgcgaatccttcgaccaccttcagtgcggcaaagtttgcttccttcatcacacagtactccacgggacaggtcagcgtggagatcgagtgggagctgcagaaggaaaacagcaaacgctggaatcccgaaattcagtacacttccaactacaacaagtctgttaatgtggactttactgtggacactaatggcgtgtattcagagcctcgccccattggcaccagatacctgactcgtaatctgtaa

SEQ ID NO: 1255 - DNA, 2208 bp, Artificial Sequence
  Description of Artificial Sequence: Synthetic polynucleotide
atggctgccgatggttatcttccagattggctcgaggacactctctctgaaggaataagacagtggtggaagctcaaacctggcccaccaccaccaaagcccgcagagcggcataaggacgacagcaggggtcttgtgcttcctgggtacaagtacctcggacccttcaacggactcgacaagggagagccggtcaacgaggcagacgccgcggccctcgagcacgacaaagcctacgaccggcagctcgacagcggagacaacccgtacctcaagtacaaccacgccgacgcggagtttcaggagcgccttaaagaagatacgtcttttgggggcaacctcggacgagcagtcttccaggcgaaaaagaggattcttgaacctctgggcctggttgaggaacctgttaagacggctccgggaaaaaagaggccggtagagcactctcctgcggagccagactcctcctcgggaaccggaaagtcgggccagcagcctgcaagaaaaagattgaattttggtcagactggagacgcagactcagtacctgacccccagcctctcggacagccaccagcagccccctctggtctgggaactaatacgatggcttcaggcagtggcgcaccaatggcagacaataacgagggcgccgacggagtgggtaattcctcgggaaattggcattgcgattccacatggatgggcgacagagtcatcaccaccagcacccgaacctgggccctgcccacctacaacaaccacctctacaaacaaatttccagccaatcaggagcctcgaacgacaatcactactttggctacagcaccccttgggggtattttgacttcaacagattccactgccacttttcaccacgtgactggcaaagactcatcaacaacaactggggattccgacccaagagactcaacttcaagctctttaacattcaagtcaaagaggtcacgcagaatgacggtacgacgacgattgccaataaccttaccagcacggttcaggtgtttactgactcggagtaccagctcccgtacgtcctcggctcggcgcatcaaggatgcctcccgccgttcccagcagacgtcttcatggtgccacagtatggatacctcaccctgaacaacgggagtcaggcagtaggacgctcttcattttactgcctggagtactttccttctcagatgctgcgtaccggaaacaactttaccttcagctacacttttgaggacgttcctttccacagcagctacgctcacagccagagtctggaccgtctcatgaatcctctcatcgaccagtacctgtattacttgagcagaacaaacactccaagtggaaccaccacgatgtcaaggcttcagttttctcaggccggagcgagtgacattcgggaccagtctaggaactggcttcctggaccctgttaccgccagcagcgagtatcaaagacagctgcggataacaacaacagtgattactcgtggactggagctaccaagtaccacctcaatggcagagactctctggtgaatccgggcccggccatggcaagccacaaggacgatgaagaaaagtattttcctcagagcggggttctcatctttgggaagcaagactcaggaaaaacaaatgtggacattgaaaaggtcatgattacagacgaagaggaaatcaggacaaccaatcccgtggctacggagcagtatggttctgtatctaccaacctccagagcggcaacacacaagcagctacctcagatgtcaacacacaaggcgttcttccaggcatggtctggcaggacagagatgtgtaccttcaggggcccatctgggcaaagattccacacacggacggacattttcacccctctcccctcatgggtggattcggacttaaacaccctcctccacagattctcatcaagaacaccccggtacctgcgaatccttcgaccaccttcagtgcggcaaagtttgcttccttcatcacacagtactccacgggacaggtcagcgtggagatcgagtgggagctgcagaaggaaaacagcaaacgctggaatcccgaaattcagtacacttccaactacaacaagtctgttaatgtggactttactgtggacactaatggcgtgtattcagagcctcgccccattggcaccagatacctgactcgtaatctgtaa

SEQ ID NO: 1256 - protein, 735 aa, Artificial Sequence
  Description of Artificial Sequence: Synthetic polypeptide
MAADGYLPDWLEDTLSEGIRQWWKLKPGPPPPKPAERHKDDSRGLVLPGYKYLGPFNGLDKGEPVNEADAAALEHDKAYDRQLDSGDNPYLKYNHADAEFQERLKEDTSFGGNLGRAVFQAKKRILEPLGLVEEPVKTAPGKKRPVEHSPAEPDSSSGTGKSGQQPARKRLNFGQTGDADSVPDPQPLGQPPAAPSGLGTNTMASGSGAPMADNNEGADGVGNSSGNWHCDSTWMGDRVITTSTRTWALPTYNNHLYKQISSQSGASNDNHYFGYSTPWGYFDFNRFHCHFSPRDWQRLINNNWGFRPKRLNFKLFNIQVKEVTQNDGTTTIANNLTSTVQVFTDSEYQLPYVLGSAHQGCLPPFPADVFMVPQYGYLTLNNGSQAVGRSSFYCLEYFPSQMLRTGNNFTFSYTFEDVPFHSSYAHSQSLDRLMNPLIDQYLYYLSRTNTPSGTTTMSRLQFSQAGASDIRDQSRNWLPGPCYRQQRVSKTAADNNNSDYSWTGATKYHLNGRDSLVNPGPAMASHKDDEEKYFPQSGVLIFGKQDSGKTNVDIEKVMITDEEEIRTTNPVATEQYGSVSTNLQSGNTQAATSDVNTQGVLPGMVWQDRDVYLQGPIWAKIPHTDGHFHPSPLMGGFGLKHPPPQILIKNTPVPANPSTTFSAAKFASFITQYSTGQVSVEIEWELQKENSKRWNPEIQYTSNYNKSVNVDFTVDTNGVYSEPRPIGTRYLTRNL

SEQ ID NO: 1257 - protein, 736 aa, Artificial Sequence
  Description of Artificial Sequence: Synthetic polypeptide
MAADGYLPDWLEDNLSEGIREWWDLKPGAPKPKANQQKQDDGRGLVLPGYKYLGPFNGLDKGEPVNAADAAALEHDKAYDQQLKAGDNPYLRYNHADAEFQERLQEDTSFGGNLGRAVFQAKKRVLEPFGLVEEGAKTAPGKKRPVEQSPQEPDSSSGIGKTGQQPAKKRLNFGQTGDSESVPDPQPLGEPPATPAAVGPTTMASGGGAPMADNNEGADGVGNASGNWHCDSTWLGDRVITTSTRTWALPTYNNHLYKQISSASTGASNDNHYFGYSTPWGYFDFNRFHCHFSPRDWQRLINNNWGFRPKRLNFKLFNIQVKEVTTNDGVTTIANNLTSTVQVFSDSEYQLPYVLGSAHQGCLPPFPADVFMIPQYGYLTLNNGSQAVGRSSFYCLEYFPSQMLRTGNNFTFSYTFEDVPFHSSYAHSQSLDRLMNPLIDQYLYFLNRTQNQSGSAQNKDLLFSRGSPAGMSVQPKNWLPGPCYRQQRVSKTKTDNNNSNFTWTGASKYNLNGRESIINPGTAMASHKDDKDKFFPMSGVMIFGKESAGASNTALDNVMITDEEEIKATNPVATERFGTVAVNLQSSSTDPATGDVHVMGALPGMVWQDRDVYLQGPIWAKIPHTDGHFHPSPLMGGFGLKHPPPQILIKNTPVPANPPAEFSATKFASFITQYSTGQVSVEIEWELQKENSKRWNPEVQYTSNYAKSANVDFTVDNNGLYTEPRPIGTRYLTRPL

SEQ ID NO: 1258 - protein, 747 aa, Artificial Sequence
  Description of Artificial Sequence: Synthetic polypeptide
MAADGYLPDWLEDTLSEGIRQWWKLKPGPPPPKPAERHKDDSRGLVLPGYKYLGPFNGLDKGEPVNEADAAALEHDKAYDRQLDSGDNPYLKYNHADAEFQERLKEDTSFGGNLGRAVFQAKKRVLEPLGLVEEPVKTAPGKKRPVEHSPVEPDSSSGTGKAGQQPARKRLNFGQTGDADSVPDPQPLGQPPAAPSGLGTNTMATGSGAPMADNNEGADGVGNSSGNWHCDSTWMGDRVITTSTRTWALPTYNNHLYKQISSQSGASNDNHYFGYSTPWGYFDFNRFHCHFSPRDWQRLINNNWGFRPKRLNFKLFNIQVKEVTQNDGTTTIANNLTSTVQVFTDSEYQLPYVLGSAHQGCLPPFPADVFMVPQYGYLTLNNGSQAVGRSSFYCLEYFPSQMLRTGNNFTFSYTFEDVPFHSSYAHSQSLDRLMNPLIDQYLYYLSRTNTPSGTTTQSRLQFSQAGASDIRDQSRNWLPGPCYRQQRVSKTSADNNNSEYSWTGATKYHLNGRDSLVNPGPAMASHKDDEEKFFPQSGVLIFGKQGSEKTNVDIEKVMITDEEEIRTTNPVATEQYGSVSTNLQRGNAAAGSTPPPMAARQAATADVNTQGVLPGMVWQDRDVYLQGPIWAKIPHTDGHFHPSPLMGGFGLKHPPPQILIKNTPVPANPSTTFSAAKFASFITQYSTGQVSVEIEWELQKENSKRWNPEIQYTSNYNKSVNVDFTVDTNGVYSEPRPIGTRYLTRNL

SEQ ID NO: 1259 - protein, 747 aa, Artificial Sequence
  Description of Artificial Sequence: Synthetic polypeptide
MAADGYLPDWLEDTLSEGIRQWWKLKPGPPPPKPAERHKDDSRGLVLPGYKYLGPFNGLDKGEPVNEADAAALEHDKAYDRQLDSGDNPYLKYNHADAEFQERLKEDTSFGGNLGRAVFQAKKRVLEPLGLVEEPVKTAPGKKRPVEHSPVEPDSSSGTGKAGQQPARKRLNFGQTGDADSVPDPQPLGQPPAAPSGLGTNTMATGSGAPMADNNEGADGVGNSSGNWHCDSTWMGDRVITTSTRTWALPTYNNHLYKQISSQSGASNDNHYFGYSTPWGYFDFNRFHCHFSPRDWQRLINNNWGFRPKRLNFKLFNIQVKEVTQNDGTTTIANNLTSTVQVFTDSEYQLPYVLGSAHQGCLPPFPADVFMVPQYGYLTLNNGSQAVGRSSFYCLEYFPSQMLRTGNNFTFSYTFEDVPFHSSYAHSQSLDRLMNPLIDQYLYYLSRTNTPSGTTTQSRLQFSQAGASDIRDQSRNWLPGPCYRQQRVSKTSADNNNSEYSWTGATKYHLNGRDSLVNPGPAMASHKDDEEKFFPQSGVLIFGKQGSEKTNVDIEKVMITDEEEIRTTNPVATEQYGSVSTNLQRGNAAAGETRAPLAARQAATADVNTQGVLPGMVWQDRDVYLQGPIWAKIPHTDGHFHPSPLMGGFGLKHPPPQILIKNTPVPANPSTTFSAAKFASFITQYSTGQVSVEIEWELQKENSKRWNPEIQYTSNYNKSVNVDFTVDTNGVYSEPRPIGTRYLTRNL

SEQ ID NO: 1260 - protein, 7 aa, Artificial Sequence
  Description of Artificial Sequence: Synthetic peptide
TLAVPFK

SEQ ID NO: 1261 - protein, 7 aa, Artificial Sequence
  Description of Artificial Sequence: Synthetic peptide
KFPVALT

SEQ ID NO: 1262 - protein, 6 aa, Artificial Sequence
  Description of Artificial Sequence: Synthetic peptide
LAVPFK

SEQ ID NO: 1263 - protein, 5 aa, Artificial Sequence
  Description of Artificial Sequence: Synthetic peptide
AVPFK

SEQ ID NO: 1264 - protein, 4 aa, Artificial Sequence
  Description of Artificial Sequence: Synthetic peptide
VPFK

SEQ ID NO: 1265 - protein, 6 aa, Artificial Sequence
  Description of Artificial Sequence: Synthetic peptide
TLAVPF

SEQ ID NO: 1266 - protein, 5 aa, Artificial Sequence
  Description of Artificial Sequence: Synthetic peptide
TLAVP

SEQ ID NO: 1267 - protein, 4 aa, Artificial Sequence
  Description of Artificial Sequence: Synthetic peptide
TLAV

SEQ ID NO: 1268 - protein, 7 aa, Artificial Sequence
  Description of Artificial Sequence: Synthetic peptide
SVSKPFL

SEQ ID NO: 1269 - protein, 7 aa, Artificial Sequence
  Description of Artificial Sequence: Synthetic peptide
FTLTTPK

SEQ ID NO: 1270 - protein, 7 aa, Artificial Sequence
  Description of Artificial Sequence: Synthetic peptide
MNATKNV

SEQ ID NO: 1271 - protein, 7 aa, Artificial Sequence
  Description of Artificial Sequence: Synthetic peptide
QSSQTPR

SEQ ID NO: 1272 - protein, 7 aa, Artificial Sequence
  Description of Artificial Sequence: Synthetic peptide
ILGTGTS

SEQ ID NO: 1273 - protein, 7 aa, Artificial Sequence
  Description of Artificial Sequence: Synthetic peptide
TRTNPEA

SEQ ID NO: 1274 - protein, 7 aa, Artificial Sequence
  Description of Artificial Sequence: Synthetic peptide
NGGTSSS

SEQ ID NO: 1275 - protein, 7 aa, Artificial Sequence
  Description of Artificial Sequence: Synthetic peptide
YTLSQGW

SEQ ID NO: 1276 - DNA, 21 bp, Artificial Sequence
  Description of Artificial Sequence: Synthetic oligonucleotide
aagtttcctgtggcgttgact

SEQ ID NO: 1277 - DNA, 21 bp, Artificial Sequence
  Description of Artificial Sequence: Synthetic oligonucleotide
actttggcggtgccttttaag

SEQ ID NO: 1278 - DNA, 21 bp, Artificial Sequence
  Description of Artificial Sequence: Synthetic oligonucleotide
agtgtgagtaagccttttttg

SEQ ID NO: 1279 - DNA, 21 bp, Artificial Sequence
  Description of Artificial Sequence: Synthetic oligonucleotide
tttacgttgacgacgcctaag

SEQ ID NO: 1280 - DNA, 21 bp, Artificial Sequence
  Description of Artificial Sequence: Synthetic oligonucleotide
atgaatgctacgaagaatgtg

SEQ ID NO: 1281 - DNA, 21 bp, Artificial Sequence
  Description of Artificial Sequence: Synthetic oligonucleotide
cagtcgtcgcagacgcctagg

SEQ ID NO: 1282 - DNA, 21 bp, Artificial Sequence
  Description of Artificial Sequence: Synthetic oligonucleotide
attctggggactggtacttcg

SEQ ID NO: 1283 - DNA, 21 bp, Artificial Sequence
  Description of Artificial Sequence: Synthetic oligonucleotide
acgcggactaatcctgaggct

SEQ ID NO: 1284 - DNA, 21 bp, Artificial Sequence
  Description of Artificial Sequence: Synthetic oligonucleotide
aatggggggactagtagttct

SEQ ID NO: 1285 - DNA, 21 bp, Artificial Sequence
  Description of Artificial Sequence: Synthetic oligonucleotide
tatactttgtcgcagggttgg

SEQ ID NO: 1286 - protein, 11 aa, Artificial Sequence
  Description of Artificial Sequence: Synthetic peptide
AQTLAVPFKAQ

SEQ ID NO: 1287 - protein, 11 aa, Artificial Sequence
  Description of Artificial Sequence: Synthetic peptide
AQSVSKPFLAQ

SEQ ID NO: 1288 - protein, 11 aa, Artificial Sequence
  Description of Artificial Sequence: Synthetic peptide
AQFTLTTPKAQ

SEQ ID NO: 1289 - protein, 11 aa, Artificial Sequence
  Description of Artificial Sequence: Synthetic peptide
DGTLAVPFKAQ

SEQ ID NO: 1290 - protein, 11 aa, Artificial Sequence
  Description of Artificial Sequence: Synthetic peptide
ESTLAVPFKAQ

SEQ ID NO: 1291 - protein, 11 aa, Artificial Sequence
  Description of Artificial Sequence: Synthetic peptide
GGTLAVPFKAQ

SEQ ID NO: 1292 - protein, 11 aa, Artificial Sequence
  Description of Artificial Sequence: Synthetic peptide
AQTLATPFKAQ

SEQ ID NO: 1293 - protein, 11 aa, Artificial Sequence
  Description of Artificial Sequence: Synthetic peptide
ATTLATPFKAQ

SEQ ID NO: 1294 - protein, 11 aa, Artificial Sequence
  Description of Artificial Sequence: Synthetic peptide
DGTLATPFKAQ

SEQ ID NO: 1295 - protein, 11 aa, Artificial Sequence
  Description of Artificial Sequence: Synthetic peptide
GGTLATPFKAQ

SEQ ID NO: 1296 - protein, 11 aa, Artificial Sequence
  Description of Artificial Sequence: Synthetic peptide
SGSLAVPFKAQ

SEQ ID NO: 1297 - protein, 11 aa, Artificial Sequence
  Description of Artificial Sequence: Synthetic peptide
AQTLAQPFKAQ

SEQ ID NO: 1298 - protein, 11 aa, Artificial Sequence
  Description of Artificial Sequence: Synthetic peptide
AQTLQQPFKAQ

SEQ ID NO: 1299 - protein, 11 aa, Artificial Sequence
  Description of Artificial Sequence: Synthetic peptide
AQTLSNPFKAQ

SEQ ID NO: 1300 - protein, 11 aa, Artificial Sequence
  Description of Artificial Sequence: Synthetic peptide
AQTLAVPFSNP

SEQ ID NO: 1301 - protein, 11 aa, Artificial Sequence
  Description of Artificial Sequence: Synthetic peptide
QGTLAVPFKAQ

SEQ ID NO: 1302 - protein, 11 aa, Artificial Sequence
  Description of Artificial Sequence: Synthetic peptide
NQTLAVPFKAQ

SEQ ID NO: 1303 - protein, 11 aa, Artificial Sequence
  Description of Artificial Sequence: Synthetic peptide
EGSLAVPFKAQ

SEQ ID NO: 1304 - protein, 11 aa, Artificial Sequence
  Description of Artificial Sequence: Synthetic peptide
SGNLAVPFKAQ

SEQ ID NO: 1305 - protein, 11 aa, Artificial Sequence
  Description of Artificial Sequence: Synthetic peptide
EGTLAVPFKAQ

SEQ ID NO: 1306 - protein, 11 aa, Artificial Sequence
  Description of Artificial Sequence: Synthetic peptide
DSTLAVPFKAQ

SEQ ID NO: 1307 - protein, 11 aa, Artificial Sequence
  Description of Artificial Sequence: Synthetic peptide
AVTLAVPFKAQ

SEQ ID NO: 1308 - protein, 11 aa, Artificial Sequence
  Description of Artificial Sequence: Synthetic peptide
AQTLSTPFKAQ

SEQ ID NO: 1309 - protein, 11 aa, Artificial Sequence
  Description of Artificial Sequence: Synthetic peptide
AQTLPQPFKAQ

SEQ ID NO: 1310 - protein, 11 aa, Artificial Sequence
  Description of Artificial Sequence: Synthetic peptide
AQTLSQPFKAQ

SEQ ID NO: 1311 - protein, 11 aa, Artificial Sequence
  Description of Artificial Sequence: Synthetic peptide
AQTLQLPFKAQ

SEQ ID NO: 1312 - protein, 11 aa, Artificial Sequence
  Description of Artificial Sequence: Synthetic peptide
AQTLTMPFKAQ

SEQ ID NO: 1313 - protein, 11 aa, Artificial Sequence
  Description of Artificial Sequence: Synthetic peptide
AQTLTTPFKAQ

SEQ ID NO: 1314 - protein, 11 aa, Artificial Sequence
  Description of Artificial Sequence: Synthetic peptide
AQYTLSQGWAQ

SEQ ID NO: 1315 - protein, 11 aa, Artificial Sequence
  Description of Artificial Sequence: Synthetic peptide
AQMNATKNVAQ

SEQ ID NO: 1316 - protein, 11 aa, Artificial Sequence
  Description of Artificial Sequence: Synthetic peptide
AQVSGGHHSAQ

SEQ ID NO: 1317 - protein, 11 aa, Artificial Sequence
  Description of Artificial Sequence: Synthetic peptide
AQTLTAPFKAQ

SEQ ID NO: 1318 - protein, 11 aa, Artificial Sequence
  Description of Artificial Sequence: Synthetic peptide
AQTLSKPFKAQ

SEQ ID NO: 1319 - protein, 7 aa, Artificial Sequence
  Description of Artificial Sequence: Synthetic peptide
QAVRTSL

SEQ ID NO: 1320 - protein, 7 aa, Artificial Sequence
  Description of Artificial Sequence: Synthetic peptide
LAKERLS

SEQ ID NO: 1321 - protein, 7 aa, Artificial Sequence
  Description of Artificial Sequence: Synthetic peptide
MNSTKNV

SEQ ID NO: 1322 - protein, 7 aa, Artificial Sequence
  Description of Artificial Sequence: Synthetic peptide
VSGGHHS

SEQ ID NO: 1323 - protein, 14 aa, Artificial Sequence
  Description of Artificial Sequence: Synthetic peptide
SAQTLAVPFKAQAQ

SEQ ID NO: 1324 - protein, 14 aa, Artificial Sequence
  Description of Artificial Sequence: Synthetic peptide
  MOD_RES (2)..(4): Any amino acid
SXXXLAVPFKAQAQ

SEQ ID NO: 1325 - protein, 14 aa, Artificial Sequence
  Description of Artificial Sequence: Synthetic peptide
  MOD_RES (4)..(6): Any amino acid
SAQXXXVPFKAQAQ

SEQ ID NO: 1326 - protein, 14 aa, Artificial Sequence
  Description of Artificial Sequence: Synthetic peptide
  MOD_RES (6)..(8): Any amino acid
SAQTLXXXFKAQAQ

SEQ ID NO: 1327 - protein, 14 aa, Artificial Sequence
  Description of Artificial Sequence: Synthetic peptide
  MOD_RES (8)..(10): Any amino acid
SAQTLAVXXXAQAQ

SEQ ID NO: 1328 - protein, 14 aa, Artificial Sequence
  Description of Artificial Sequence: Synthetic peptide
  MOD_RES (10)..(12): Any amino acid
SAQTLAVPFXXXAQ

SEQ ID NO: 1329 - protein, 7 aa, Artificial Sequence
  Description of Artificial Sequence: Synthetic peptide
TNHQSAQ

SEQ ID NO: 1330 - protein, 7 aa, Artificial Sequence
  Description of Artificial Sequence: Synthetic peptide
AQAQTGW

SEQ ID NO: 1331 - protein, 9 aa, Artificial Sequence
  Description of Artificial Sequence: Synthetic peptide
DGTLATPFK

SEQ ID NO: 1332 - protein, 11 aa, Artificial Sequence
  Description of Artificial Sequence: Synthetic peptide
  MOD_RES (10)..(11): Any amino acid
DGTLATPFKXX

SEQ ID NO: 1333 - protein, 8 aa, Artificial Sequence
  Description of Artificial Sequence: Synthetic peptide
LAVPFKAQ

SEQ ID NO: 1334 - protein, 6 aa, Artificial Sequence
  Description of Artificial Sequence: Synthetic peptide
VPFKAQ

SEQ ID NO: 1335 - protein, 4 aa, Artificial Sequence
  Description of Artificial Sequence: Synthetic peptide
FKAQ

SEQ ID NO: 1336 - protein, 6 aa, Artificial Sequence
  Description of Artificial Sequence: Synthetic peptide
AQTLAV

SEQ ID NO: 1337 - protein, 8 aa, Artificial Sequence
  Description of Artificial Sequence: Synthetic peptide
AQTLAVPF

SEQ ID NO: 1338 - protein, 4 aa, Artificial Sequence
  Description of Artificial Sequence: Synthetic peptide
QAVR

SEQ ID NO: 1339 - protein, 4 aa, Artificial Sequence
  Description of Artificial Sequence: Synthetic peptide
AVRT

SEQ ID NO: 1340 - protein, 4 aa, Artificial Sequence
  Description of Artificial Sequence: Synthetic peptide
VRTS

SEQ ID NO: 1341 - protein, 4 aa, Artificial Sequence
  Description of Artificial Sequence: Synthetic peptide
RTSL

SEQ ID NO: 1342 - protein, 5 aa, Artificial Sequence
  Description of Artificial Sequence: Synthetic peptide
QAVRT

SEQ ID NO: 1343 - protein, 5 aa, Artificial Sequence
  Description of Artificial Sequence: Synthetic peptide
AVRTS

SEQ ID NO: 1344 - protein, 5 aa, Artificial Sequence
  Description of Artificial Sequence: Synthetic peptide
VRTSL

SEQ ID NO: 1345 - protein, 6 aa, Artificial Sequence
  Description of Artificial Sequence: Synthetic peptide
QAVRTS

SEQ ID NO: 1346 - protein, 6 aa, Artificial Sequence
  Description of Artificial Sequence: Synthetic peptide
AVRTSL

SEQ ID NO: 1347 - DNA, 33 bp, Artificial Sequence
  Description of Artificial Sequence: Synthetic oligonucleotide
gatgggactttggcggtgccttttaaggcacag

SEQ ID NO: 1348 - DNA, 33 bp, Artificial Sequence
  Description of Artificial Sequence: Synthetic oligonucleotide
gatgggacgttggcggtgccttttaaggcacag

SEQ ID NO: 1349 - DNA, 21 bp, Artificial Sequence
  Description of Artificial Sequence: Synthetic oligonucleotide
caggcggttaggacgtctttg

SEQ ID NO: 1350 - DNA, 27 bp, Artificial Sequence
  Description of Artificial Sequence: Synthetic oligonucleotide
caggtcttcacggactcagactatcag

SEQ ID NO: 1351 - DNA, 32 bp, Artificial Sequence
  Description of Artificial Sequence: Synthetic oligonucleotide
caagtaaaacctctacaaatgtggtaaaatcg

SEQ ID NO: 1352 - DNA, 36 bp, Artificial Sequence
  Description of Artificial Sequence: Synthetic oligonucleotide
actcatcgaccaatacttgtactatctctctagaac

SEQ ID NO: 1353 - DNA, 26 bp, Artificial Sequence
  Description of Artificial Sequence: Synthetic oligonucleotide
ggaagtattccttggttttgaaccca

SEQ ID NO: 1354 - DNA, 23 bp, Artificial Sequence
  Description of Artificial Sequence: Synthetic oligonucleotide
ggtcgcggttcttgtttgtggat

SEQ ID NO: 1355 - DNA, 24 bp, Artificial Sequence
  Description of Artificial Sequence: Synthetic oligonucleotide
cgaccttgaagcgcatgaactcct

SEQ ID NO: 1356 - DNA, 83 bp, Artificial Sequence
  Description of Artificial Sequence: Synthetic oligonucleotide
  modified_base (42)..(43): a, c, g, or t
  modified_base (45)..(46): a, c, g, or t
  modified_base (48)..(49): a, c, g, or t
  modified_base (51)..(52): a, c, g, or t
  modified_base (54)..(55): a, c, g, or t
  modified_base (57)..(58): a, c, g, or t
  modified_base (60)..(61): a, c, g, or t
gtattccttggttttgaacccaaccggtctgcgcctgtgcmnnmnnmnnmnnmnnmnnmnnttgggcactctggtggtttgtc

SEQ ID NO: 1357 - DNA, 64 bp, Artificial Sequence
  Description of Artificial Sequence: Synthetic oligonucleotide
  modified_base (36)..(37): a, c, g, or t
  modified_base (39)..(40): a, c, g, or t
  modified_base (42)..(43): a, c, g, or t
gtattccttggttttgaacccaaccggtctgcgcmnnmnnmnnaaaaggcaccgccaaagtttg

SEQ ID NO: 1358 - DNA, 70 bp, Artificial Sequence
  Description of Artificial Sequence: Synthetic oligonucleotide
  modified_base (42)..(43): a, c, g, or t
  modified_base (45)..(46): a, c, g, or t
  modified_base (48)..(49): a, c, g, or t
gtattccttggttttgaacccaaccggtctgcgcctgtgcmnnmnnmnncaccgccaaagtttgggcact

SEQ ID NO: 1359 - DNA, 77 bp, Artificial Sequence
  Description of Artificial Sequence: Synthetic oligonucleotide
  modified_base (48)..(49): a, c, g, or t
  modified_base (51)..(52): a, c, g, or t
  modified_base (54)..(55): a, c, g, or t
gtattccttggttttgaacccaaccggtctgcgcctgtgccttaaamnnmnnmnncaaagtttgggcactctggtgg

SEQ ID NO: 1360 - DNA, 83 bp, Artificial Sequence
  Description of Artificial Sequence: Synthetic oligonucleotide
  modified_base (54)..(55): a, c, g, or t
  modified_base (57)..(58): a, c, g, or t
  modified_base (60)..(61): a, c, g, or t
gtattccttggttttgaacccaaccggtctgcgcctgtgccttaaaaggcacmnnmnnmnnttgggcactctggtggtttgtg

SEQ ID NO: 1361 - DNA, 21 bp, Artificial Sequence
  Description of Artificial Sequence: Synthetic oligonucleotide
cttgcgaaggagcggctttcg

SEQ ID NO: 1362 - protein, 10 aa, Artificial Sequence
  Description of Artificial Sequence: Synthetic peptide
VNLTWSRASG

SEQ ID NO: 1363 - protein, 14 aa, Artificial Sequence
  Description of Artificial Sequence: Synthetic peptide
EFCINHRGYWVCGD

SEQ ID NO: 1364 - protein, 11 aa, Artificial Sequence
  Description of Artificial Sequence: Synthetic peptide
EDGQVMDVDLS

SEQ ID NO: 1365 - protein, 9 aa, Artificial Sequence
  Description of Artificial Sequence: Synthetic peptide
EKQRNGTLT

SEQ ID NO: 1366 - protein, 17 aa, Artificial Sequence
  Description of Artificial Sequence: Synthetic peptide
TYQCRVTHPHLPRALMR

SEQ ID NO: 1367 - protein, 14 aa, Artificial Sequence
  Description of Artificial Sequence: Synthetic peptide
RHSTTQPRKTKGSG

SEQ ID NO: 1368 - protein, 13 aa, Artificial Sequence
  Description of Artificial Sequence: Synthetic peptide
DSNPRGVSAYLSR

SEQ ID NO: 1369 - protein, 12 aa, Artificial Sequence
  Description of Artificial Sequence: Synthetic peptide
TITCLWDLAPSK

SEQ ID NO: 1370 - protein, 10 aa, Artificial Sequence
  Description of Artificial Sequence: Synthetic peptide
KTKGSGFFVF

SEQ ID NO: 1371 - protein, 12 aa, Artificial Sequence
  Description of Artificial Sequence: Synthetic peptide
THPHLPRALMRS

SEQ ID NO: 1372 - protein, 23 aa, Artificial Sequence
  Description of Artificial Sequence: Synthetic peptide
GETYQCRVTHPHLPRALMRSTTK

SEQ ID NO: 1373 - protein, 8 aa, Artificial Sequence
  Description of Artificial Sequence: Synthetic peptide
LPRALMRS

SEQ ID NO: 1374 - protein, 8 aa, Artificial Sequence
  Description of Artificial Sequence: Synthetic peptide
INHRGYWV

SEQ ID NO: 1375 - protein, 12 aa, Artificial Sequence
  Description of Artificial Sequence: Synthetic peptide
CDAGSVRTNAPD

SEQ ID NO: 1376 - protein, 17 aa, Artificial Sequence
  Description of Artificial Sequence: Synthetic peptide
AKAVSNLTESRSESLQS

SEQ ID NO: 1377 - protein, 13 aa, Artificial Sequence
  Description of Artificial Sequence: Synthetic peptide
SLTGDEFKKVLET

SEQ ID NO: 1378 - protein, 11 aa, Artificial Sequence
  Description of Artificial Sequence: Synthetic peptide
REAVAYRFEED

SEQ ID NO: 1379 - protein, 10 aa, Artificial Sequence
  Description of Artificial Sequence: Synthetic peptide
INPEIITLDG

SEQ ID NO: 1380 - protein, 15 aa, Artificial Sequence
  Description of Artificial Sequence: Synthetic peptide
DISVTGAPVITATYL

SEQ ID NO: 1381 - protein, 12 aa, Artificial Sequence
  Description of Artificial Sequence: Synthetic peptide
DISVTGAPVITA

SEQ ID NO: 1382 - protein, 17 aa, Artificial Sequence
  Description of Artificial Sequence: Synthetic peptide
PKTVSNLTESSSESVQS

SEQ ID NO: 1383 - protein, 13 aa, Artificial Sequence
  Description of Artificial Sequence: Synthetic peptide
SLMGDEFKAVLET

SEQ ID NO: 1384 - protein, 11 aa, Artificial Sequence
  Description of Artificial Sequence: Synthetic peptide
QHSVAYTFEED

SEQ ID NO: 1385 - protein, 10 aa, Artificial Sequence
  Description of Artificial Sequence: Synthetic peptide
INPEIITRDG

SEQ ID NO: 1386 - protein, 15 aa, Artificial Sequence
  Description of Artificial Sequence: Synthetic peptide
DISLTGDPVITASYL

SEQ ID NO: 1387 - protein, 12 aa, Artificial Sequence
  Description of Artificial Sequence: Synthetic peptide
DISLTGDPVITA

SEQ ID NO: 1388 - protein, 11 aa, Artificial Sequence
  Description of Artificial Sequence: Synthetic peptide
DQSIDFEIDSA

SEQ ID NO: 1389 - protein, 20 aa, Artificial Sequence
  Description of Artificial Sequence: Synthetic peptide
KNVSEDLPLPTFSPTLLGDS

SEQ ID NO: 1390 - protein, 11 aa, Artificial Sequence
  Description of Artificial Sequence: Synthetic peptide
KNVSEDLPLPT

SEQ ID NO: 1391 - protein, 12 aa, Artificial Sequence
  Description of Artificial Sequence: Synthetic peptide
CDSGRVRTDAPD

SEQ ID NO: 1392 - protein, 14 aa, Artificial Sequence
  Description of Artificial Sequence: Synthetic peptide
FPEHLLVDFLQSLS

SEQ ID NO: 1393 - protein, 9 aa, Artificial Sequence
  Description of Artificial Sequence: Synthetic peptide
DAEFRHDSG

SEQ ID NO: 1394 - protein, 16 aa, Artificial Sequence
  Description of Artificial Sequence: Synthetic peptide
HYAAAQWDFGNTMCQL

SEQ ID NO: 1395 - protein, 13 aa, Artificial Sequence
  Description of Artificial Sequence: Synthetic peptide
YAAQWDFGNTMCQ

SEQ ID NO: 1396 - protein, 10 aa, Artificial Sequence
  Description of Artificial Sequence: Synthetic peptide
RSQKEGLHYT

SEQ ID NO: 1397 - protein, 19 aa, Artificial Sequence
  Description of Artificial Sequence: Synthetic peptide
SSRTPSDKPVAHWANPQAE

SEQ ID NO: 1398 - protein, 15 aa, Artificial Sequence
  Description of Artificial Sequence: Synthetic peptide
SRTPSDKPVAHWANP

SEQ ID NO: 1399 - protein, 9 aa, Artificial Sequence
  Description of Artificial Sequence: Synthetic peptide
SSRTPSDKP

SEQ ID NO: 1400 - protein, 14 aa, Artificial Sequence
  Description of Artificial Sequence: Synthetic peptide
NADGNVDYHMNSVP

SEQ ID NO: 1401 - protein, 11 aa, Artificial Sequence
  Description of Artificial Sequence: Synthetic peptide
DGNVDYHMNSV

SEQ ID NO: 1402 - protein, 16 aa, Artificial Sequence
  Description of Artificial Sequence: Synthetic peptide
RSFKEFLQSSLRALRQ

SEQ ID NO: 1403 - protein, 11 aa, Artificial Sequence
  Description of Artificial Sequence: Synthetic peptide
FKEFLQSSLRA

SEQ ID NO: 1404 - protein, 10 aa, Artificial Sequence
  Description of Artificial Sequence: Synthetic peptide
QMWAPQWGPD

SEQ ID NO: 1405 - protein, 6 aa, Artificial Sequence
  Description of Artificial Sequence: Synthetic peptide
RGNRQA

SEQ ID NO: 1406 - protein, 6 aa, Artificial Sequence
  Description of Artificial Sequence: Synthetic peptide
SSSTDP

SEQ ID NO: 1407 - protein, 6 aa, Artificial Sequence
  Description of Artificial Sequence: Synthetic peptide
SSNTAP

SEQ ID NO: 1408 - protein, 6 aa, Artificial Sequence
  Description of Artificial Sequence: Synthetic peptide
SNSNLP

SEQ ID NO: 1409 - protein, 6 aa, Artificial Sequence
  Description of Artificial Sequence: Synthetic peptide
SSTTAP

SEQ ID NO: 1410 - protein, 6 aa, Artificial Sequence
  Description of Artificial Sequence: Synthetic peptide
AANTAA

SEQ ID NO: 1411 - protein, 6 aa, Artificial Sequence
  Description of Artificial Sequence: Synthetic peptide
QQNTAP

SEQ ID NO: 1412 - protein, 6 aa, Artificial Sequence
  Description of Artificial Sequence: Synthetic peptide
SAQAQA

SEQ ID NO: 1413 - protein, 6 aa, Artificial Sequence
  Description of Artificial Sequence: Synthetic peptide
QANTGP

SEQ ID NO: 1414 - protein, 6 aa, Artificial Sequence
  Description of Artificial Sequence: Synthetic peptide
NATTAP

SEQ ID NO: 1415 - protein, 6 aa, Artificial Sequence
  Description of Artificial Sequence: Synthetic peptide
SSTAGP

SEQ ID NO: 1416 - protein, 6 aa, Artificial Sequence
  Description of Artificial Sequence: Synthetic peptide
QQNTAA

SEQ ID NO: 1417 - protein, 6 aa, Artificial Sequence
  Description of Artificial Sequence: Synthetic peptide
PSTAGP

SEQ ID NO: 1418 - protein, 6 aa, Artificial Sequence
  Description of Artificial Sequence: Synthetic peptide
NQNTAP

SEQ ID NO: 1419 - protein, 6 aa, Artificial Sequence
  Description of Artificial Sequence: Synthetic peptide
QAANAP

SEQ ID NO: 1420 - protein, 6 aa, Artificial Sequence
  Description of Artificial Sequence: Synthetic peptide
SIVGLP

SEQ ID NO: 1421 - protein, 6 aa, Artificial Sequence
  Description of Artificial Sequence: Synthetic peptide
AASTAA

SEQ ID NO: 1422 - protein, 6 aa, Artificial Sequence
  Description of Artificial Sequence: Synthetic peptide
SQNTTA

SEQ ID NO: 1423 - protein, 6 aa, Artificial Sequence
  Description of Artificial Sequence: Synthetic peptide
QQDTAP

SEQ ID NO: 1424 - protein, 6 aa, Artificial Sequence
  Description of Artificial Sequence: Synthetic peptide
QTNTGP

SEQ ID NO: 1425 - protein, 6 aa, Artificial Sequence
  Description of Artificial Sequence: Synthetic peptide
QTNGAP

SEQ ID NO: 1426 - protein, 6 aa, Artificial Sequence
  Description of Artificial Sequence: Synthetic peptide
QQNAAP

SEQ ID NO: 1427 - protein, 6 aa, Artificial Sequence
  Description of Artificial Sequence: Synthetic peptide
AANTQA

SEQ ID NO: 1428 - protein, 6 aa, Artificial Sequence
  Description of Artificial Sequence: Synthetic peptide
NGRAHA

SEQ ID NO: 1429 - protein, 7 aa, Artificial Sequence
  Description of Artificial Sequence: Synthetic peptide
QPEHSST

SEQ ID NO: 1430 - protein, 7 aa, Artificial Sequence
  Description of Artificial Sequence: Synthetic peptide
VNTANST

SEQ ID NO: 1431 - protein, 7 aa, Artificial Sequence
  Description of Artificial Sequence: Synthetic peptide
HGPMQKS

SEQ ID NO: 1432 - protein, 7 aa, Artificial Sequence
  Description of Artificial Sequence: Synthetic peptide
PHKPPLA

SEQ ID NO: 1433 - protein, 7 aa, Artificial Sequence
  Description of Artificial Sequence: Synthetic peptide
IKNNEMW

SEQ ID NO: 1434 - protein, 7 aa, Artificial Sequence
  Description of Artificial Sequence: Synthetic peptide
RNLDTPM

SEQ ID NO: 1435 - protein, 7 aa, Artificial Sequence
  Description of Artificial Sequence: Synthetic peptide
VDSHRQS

SEQ ID NO: 1436 - protein, 7 aa, Artificial Sequence
  Description of Artificial Sequence: Synthetic peptide
YDSKTKT

SEQ ID NO: 1437 - protein, 7 aa, Artificial Sequence
  Description of Artificial Sequence: Synthetic peptide
SQLPHQK

SEQ ID NO: 1438 - protein, 7 aa, Artificial Sequence
  Description of Artificial Sequence: Synthetic peptide
STMQQNT

SEQ ID NO: 1439 - protein, 7 aa, Artificial Sequence
  Description of Artificial Sequence: Synthetic peptide
TERYMTQ

SEQ ID NO: 1440 - protein, 7 aa, Artificial Sequence
  Description of Artificial Sequence: Synthetic peptide
DASLSTS

SEQ ID NO: 1441 - protein, 7 aa, Artificial Sequence
  Description of Artificial Sequence: Synthetic peptide
DLPNKKT

SEQ ID NO: 1442 - protein, 7 aa, Artificial Sequence
  Description of Artificial Sequence: Synthetic peptide
DLTAARL

SEQ ID NO: 1443 - protein, 7 aa, Artificial Sequence
  Description of Artificial Sequence: Synthetic peptide
EPHQFNY

SEQ ID NO: 1444 - protein, 7 aa, Artificial Sequence
  Description of Artificial Sequence: Synthetic peptide
EPQSNHT

SEQ ID NO: 1445 - protein, 7 aa, Artificial Sequence
  Description of Artificial Sequence: Synthetic peptide
MSSWPSQ

SEQ ID NO: 1446 - protein, 7 aa, Artificial Sequence
  Description of Artificial Sequence: Synthetic peptide
NPKHNAT

SEQ ID NO: 1447 - protein, 7 aa, Artificial Sequence
  Description of Artificial Sequence: Synthetic peptide
PDGMRTT

SEQ ID NO: 1448 - protein, 7 aa, Artificial Sequence
  Description of Artificial Sequence: Synthetic peptide
PNNNKTT

SEQ ID NO: 1449 - protein, 7 aa, Artificial Sequence
  Description of Artificial Sequence: Synthetic peptide
QSTTHDS

SEQ ID NO: 1450 - protein, 7 aa, Artificial Sequence
  Description of Artificial Sequence: Synthetic peptide
TGSKQKQ

SEQ ID NO: 1451 - protein, 7 aa, Artificial Sequence
  Description of Artificial Sequence: Synthetic peptide
SLKHQAL

SEQ ID NO: 1452 - protein, 7 aa, Artificial Sequence
  Description of Artificial Sequence: Synthetic peptide
SPIDGEQ

SEQ ID NO: 1453 - protein, 8 aa, Artificial Sequence
  Description of Artificial Sequence: Synthetic peptide
WIFPWIQL

SEQ ID NO: 1454 - protein, 9 aa, Artificial Sequence
  Description of Artificial Sequence: Synthetic peptide
CDCRGDCFC

SEQ ID NO: 1455 - protein, 5 aa, Artificial Sequence
  Description of Artificial Sequence: Synthetic peptide
CNGRC

SEQ ID NO: 1456 - protein, 7 aa, Artificial Sequence
  Description of Artificial Sequence: Synthetic peptide
CPRECES

SEQ ID NO: 1457 - protein, 10 aa, Artificial Sequence
  Description of Artificial Sequence: Synthetic peptide
CTTHWGFTLC

SEQ ID NO: 1458 - protein, 9 aa, Artificial Sequence
  Description of Artificial Sequence: Synthetic peptide
CGRRAGGSC

SEQ ID NO: 1459 - protein, 9 aa, Artificial Sequence
  Description of Artificial Sequence: Synthetic peptide
CKGGRAKDC

SEQ ID NO: 1460 - protein, 9 aa, Artificial Sequence
  Description of Artificial Sequence: Synthetic peptide
CVPELGHEC

SEQ ID NO: 1461 - protein, 9 aa, Artificial Sequence
  Description of Artificial Sequence: Synthetic peptide
CRRETAWAK

SEQ ID NO: 1462 - protein, 14 aa, Artificial Sequence
  Description of Artificial Sequence: Synthetic peptide
VSWFSHRYSPFAVS

SEQ ID NO: 1463 - protein, 13 aa, Artificial Sequence
  Description of Artificial Sequence: Synthetic peptide
GYRDGYAGPILYN

SEQ ID NO: 1464 - protein, 7 aa, Artificial Sequence
  Description of Artificial Sequence: Synthetic peptide
  MOD_RES (1)..(3): Any amino acid
  MOD_RES (5)..(7): Any amino acid
XXXYXXX

SEQ ID NO: 1465 - protein, 4 aa, Artificial Sequence
  Description of Artificial Sequence: Synthetic peptide
  MOD_RES (2)..(2): Glu or Met
YXNW

SEQ ID NO: 1466 - protein, 7 aa, Artificial Sequence
  Description of Artificial Sequence: Synthetic peptide
RPLPPLP

SEQ ID NO: 1467 - protein, 7 aa, Artificial Sequence
  Description of Artificial Sequence: Synthetic peptide
APPLPPR

SEQ ID NO: 1468 - protein, 12 aa, Artificial Sequence
  Description of Artificial Sequence: Synthetic peptide
DVFYPYPYASGS

SEQ ID NO: 1469 - protein, 6 aa, Artificial Sequence
  Description of Artificial Sequence: Synthetic peptide
MYWYPY

SEQ ID NO: 1470 - protein, 12 aa, Artificial Sequence
  Description of Artificial Sequence: Synthetic peptide
DITWDQLWDLMK

SEQ ID NO: 1471 - protein, 8 aa, Artificial Sequence
  Description of Artificial Sequence: Synthetic peptide
  MOD_RES (5)..(5): Gly or Leu
CWDDXWLC

SEQ ID NO: 1472 - protein, 14 aa, Artificial Sequence
  Description of Artificial Sequence: Synthetic peptide
EWCEYLGGYLRCYA

SEQ ID NO: 1473 - protein, 14 aa, Artificial Sequence
  Description of Artificial Sequence: Synthetic peptide
  MOD_RES (2)..(2): Any amino acid
  MOD_RES (4)..(5): Any amino acid
  MOD_RES (8)..(8): Any amino acid
  MOD_RES (11)..(11): Any amino acid
  MOD_RES (13)..(13): Any amino acid
YXCXXGPXTWXCXP

SEQ ID NO: 1474 - protein, 14 aa, Artificial Sequence
  Description of Artificial Sequence: Synthetic peptide
IEGPTLRQWLAARA

SEQ ID NO: 1475 - protein, 5 aa, Artificial Sequence
  Description of Artificial Sequence: Synthetic peptide
  MOD_RES (3)..(4): Any amino acid
  MOD_RES (5)..(5): Tyr, Trp, Phe, or His
LWXXX

SEQ ID NO: 1476 - protein, 7 aa, Artificial Sequence
  Description of Artificial Sequence: Synthetic peptide
  MOD_RES (1)..(1): Any amino acid
  MOD_RES (3)..(4): Any amino acid
XFXXYLW

SEQ ID NO: 1477 - protein, 13 aa, Artificial Sequence
  Description of Artificial Sequence: Synthetic peptide
SSIISHFRWGLCD

SEQ ID NO: 1478 - protein, 13 aa, Artificial Sequence
  Description of Artificial Sequence: Synthetic peptide
MSRPACPPNDKYE

SEQ ID NO: 1479 - protein, 8 aa, Artificial Sequence
  Description of Artificial Sequence: Synthetic peptide
CLRSGRGC

SEQ ID NO: 1480 - protein, 9 aa, Artificial Sequence
  Description of Artificial Sequence: Synthetic peptide
CHWMFSPWC

SEQ ID NO: 1481 - protein, 4 aa, Artificial Sequence
  Description of Artificial Sequence: Synthetic peptide
  MOD_RES (2)..(3): Any amino acid
WXXF

SEQ ID NO: 1482 - protein, 8 aa, Artificial Sequence
  Description of Artificial Sequence: Synthetic peptide
CSSRLDAC

SEQ ID NO: 1483 - protein, 7 aa, Artificial Sequence
  Description of Artificial Sequence: Synthetic peptide
CLPVASC

SEQ ID NO: 1484 - protein, 13 aa, Artificial Sequence
  Description of Artificial Sequence: Synthetic peptide
CGFECVRQCPERC

SEQ ID NO: 1485 - protein, 13 aa, Artificial Sequence
  Description of Artificial Sequence: Synthetic peptide
CVALCREACGEGC

SEQ ID NO: 1486 - protein, 9 aa, Artificial Sequence
  Description of Artificial Sequence: Synthetic peptide
SWCEPGWCR

SEQ ID NO: 1487 - protein, 7 aa, Artificial Sequence
  Description of Artificial Sequence: Synthetic peptide
YSGKWGW

SEQ ID NO: 1488 - protein, 7 aa, Artificial Sequence
  Description of Artificial Sequence: Synthetic peptide
GLSGGRS

SEQ ID NO: 1489 - protein, 7 aa, Artificial Sequence
  Description of Artificial Sequence: Synthetic peptide
LMLPRAD

SEQ ID NO: 1490 - protein, 9 aa, Artificial Sequence
  Description of Artificial Sequence: Synthetic peptide
CSCFRDVCC

SEQ ID NO: 1491 - protein, 9 aa, Artificial Sequence
  Description of Artificial Sequence: Synthetic peptide
CRDVVSVIC

SEQ ID NO: 1492 - protein, 6 aa, Artificial Sequence
  Description of Artificial Sequence: Synthetic peptide
MARSGL

SEQ ID NO: 1493 - protein, 6 aa, Artificial Sequence
  Description of Artificial Sequence: Synthetic peptide
MARAKE

SEQ ID NO: 1494 - protein, 6 aa, Artificial Sequence
  Description of Artificial Sequence: Synthetic peptide
MSRTMS

SEQ ID NO: 1495 - protein, 6 aa, Artificial Sequence
  Description of Artificial Sequence: Synthetic peptide
KCCYSL

SEQ ID NO: 1496 - protein, 14 aa, Artificial Sequence
  Description of Artificial Sequence: Synthetic peptide
MYWGDSHWLQYWYE

SEQ ID NO: 1497 - protein, 7 aa, Artificial Sequence
  Description of Artificial Sequence: Synthetic peptide
MQLPLAT

SEQ ID NO: 1498 - protein, 4 aa, Artificial Sequence
  Description of Artificial Sequence: Synthetic peptide
EWLS

SEQ ID NO: 1499 - protein, 4 aa, Artificial Sequence
  Description of Artificial Sequence: Synthetic peptide
SNEW

SEQ ID NO: 1500 - protein, 4 aa, Artificial Sequence
  Description of Artificial Sequence: Synthetic peptide
TNYL

SEQ ID NO: 1501 - protein, 12 aa, Artificial Sequence
  Description of Artificial Sequence: Synthetic peptide
WDLAWMFRLPVG

SEQ ID NO: 1502 - protein, 13 aa, Artificial Sequence
  Description of Artificial Sequence: Synthetic peptide
CTVALPGGYVRVC

SEQ ID NO: 1503 - protein, 13 aa, Artificial Sequence
  Description of Artificial Sequence: Synthetic peptide
CVAYCIEHHCWTC

SEQ ID NO: 1504 - protein, 12 aa, Artificial Sequence
  Description of Artificial Sequence: Synthetic peptide
CVFAHNYDYLVC

SEQ ID NO: 1505 - protein, 10 aa, Artificial Sequence
  Description of Artificial Sequence: Synthetic peptide
CVFTSNYAFC

SEQ ID NO: 1506 - protein, 7 aa, Artificial Sequence
  Description of Artificial Sequence: Synthetic peptide
VHSPNKK

SEQ ID NO: 1507 - protein, 7 aa, Artificial Sequence
  Description of Artificial Sequence: Synthetic peptide
CRGDGWC

SEQ ID NO: 1508 - protein, 6 aa, Artificial Sequence
  Description of Artificial Sequence: Synthetic peptide
  MOD_RES (1)..(1): Any amino acid
  MOD_RES (6)..(6): Any amino acid
XRGCDX

SEQ ID NO: 1509 - protein, 4 aa, Artificial Sequence
  Description of Artificial Sequence: Synthetic peptide
  MOD_RES (2)..(3): Any amino acid
  MOD_RES (4)..(4): Ser or Thr
PXXX

SEQ ID NO: 1510 - protein, 11 aa, Artificial Sequence
  Description of Artificial Sequence: Synthetic peptide
SGKGPRQITAL

SEQ ID NO: 1511 - protein, 14 aa, Artificial Sequence
  Description of Artificial Sequence: Synthetic peptide
  MOD_RES (10)..(10): Ala or Gln
  MOD_RES (11)..(11): Asn or Ala
  MOD_RES (12)..(12): Leu or Tyr
  MOD_RES (13)..(13): Thr, Val, Met, or Arg
  MOD_RES (14)..(14): Arg or Lys
AAAAAAAAAXXXXX

SEQ ID NO: 1512 - protein, 6 aa, Artificial Sequence
  Description of Artificial Sequence: Synthetic peptide
VYMSPF

SEQ ID NO: 1513 - protein, 7 aa, Artificial Sequence
  Description of Artificial Sequence: Synthetic peptide
ATWLPPR

SEQ ID NO: 1514 - protein, 12 aa, Artificial Sequence
  Description of Artificial Sequence: Synthetic peptide
HTMYYHHYQHHL

SEQ ID NO: 1515 - protein, 19 aa, Artificial Sequence
  Description of Artificial Sequence: Synthetic peptide
SEVGCRAGPLQWLCEKYFG

SEQ ID NO: 1516 - protein, 18 aa, Artificial Sequence
  Description of Artificial Sequence: Synthetic peptide
CGLLPVGRPDRNVWRWLC

SEQ ID NO: 1517 - protein, 15 aa, Artificial Sequence
  Description of Artificial Sequence: Synthetic peptide
CKGQCDRFKGLPWEC

SEQ ID NO: 1518 - protein, 5 aa, Artificial Sequence
  Description of Artificial Sequence: Synthetic peptide
SGRSA

SEQ ID NO: 1519 - protein, 4 aa, Artificial Sequence
  Description of Artificial Sequence: Synthetic peptide
WGFP

SEQ ID NO: 1520 - protein, 17 aa, Artificial Sequence
  Description of Artificial Sequence: Synthetic peptide
AEPMPHSLNFSQYLWYT

SEQ ID NO: 1521 - protein, 6 aa, Artificial Sequence
  Description of Artificial Sequence: Synthetic peptide
  MOD_RES (4)..(4): Trp or Phe
WAYXSP

SEQ ID NO: 1522 - protein, 7 aa, Artificial Sequence
  Description of Artificial Sequence: Synthetic peptide
IELLQAR

SEQ ID NO: 1523 - protein, 16 aa, Artificial Sequence
  Description of Artificial Sequence: Synthetic peptide
AYTKCSRQWRTCMTTH

SEQ ID NO: 1524 - protein, 15 aa, Artificial Sequence
  Description of Artificial Sequence: Synthetic peptide
PQNSKIPGPTFLDPH

SEQ ID NO: 1525 - protein, 15 aa, Artificial Sequence
  Description of Artificial Sequence: Synthetic peptide
SMEPALPDWWWKMFK

SEQ ID NO: 1526 - protein, 16 aa, Artificial Sequence
  Description of Artificial Sequence: Synthetic peptide
ANTPCGPYTHDCPVKR

SEQ ID NO: 1527 - protein, 12 aa, Artificial Sequence
  Description of Artificial Sequence: Synthetic peptide
TACHQHVRMVRP

SEQ ID NO: 1528 - protein, 12 aa, Artificial Sequence
  Description of Artificial Sequence: Synthetic peptide
VPWMEPAYQRFL

SEQ ID NO: 1529 - protein, 8 aa, Artificial Sequence
  Description of Artificial Sequence: Synthetic peptide
DPRATPGS

SEQ ID NO: 1530 - protein, 12 aa, Artificial Sequence
  Description of Artificial Sequence: Synthetic peptide
FRPNRAQDYNTN

SEQ ID NO: 1531 - protein, 9 aa, Artificial Sequence
  Description of Artificial Sequence: Synthetic peptide
CTKNSYLMC

SEQ ID NO: 1532 - protein, 11 aa, Artificial Sequence
  Description of Artificial Sequence: Synthetic peptide
  MOD_RES (2)..(2): Gln or Arg
  MOD_RES (3)..(3): Leu or Arg
  MOD_RES (5)..(5): Gly or Asn
  MOD_RES (6)..(7): Any amino acid
  MOD_RES (9)..(9): Ala or Val
CXXTXXXGXGC

SEQ ID NO: 1533 - protein, 9 aa, Artificial Sequence
  Description of Artificial Sequence: Synthetic peptide
CPIEDRPMC

SEQ ID NO: 1534 - protein, 12 aa, Artificial Sequence
  Description of Artificial Sequence: Synthetic peptide
HEWSYLAPYPWF

SEQ ID NO: 1535 - protein, 9 aa, Artificial Sequence
  Description of Artificial Sequence: Synthetic peptide
MCPKHPLGC

SEQ ID NO: 1536 - protein, 15 aa, Artificial Sequence
  Description of Artificial Sequence: Synthetic peptide
RMWPSSTVNLSAGRR

SEQ ID NO: 1537 - protein, 20 aa, Artificial Sequence
  Description of Artificial Sequence: Synthetic peptide
SAKTAVSQRVWLPSHRGGEP

SEQ ID NO: 1538 - protein, 20 aa, Artificial Sequence
  Description of Artificial Sequence: Synthetic peptide
KSREHVNNSACPSKRITAAL

SEQ ID NO: 1539 - protein, 4 aa, Artificial Sequence
  Description of Artificial Sequence: Synthetic peptide
EGFR

SEQ ID NO: 1540 - protein, 6 aa, Artificial Sequence
  Description of Artificial Sequence: Synthetic peptide
AGLGVR

SEQ ID NO: 1541 - protein, 15 aa, Artificial Sequence
  Description of Artificial Sequence: Synthetic peptide
GTRQGHTMRLGVSDG

SEQ ID NO: 1542 - protein, 15 aa, Artificial Sequence
  Description of Artificial Sequence: Synthetic peptide
IAGLATPGWSHWLAL

SEQ ID NO: 1543 - protein, 7 aa, Artificial Sequence
  Description of Artificial Sequence: Synthetic peptide
SMSIARL

SEQ ID NO: 1544 - protein, 7 aa, Artificial Sequence
  Description of Artificial Sequence: Synthetic peptide
HTFEPGV

SEQ ID NO: 1545 - protein, 15 aa, Artificial Sequence
  Description of Artificial Sequence: Synthetic peptide
NTSLKRISNKRIRRK

SEQ ID NO: 1546 - protein, 15 aa, Artificial Sequence
  Description of Artificial Sequence: Synthetic peptide
LRIKRKRRKRKKTRK

SEQ ID NO: 1547 - DNA, 21 bp, Adeno-associated virus 2
agcvvmdcaggarscascaac

SEQ ID NO: 1548 - protein, 7 aa, Artificial Sequence
  Description of Artificial Sequence: Synthetic peptide
SDSGASN

SEQ ID NO: 1549 - protein, 7 aa, Artificial Sequence
  Description of Artificial Sequence: Synthetic peptide
SPSGASN

SEQ ID NO: 1550 - protein, 7 aa, Artificial Sequence
  Description of Artificial Sequence: Synthetic peptide
SHSGASN

SEQ ID NO: 1551 - protein, 7 aa, Artificial Sequence
  Description of Artificial Sequence: Synthetic peptide
SRSGASN

SEQ ID NO: 1552 - protein, 7 aa, Artificial Sequence
  Description of Artificial Sequence: Synthetic peptide
SKSGASN

SEQ ID NO: 1553 - protein, 7 aa, Artificial Sequence
  Description of Artificial Sequence: Synthetic peptide
SNSGASN

SEQ ID NO: 1554 - protein, 7 aa, Artificial Sequence
  Description of Artificial Sequence: Synthetic peptide
SGSGASN

SEQ ID NO: 1555 - protein, 7 aa, Artificial Sequence
  Description of Artificial Sequence: Synthetic peptide
SASGASN

SEQ ID NO: 1556 - protein, 7 aa, Artificial Sequence
  Description of Artificial Sequence: Synthetic peptide
SESGTSN

SEQ ID NO: 1557 - protein, 7 aa, Artificial Sequence
  Description of Artificial Sequence: Synthetic peptide
STTGGSN

SEQ ID NO: 1558 - protein, 7 aa, Artificial Sequence
  Description of Artificial Sequence: Synthetic peptide
SSAGSTN

SEQ ID NO: 1559 - protein, 6 aa, Artificial Sequence
  Description of Artificial Sequence: Synthetic peptide
NNDSQA

SEQ ID NO: 1560 - protein, 6 aa, Artificial Sequence
  Description of Artificial Sequence: Synthetic peptide
NNRNQA

SEQ ID NO: 1561 - protein, 6 aa, Artificial Sequence
  Description of Artificial Sequence: Synthetic peptide
NNNKQA

SEQ ID NO: 1562 - protein, 6 aa, Artificial Sequence
  Description of Artificial Sequence: Synthetic peptide
NAKRQA

SEQ ID NO: 1563 - protein, 6 aa, Artificial Sequence
  Description of Artificial Sequence: Synthetic peptide
NDEHQA

SEQ ID NO: 1564 - protein, 6 aa, Artificial Sequence
  Description of Artificial Sequence: Synthetic peptide
NTSQKA

SEQ ID NO: 1565 - protein, 25 aa, Artificial Sequence
  Description of Artificial Sequence: Synthetic peptide
YYLSRTNTPSGTDTQSRLVFSQAGA

SEQ ID NO: 1566 - protein, 25 aa, Artificial Sequence
  Description of Artificial Sequence: Synthetic peptide
YYLSRTNTDSGTETQSGLDFSQAGA

SEQ ID NO: 1567 - protein, 25 aa, Artificial Sequence
  Description of Artificial Sequence: Synthetic peptide
YYLSRTNTESGTPTQSALEFSQAGA

SEQ ID NO: 1568 - protein, 25 aa, Artificial Sequence
  Description of Artificial Sequence: Synthetic peptide
YYLSRTNTHSGTHTQSPLHFSQAGA

SEQ ID NO: 1569 - protein, 25 aa, Artificial Sequence
  Description of Artificial Sequence: Synthetic peptide
YYLSRTNTSSGTITISHLIFSQAGA

SEQ ID NO: 1570 - protein, 25 aa, Artificial Sequence
  Description of Artificial Sequence: Synthetic peptide
YYLSRTNTRSGIMTKSSLMFSQAGA

SEQ ID NO: 1571 - protein, 25 aa, Artificial Sequence
  Description of Artificial Sequence: Synthetic peptide
YYLSRTNTKSGRKTLSNLSFSQAGA

SEQ ID NO: 1572 - protein, 25 aa, Artificial Sequence
  Description of Artificial Sequence: Synthetic peptide
YYLSRTNDGSGPVTPSKLRFSQRGA

SEQ ID NO: 1573 - protein, 25 aa, Artificial Sequence
  Description of Artificial Sequence: Synthetic peptide
YYLSRTNAASGHATHSDLKFSQPGA

SEQ ID NO: 1574 - protein, 25 aa, Artificial Sequence
  Description of Artificial Sequence: Synthetic peptide
YYLSRTNGQAGSLTMSELGFSQVGA

SEQ ID NO: 1575 - protein, 25 aa, Artificial Sequence
  Description of Artificial Sequence: Synthetic peptide
YYLSRTNSTGGNQTTSQLLFSQLSA

SEQ ID NO: 1576 - protein, 25 aa, Artificial Sequence
  Description of Artificial Sequence: Synthetic peptide
YFLSRTNNNTGLNTNSTLNFSQGRA

SEQ ID NO: 1577 - protein, 16 aa, Artificial Sequence
  Description of Artificial Sequence: Synthetic peptide
SKTGADNNNSEYSWTG

SEQ ID NO: 1578 - protein, 16 aa, Artificial Sequence
  Description of Artificial Sequence: Synthetic peptide
SKTDADNNNSEYSWTG

SEQ ID NO: 1579 - protein, 16 aa, Artificial Sequence
  Description of Artificial Sequence: Synthetic peptide
SKTEADNNNSEYSWTG

SEQ ID NO: 1580 - protein, 16 aa, Artificial Sequence
  Description of Artificial Sequence: Synthetic peptide
SKTPADNNNSEYSWTG

SEQ ID NO: 1581 - protein, 16 aa, Artificial Sequence
  Description of Artificial Sequence: Synthetic peptide
SKTHADNNNSEYSWTG

SEQ ID NO: 1582 - protein, 16 aa, Artificial Sequence
  Description of Artificial Sequence: Synthetic peptide
SKTQADNNNSEYSWTG

SEQ ID NO: 1583 - protein, 16 aa, Artificial Sequence
  Description of Artificial Sequence: Synthetic peptide
SKTIADNNNSEYSWTG

SEQ ID NO: 1584 - protein, 16 aa, Artificial Sequence
  Description of Artificial Sequence: Synthetic peptide
SKTMADNNNSEYSWTG

SEQ ID NO: 1585 - protein, 16 aa, Artificial Sequence
  Description of Artificial Sequence: Synthetic peptide
SKTRADNNNSEYSWTG

SEQ ID NO: 1586 - protein, 16 aa, Artificial Sequence
  Description of Artificial Sequence: Synthetic peptide
SKTNADNNNSEYSWTG

SEQ ID NO: 1587 - protein, 16 aa, Artificial Sequence
  Description of Artificial Sequence: Synthetic peptide
SKTVGRNNNSEYSWTG

SEQ ID NO: 1588 - protein, 16 aa, Artificial Sequence
  Description of Artificial Sequence: Synthetic peptide
SKTADRNNNSEYSWTG

SEQ ID NO: 1589 - protein, 16 aa, Artificial Sequence
  Description of Artificial Sequence: Synthetic peptide
SKKLSQNNNSKYSWQG

SEQ ID NO: 1590 - protein, 16 aa, Artificial Sequence
  Description of Artificial Sequence: Synthetic peptide
SKPTTGNNNSDYSWPG

SEQ ID NO: 1591 - protein, 16 aa, Artificial Sequence
  Description of Artificial Sequence: Synthetic peptide
STQKNENNNSNYSWPG

SEQ ID NO: 1592 - protein, 8 aa, Artificial Sequence
  Description of Artificial Sequence: Synthetic peptide
HKDDEGKF

SEQ ID NO: 1593 - protein, 8 aa, Artificial Sequence
  Description of Artificial Sequence: Synthetic peptide
HKDDNRKF

SEQ ID NO: 1594 - protein, 8 aa, Artificial Sequence
  Description of Artificial Sequence: Synthetic peptide
HKDDTNKF

SEQ ID NO: 1595 - protein, 8 aa, Artificial Sequence
  Description of Artificial Sequence: Synthetic peptide
HEDSDKNF

SEQ ID NO: 1596 - protein, 8 aa, Artificial Sequence
  Description of Artificial Sequence: Synthetic peptide
HRDGADSF

SEQ ID NO: 1597 - protein, 8 aa, Artificial Sequence
  Description of Artificial Sequence: Synthetic peptide
HGDNKSRF

SEQ ID NO: 1598 - protein, 14 aa, Artificial Sequence
  Description of Artificial Sequence: Synthetic peptide
KQGSEKTNVDFEEV

SEQ ID NO: 1599 - protein, 14 aa, Artificial Sequence
  Description of Artificial Sequence: Synthetic peptide
KQGSEKTNVDSEEV

SEQ ID NO: 1600 - protein, 14 aa, Artificial Sequence
  Description of Artificial Sequence: Synthetic peptide
KQGSEKTNVDVEEV

SEQ ID NO: 1601 - protein, 14 aa, Artificial Sequence
  Description of Artificial Sequence: Synthetic peptide
KQGSDKTNVDDAGV

SEQ ID NO: 1602 - protein, 14 aa, Artificial Sequence
  Description of Artificial Sequence: Synthetic peptide
KQGSSKTNVDPREV

SEQ ID NO: 1603 - protein, 14 aa, Artificial Sequence
  Description of Artificial Sequence: Synthetic peptide
KQGSRKTNVDHKQV

SEQ ID NO: 1604 - protein, 14 aa, Artificial Sequence
  Description of Artificial Sequence: Synthetic peptide
KQGSKGGNVDTNRV

SEQ ID NO: 1605 - protein, 14 aa, Artificial Sequence
  Description of Artificial Sequence: Synthetic peptide
KQGSGEANVDNGDV

SEQ ID NO: 1606 - protein, 14 aa, Artificial Sequence
  Description of Artificial Sequence: Synthetic peptide
KQDAAADNIDYDHV

SEQ ID NO: 1607 - protein, 14 aa, Artificial Sequence
  Description of Artificial Sequence: Synthetic peptide
KQSGTRSNAAASSV

SEQ ID NO: 1608 - protein, 14 aa, Artificial Sequence
  Description of Artificial Sequence: Synthetic peptide
KENTNTNDTELTNV

SEQ ID NO: 1609 - protein, 14 aa, Artificial Sequence
  Description of Artificial Sequence: Synthetic peptide
QRGNNVAATADVNT

SEQ ID NO: 1610 - protein, 14 aa, Artificial Sequence
  Description of Artificial Sequence: Synthetic peptide
QRGNNEAATADVNT

SEQ ID NO: 1611 - protein, 14 aa, Artificial Sequence
  Description of Artificial Sequence: Synthetic peptide
QRGNNPAATADVNT

SEQ ID NO: 1612 - protein, 14 aa, Artificial Sequence
  Description of Artificial Sequence: Synthetic peptide
QRGNNHAATADVNT

SEQ ID NO: 1613 - protein, 14 aa, Artificial Sequence
  Description of Artificial Sequence: Synthetic peptide
QEENNIAATPGVNT

SEQ ID NO: 1614 - protein, 14 aa, Artificial Sequence
  Description of Artificial Sequence: Synthetic peptide
QPPNNMAATHEVNT

SEQ ID NO: 1615 - protein, 14 aa, Artificial Sequence
  Description of Artificial Sequence: Synthetic peptide
QHHNNSAATTIVNT

SEQ ID NO: 1616 - protein, 14 aa, Artificial Sequence
  Description of Artificial Sequence: Synthetic peptide
QTTNNRAAFNMVET

SEQ ID NO: 1617 - protein, 14 aa, Artificial Sequence
  Description of Artificial Sequence: Synthetic peptide
QKKNNNAASKKVAT

SEQ ID NO: 1618 - protein, 14 aa, Artificial Sequence
  Description of Artificial Sequence: Synthetic peptide
QGGNNKAADDAVKT

SEQ ID NO: 1619 - protein, 14 aa, Artificial Sequence
  Description of Artificial Sequence: Synthetic peptide
QAAKGGAADDAVKT

SEQ ID NO: 1620 - protein, 14 aa, Artificial Sequence
  Description of Artificial Sequence: Synthetic peptide
QDDRAAAANESVDT

SEQ ID NO: 1621 - protein, 14 aa, Artificial Sequence
  Description of Artificial Sequence: Synthetic peptide
QQQHDDAAYQRVHT

SEQ ID NO: 1622 - protein, 14 aa, Artificial Sequence
  Description of Artificial Sequence: Synthetic peptide
QSSSSLAAVSTVQT

SEQ ID NO: 1623 - protein, 14 aa, Artificial Sequence
  Description of Artificial Sequence: Synthetic peptide
QNNQTTAAIRNVTT

SEQ ID NO: 1624 - protein, 12 aa, Artificial Sequence
  Description of Artificial Sequence: Synthetic peptide
NYNKKSDNVDFT

SEQ ID NO: 1625 - protein, 12 aa, Artificial Sequence
  Description of Artificial Sequence: Synthetic peptide
NYNKKSENVDFT

SEQ ID NO: 1626 - protein, 12 aa, Artificial Sequence
  Description of Artificial Sequence: Synthetic peptide
NYNKKSLNVDFT

SEQ ID NO: 1627 - protein, 12 aa, Artificial Sequence
  Description of Artificial Sequence: Synthetic peptide
NYNKKSPNVDFT

SEQ ID NO: 1628 - protein, 12 aa, Artificial Sequence
  Description of Artificial Sequence: Synthetic peptide
NYSKKSHCVDFT

SEQ ID NO: 1629 - protein, 11 aa, Artificial Sequence
  Description of Artificial Sequence: Synthetic peptide
NYRKTIYVDFT

SEQ ID NO: 1630 - protein, 11 aa, Artificial Sequence
  Description of Artificial Sequence: Synthetic peptide
NYKEKKDVHFT

SEQ ID NO: 1631 - protein, 11 aa, Artificial Sequence
  Description of Artificial Sequence: Synthetic peptide
NYGHRAIVQFT

SEQ ID NO: 1632 - protein, 11 aa, Artificial Sequence
  Description of Artificial Sequence: Synthetic peptide
NYANHQFVVCT

SEQ ID NO: 1633 - protein, 12 aa, Artificial Sequence
  Description of Artificial Sequence: Synthetic peptide
NYDDDPTGVLLT

SEQ ID NO: 1634 - protein, 11 aa, Artificial Sequence
  Description of Artificial Sequence: Synthetic peptide
NYDDPTGVLLT

SEQ ID NO: 1635 - protein, 11 aa, Artificial Sequence
  Description of Artificial Sequence: Synthetic peptide
NFEQQNSVEWT

SEQ ID NO: 1636 - protein, 7 aa, Artificial Sequence
  Description of Artificial Sequence: Synthetic peptide
SQSGASN

SEQ ID NO: 1637 - protein, 6 aa, Artificial Sequence
  Description of Artificial Sequence: Synthetic peptide
NNGSQA

SEQ ID NO: 1638 - protein, 25 aa, Artificial Sequence
  Description of Artificial Sequence: Synthetic peptide
YYLSRTNTPSGTTTWSRLQFSQAGA

SEQ ID NO: 1639 - protein, 16 aa, Artificial Sequence
  Description of Artificial Sequence: Synthetic peptide
SKTSADNNNSEYSWTG

SEQ ID NO: 1640 - protein, 8 aa, Artificial Sequence
  Description of Artificial Sequence: Synthetic peptide
HKDDEEKF

SEQ ID NO: 1641 - protein, 14 aa, Artificial Sequence
  Description of Artificial Sequence: Synthetic peptide
KQGSEKTNVDIEEV

SEQ ID NO: 1642 - protein, 14 aa, Artificial Sequence
  Description of Artificial Sequence: Synthetic peptide
QRGNNQAATADVNT

SEQ ID NO: 1643 - protein, 12 aa, Artificial Sequence
  Description of Artificial Sequence: Synthetic peptide
NYNKKSVNVDFT

SEQ ID NO: 1644 - protein, 42 aa, Artificial Sequence
  Description of Artificial Sequence: Synthetic polypeptide
SQSGASNYNTPSGTTTQSRLQFSTSADNNNSEYSWTGATKYH

SEQ ID NO: 1645 - protein, 42 aa, Artificial Sequence
  Description of Artificial Sequence: Synthetic polypeptide
SASGASNFNSEGGSLTQSSLGFSTDGENNNSDFSWTGATKYH

SEQ ID NO: 1646 - protein, 42 aa, Artificial Sequence
  Description of Artificial Sequence: Synthetic polypeptide
SQSGASNYNTPSGTTTQSRLQFSTDGENNNSDFSWTGATKYH

SEQ ID NO: 1647 - protein, 42 aa, Artificial Sequence
  Description of Artificial Sequence: Synthetic polypeptide
SASGASNYNTPSGTTTQSRLQFSTSADNNNSEFSWPGATTYH

SEQ ID NO: 1648 - protein, 42 aa, Artificial Sequence
  Description of Artificial Sequence: Synthetic polypeptide
SQSGASNFNSEGGSLTQSSLGFSTDGENNNSDFSWTGATKYH

SEQ ID NO: 1649 - protein, 42 aa, Artificial Sequence
  Description of Artificial Sequence: Synthetic polypeptide
SASGASNYNTPSGSLTQSSLGFSTDGENNNSDFSWTGATKYH

SEQ ID NO: 1650 - protein, 42 aa, Artificial Sequence
  Description of Artificial Sequence: Synthetic polypeptide
SQSGASNYNTPSGTTTQSRLQFSTSADNNNSDFSWTGATKYH

SEQ ID NO: 1651 - protein, 42 aa, Artificial Sequence
  Description of Artificial Sequence: Synthetic polypeptide
SGAGASNFNSEGGSLTQSSLGFSTDGENNNSDFSWTGATKYH

SEQ ID NO: 1652 - protein, 7 aa, Artificial Sequence
  Description of Artificial Sequence: Synthetic peptide
SGAGASN

SEQ ID NO: 1653 - protein, 15 aa, Artificial Sequence
  Description of Artificial Sequence: Synthetic peptide
NSEGGSLTQSSLGFS

SEQ ID NO: 1654 - protein, 11 aa, Artificial Sequence
  Description of Artificial Sequence: Synthetic peptide
TDGENNNSDFS

SEQ ID NO: 1655 - protein, 10 aa, Artificial Sequence
  Description of Artificial Sequence: Synthetic peptide
SEFSWPGATT

SEQ ID NO: 1656 - protein, 13 aa, Artificial Sequence
  Description of Artificial Sequence: Synthetic peptide
TSADNNNSDFSWT

SEQ ID NO: 1657 - protein, 8 aa, Artificial Sequence
  Description of Artificial Sequence: Synthetic peptide
SQSGASNY

SEQ ID NO: 1658 - protein, 15 aa, Artificial Sequence
  Description of Artificial Sequence: Synthetic peptide
NTPSGTTTQSRLQFS

SEQ ID NO: 1659 - protein, 19 aa, Artificial Sequence
  Description of Artificial Sequence: Synthetic peptide
TSADNNNSEYSWTGATKYH

SEQ ID NO: 1660 - protein, 8 aa, Artificial Sequence
  Description of Artificial Sequence: Synthetic peptide
SASGASNF

SEQ ID NO: 1661 - protein, 19 aa, Artificial Sequence
  Description of Artificial Sequence: Synthetic peptide
TDGENNNSDFSWTGATKYH

SEQ ID NO: 1662 - protein, 8 aa, Artificial Sequence
  Description of Artificial Sequence: Synthetic peptide
SASGASNY

SEQ ID NO: 1663 - protein, 19 aa, Artificial Sequence
  Description of Artificial Sequence: Synthetic peptide
TSADNNNSEFSWPGATTYH

SEQ ID NO: 1664 - protein, 15 aa, Artificial Sequence
  Description of Artificial Sequence: Synthetic peptide
NTPSGSLTQSSLGFS

SEQ ID NO: 1665 - protein, 19 aa, Artificial Sequence
  Description of Artificial Sequence: Synthetic peptide
TSADNNNSDFSWTGATKYH

SEQ ID NO: 1666 - protein, 8 aa, Artificial Sequence
  Description of Artificial Sequence: Synthetic peptide
SGAGASNF

SEQ ID NO: 1667 - DNA, 48 bp, Artificial Sequence
  Description of Artificial Sequence: Synthetic oligonucleotide
  modified_base (20)..(20): a, c, g, or t
  modified_base (35)..(35): a, c, g, or t
ctccagvvsvvsmrsrvcvnsgcagctdhcvvsrnsgtcvmsacacaa

SEQ ID NO: 1668 - DNA, 48 bp, Artificial Sequence
  Description of Artificial Sequence: Synthetic oligonucleotide
ctccagagaggcaacagacaagcagctaccgcagatgtcaacacacaa

SEQ ID NO: 1669 - protein, 7 aa, Artificial Sequence
  Description of Artificial Sequence: Synthetic peptide
SAAGASN

SEQ ID NO: 1670 - protein, 24 aa, Artificial Sequence
  Description of Artificial Sequence: Synthetic peptide
YFLSRTNTESGSTTQSTLRFSQAG

SEQ ID NO: 1671 - protein, 13 aa, Artificial Sequence
  Description of Artificial Sequence: Synthetic peptide
SKTSADNNNSDFS

SEQ ID NO: 1672 - protein, 14 aa, Artificial Sequence
  Description of Artificial Sequence: Synthetic peptide
KQGSEKTDVDIDKV

SEQ ID NO: 1673 - protein, 7 aa, Artificial Sequence
  Description of Artificial Sequence: Synthetic peptide
STAGASN

SEQ ID NO: 1674 - protein, 24 aa, Artificial Sequence
  Description of Artificial Sequence: Synthetic peptide
YFLSRTNTTSGIETQSTLRFSQAG

SEQ ID NO: 1675 - protein, 13 aa, Artificial Sequence
  Description of Artificial Sequence: Synthetic peptide
SKTDGENNNSDFS

SEQ ID NO: 1676 - protein, 14 aa, Artificial Sequence
  Description of Artificial Sequence: Synthetic peptide
KQGAAADDVEIDGV

SEQ ID NO: 1677 - protein, 7 aa, Artificial Sequence
  Description of Artificial Sequence: Synthetic peptide
SEAGASN

SEQ ID NO: 1678 - protein, 24 aa, Artificial Sequence
  Description of Artificial Sequence: Synthetic peptide
YYLSRTNTPSGTTTQSRLQFSQAG

SEQ ID NO: 1679 - protein, 13 aa, Artificial Sequence
  Description of Artificial Sequence: Synthetic peptide
SKTSADNNNSEYS

SEQ ID NO: 1680 - protein, 14 aa, Artificial Sequence
  Description of Artificial Sequence: Synthetic peptide
KQGSEKTNVDIEKV

SEQ ID NO: 1681 - protein, 24 aa, Artificial Sequence
  Description of Artificial Sequence: Synthetic peptide
YFLSRTNDASGSDTKSTLLFSQAG

SEQ ID NO: 1682 - protein, 13 aa, Artificial Sequence
  Description of Artificial Sequence: Synthetic peptide
STTPSENNNSEYS

SEQ ID NO: 1683 - protein, 7 aa, Artificial Sequence
  Description of Artificial Sequence: Synthetic peptide
SAAGATN

SEQ ID NO: 1684 - protein, 24 aa, Artificial Sequence
  Description of Artificial Sequence: Synthetic peptide
YFLSRTNGEAGSATLSELRFSQAG

SEQ ID NO: 1685 - protein, 8 aa, Artificial Sequence
  Description of Artificial Sequence: Synthetic peptide
HGDDADRF

SEQ ID NO: 1686 - protein, 14 aa, Artificial Sequence
  Description of Artificial Sequence: Synthetic peptide
KQGAEKSDVEVDRV

SEQ ID NO: 1687 - protein, 14 aa, Artificial Sequence
  Description of Artificial Sequence: Synthetic peptide
KQDSGGDNIDIDQV

SEQ ID NO: 1688 - protein, 7 aa, Artificial Sequence
  Description of Artificial Sequence: Synthetic peptide
SDAGASN

SEQ ID NO: 1689 - protein, 24 aa, Artificial Sequence
  Description of Artificial Sequence: Synthetic peptide
YFLSRTNTEGGHDTQSTLRFSQAG

SEQ ID NO: 1690 - protein, 14 aa, Artificial Sequence
  Description of Artificial Sequence: Synthetic peptide
KEDGGGSDVAIDEV

SEQ ID NO: 1691 - protein, 7 aa, Artificial Sequence
  Description of Artificial Sequence: Synthetic peptide
SNAGASN

SEQ ID NO: 1692 - protein, 24 aa, Artificial Sequence
  Description of Artificial Sequence: Synthetic peptide
YFLSRTNGEAGSATLSELRFSQPG

SEQ ID NO: 1693 - DNA, 21 bp, Artificial Sequence
  Description of Artificial Sequence: Synthetic oligonucleotide
agcvvmdcaggarscascaac

SEQ ID NO: 1694 - DNA, 18 bp, Artificial Sequence
  Description of Artificial Sequence: Synthetic oligonucleotide
aacracrrsmrsmaggca

SEQ ID NO: 1695 - DNA, 24 bp, Artificial Sequence
  Description of Artificial Sequence: Synthetic oligonucleotide
cacrrggacrrcrmsrrsarsttt

SEQ ID NO: 1696 - DNA, 75 bp, Artificial Sequence
  Description of Artificial Sequence: Synthetic oligonucleotide
  modified_base (35)..(35): a, c, g, or t
tatttcttgagcagaacaaacrvcvvsrscggamncvhsacgmhstcavvscttvdsttttctcagsbcrgsgcg

SEQ ID NO: 1697 - DNA, 48 bp, Artificial Sequence
  Description of Artificial Sequence: Synthetic oligonucleotide
  modified_base (11)..(11): a, c, g, or t
tcaamammavnsrvcsrsaacaacaacagtrasttctcgtggmmagga

SEQ ID NO: 1698 - DNA, 42 bp, Artificial Sequence
  Description of Artificial Sequence: Synthetic oligonucleotide
  modified_base (31)..(31): a, c, g, or t
aagsaarrcrscrvsrvarvcratrycgmsnhcrvmvrsgtc

SEQ ID NO: 1699 - DNA, 42 bp, Artificial Sequence
  Description of Artificial Sequence: Synthetic oligonucleotide
  modified_base (17)..(17): a, c, g, or t
  modified_base (32)..(32): a, c, g, or t
cagvvsvvsmrsrvcvnsgcagctdhcvvsrnsgtcvmsaca

SEQ ID NO: 1700 - DNA, 33 bp, Artificial Sequence
  Description of Artificial Sequence: Synthetic oligonucleotide
aactwcrvsvasmvsvhsddtgtgswstksact

SEQ ID NO: 1701 - DNA, 30 bp, Artificial Sequence
  Description of Artificial Sequence: Synthetic oligonucleotide
ttgttgaacatcaccacgtgacgcacgttc

SEQ ID NO: 1702 - DNA, 30 bp, Artificial Sequence
  Description of Artificial Sequence: Synthetic oligonucleotide
tccccgtggttctactacataatgtggccg

SEQ ID NO: 1703 - DNA, 30 bp, Artificial Sequence
  Description of Artificial Sequence: Synthetic oligonucleotide
ttccacactccgttttggataatgttgaac

SEQ ID NO: 1704 - DNA, 30 bp, Artificial Sequence
  Description of Artificial Sequence: Synthetic oligonucleotide
agggacatccccagctccatgctgtggtcg

SEQ ID NO: 1705 - DNA, 30 bp, Artificial Sequence
  Description of Artificial Sequence: Synthetic oligonucleotide
agggacaacccctccgactcgccctaatcc

SEQ ID NO: 1706 - DNA, 30 bp, Artificial Sequence
  Description of Artificial Sequence: Synthetic oligonucleotide
tcctagtagaagacaccctctcactgcccg

SEQ ID NO: 1707 - DNA, 30 bp, Artificial Sequence
  Description of Artificial Sequence: Synthetic oligonucleotide
agtaccatgtacacccactctcccagtgcc

SEQ ID NO: 1708 - DNA, 30 bp, Artificial Sequence
  Description of Artificial Sequence: Synthetic oligonucleotide
atatggacgttcatgctgatcaccataccg

SEQ ID NO: 1709 - DNA, 30 bp, Artificial Sequence
  Description of Artificial Sequence: Synthetic oligonucleotide
agcaggagctccttggcctcagcgtgcgag

SEQ ID NO: 1710 - DNA, 30 bp, Artificial Sequence
  Description of Artificial Sequence: Synthetic oligonucleotide
acaagcagcttcactatgacaaccactgac

SEQ ID NO: 1711 - DNA, 284 bp, Artificial Sequence
  Description of Artificial Sequence: Synthetic polynucleotide
  modified_base (59)..(59): a, c, g, or t
  modified_base (244)..(244): a, c, g, or t
cagcctaggaactggcttcctggaccctgttaccgccagcagagagtctcaamammavnsrvcsrsaacaacaacagtrasttctcctggmmaggagctaccaagtaccacctcaatggcagagactctctggtgaatcccggaccagctatggcaagccacrrggacrrcrmsrrsarsttttttcctcagagcggggttctcatctttgggaagsaarrcrscrvsrvarvcratrycgmsnhcrvmvrsgtcatgattacagacgaagaggagatctggac

SEQ ID NO: 1712 - DNA, 34 bp, Artificial Sequence
  Description of Artificial Sequence: Synthetic oligonucleotide
tgggacaatggcggtcgtctctcagagttktkkt

SEQ ID NO: 1713 - DNA, 35 bp, Artificial Sequence
  Description of Artificial Sequence: Synthetic oligonucleotide
agaggacckktcctcgatggttcatggtggagtta

SEQ ID NO: 1714 - DNA, 31 bp, Artificial Sequence
  Description of Artificial Sequence: Synthetic oligonucleotide
ccacttagggcctggtcgataccgttcggtg

SEQ ID NO: 1715 - DNA, 32 bp, Artificial Sequence
  Description of Artificial Sequence: Synthetic oligonucleotide
tctcgccccaagagtagaaacccttcsttyyg

SEQ ID NO: 1716 - protein, 735 aa, Adeno-associated virus 2 [sequence omitted]

SEQ ID NO: 1717 - protein, 736 aa, Adeno-associated virus 9; identical to SEQ ID NO: 132

SEQ ID NO: 1718 - protein, 7 aa, Artificial Sequence
  Description of Artificial Sequence: Synthetic peptide
GSTPPPM

SEQ ID NO: 1719 - protein, 7 aa, Artificial Sequence
  Description of Artificial Sequence: Synthetic peptide
GETRAPL

SEQ ID NO: 1720 - protein, 6 aa, Artificial Sequence
  Description of Artificial Sequence: Synthetic peptide
SPAKFA

SEQ ID NO: 1721 - protein, 6 aa, Artificial Sequence
  Description of Artificial Sequence: Synthetic peptide
NKDKLN

SEQ ID NO: 1722 - protein, 18 aa, Homo sapiens
MKVLWAALLVTFLAGCQA

SEQ ID NO: 1723 - protein, 44 aa, Homo sapiens
MSSGASRKSWDPGNPWPPDWPITGRKMKVLWAALLVTFLAGCQA

SEQ ID NO: 1724 - protein, 317 aa, Homo sapiens [sequence omitted]

SEQ ID NO: 1725 - protein, 299 aa, Homo sapiens
KVEQAVETEPEPELRQQTEWQSGQRWELALGRFWDYLRWVQTLSEQVQEELLSSQVTQELRALMDETMKELKAYKSELEEQLTPVAEETRARLSKELQAAQARLGADMEDVCGRLVQYRGEVQAMLGQSTEELRVRLASHLRKLRKRLLRDADDLQKRLAVYQAGAREGAERGLSAIRERLGPLVEQGRVRAATVGSLAGQPLQERAQAWGERLRARMEEMGSRTRDRLDEVKEQVAEVRAKLEEQAQQIRLQAEAFQARLKSWFEPLVEDMQRQWAGLVEKVQAAVGTSAAPVPSDNH

SEQ ID NO: 1726 - protein, 216 aa, Homo sapiens
MKVLWAALLVTFLAGCQAKVEQAVETEPEPELRQQTEWQSGQRWELALGRFWDYLRWVQTLSEQVQEELLSSQVTQELRALMDETMKELKAYKSELEEQLTPVAEETRARLSKELQAAQARLGADMEDVCGRLVQYRGEVQAMLGQSTEELRVRLASHLRKLRKRLLRDADDLQKRLAVYQAGAREGAERGLSAIRERLGPLVEQGRVRAATVGSL

SEQ ID NO: 1727 - protein, 198 aa, Homo sapiens
KVEQAVETEPEPELRQQTEWQSGQRWELALGRFWDYLRWVQTLSEQVQEELLSSQVTQELRALMDETMKELKAYKSELEEQLTPVAEETRARLSKELQAAQARLGADMEDVCGRLVQYRGEVQAMLGQSTEELRVRLASHLRKLRKRLLRDADDLQKRLAVYQAGAREGAERGLSAIRERLGPLVEQGRVRAATVGSL

SEQ ID NO: 1728 - protein, 269 aa, Homo sapiens
MSSGASRKSWDPGNPWPPDWPITGRKMKVLWAALLVTFLAGCQAKVEQAVETEPEPELRQQTEWQSGQRWELALGRFWDYLRWVQTLSEQVQEELLSSQVTQELRALMDETMKELKAYKSELEEQLTPVAEETRARLSKELQAAQARLGADMEDVCGRLVQYRGEVQAMLGQSTEELRVRLASHLRKLRKRLLRDADDLQKRLAVYQAGAREGAERGLSAIRERLGPLVEQGRVRAATVGSLAGQPLQERAQAWGERLRARMEEMGSRT

SEQ ID NO: 1729 - protein, 225 aa, Homo sapiens
KVEQAVETEPEPELRQQTEWQSGQRWELALGRFWDYLRWVQTLSEQVQEELLSSQVTQELRALMDETMKELKAYKSELEEQLTPVAEETRARLSKELQAAQARLGADMEDVCGRLVQYRGEVQAMLGQSTEELRVRLASHLRKLRKRLLRDADDLQKRLAVYQAGAREGAERGLSAIRERLGPLVEQGRVRAATVGSLAGQPLQERAQAWGERLRARMEEMGSRT

SEQ ID NO: 1730 - protein, 219 aa, Homo sapiens
MKVLWAALLVTFLAGCQAKVEQAVETEPEPELRQQTEWQSGQRWELALGRFWDYLRWVQTLSEQVQEELLSSQVTQELRALMDETMKELKAYKSELEEQLTPVAEETRARLSKELQAAQARLGADMEDVCGRLVQYRGEVQAMLGQSTEELRVRLASHLRKLRKRLLRDADDLQKRLAVYQAGAREGAERGLSAIRERLGPLVEQGRVRAATVGSLAGQ

SEQ ID NO: 1731 - protein, 201 aa, Homo sapiens
KVEQAVETEPEPELRQQTEWQSGQRWELALGRFWDYLRWVQTLSEQVQEELLSSQVTQELRALMDETMKELKAYKSELEEQLTPVAEETRARLSKELQAAQARLGADMEDVCGRLVQYRGEVQAMLGQSTEELRVRLASHLRKLRKRLLRDADDLQKRLAVYQAGAREGAERGLSAIRERLGPLVEQGRVRAATVGSLAGQ

SEQ ID NO: 1732 - protein, 343 aa, Homo sapiens
MSSGASRKSWDPGNPWPPDWPITGRKMKVLWAALLVTFLAGCQAKVEQAVETEPEPELRQQTEWQSGQRWELALGRFWDYLRWVQTLSEQVQEELLSSQVTQELRALMDETMKELKAYKSELEEQLTPVAEETRARLSKELQAAQARLGADMEDVCGRLVQYRGEVQAMLGQSTEELRVRLASHLRKLRKRLLRDADDLQKRLAVYQAGAREGAERGLSAIRERLGPLVEQGRVRAATVGSLAGQPLQERAQAWGERLRARMEEMGSRTRDRLDEVKEQVAEVRAKLEEQAQQIRLQAEAFQARLKSWFEPLVEDMQRQWAGLVEKVQAAVGTSAAPVPSDNH

SEQ ID NO: 1733 - protein, 299 aa, Homo sapiens; identical to SEQ ID NO: 1725

SEQ ID NO: 1734 - DNA, 1208 bp, Homo sapiens
agggggagccctataattggacaagtctgggatccttgagtcctactcagccccagcggaggtgaaggacgtccttccccaggagccgactggccaatcacaggcaggaagatgaaggttctgtgggctgcgttgctggtcacattcctggcaggatgccaggccaaggtggagcaagcggtggagacagagccggagcccgagctgcgccagcagaccgagtggcagagcggccagcgctgggaactggcactgggtcgcttttgggattacctgcgctgggtgcagacactgtctgagcaggtgcaggaggagctgctcagctcccaggtcacccaggaactgagggcgctgatggacgagaccatgaaggagttgaaggcctacaaatcggaactggaggaacaactgaccccggtggcggaggagacgcgggcacggctgtccaaggagctgcaggcggcgcaggcccggctgggcgcggacatggaggacgtgtgcggccgcctggtgcagtaccgcggcgaggtgcaggccatgctcggccagagcaccgaggagctgcgggtgcgcctcgcctcccacctgcgcaagctgcgtaagcggctcctccgcgatgccgatgacctgcagaagcgcctggcagtgtaccaggccggggcccgcgagggcgccgagcgcggcctcagcgccatccgcgagcgcctggggcccctggtggaacagggccgcgtgcgggccgccactgtgggctccctggccggccagccgctacaggagcgggcccaggcctggggcgagcggctgcgcgcgcggatggaggagatgggcagccggacccgcgaccgcctggacgaggtgaaggagcaggtggcggaggtgcgcgccaagctggaggagcaggcccagcagatacgcctgcaggccgaggccttccaggcccgcctcaagagctggttcgagcccctggtggaagacatgcagcgccagtgggccgggctggtggagaaggtgcaggctgccgtgggcaccagcgccgcccctgtgcccagcgacaatcactgaacgccgaagcctgcagccatgcgaccccacgccaccccgtgcctcctgcctccgcgcagcctgcagcgggagaccctgtccccgccccagccgtcctcctggggtggaccctagtttaataaagattcaccaagtttcacgca

SEQ ID NO: 1735 - DNA, 954 bp, Homo sapiens
atgaaggttctgtgggctgcgttgctggtcacattcctggcaggatgccaggccaaggtggagcaagcggtggagacagagccggagcccgagctgcgccagcagaccgagtggcagagcggccagcgctgggaactggcactgggtcgcttttgggattacctgcgctgggtgcagacactgtctgagcaggtgcaggaggagctgctcagctcccaggtcacccaggaactgagggcgctgatggacgagaccatgaaggagttgaaggcctacaaatcggaactggaggaacaactgaccccggtggcggaggagacgcgggcacggctgtccaaggagctgcaggcggcgcaggcccggctgggcgcggacatggaggacgtgtgcggccgcctggtgcagtaccgcggcgaggtgcaggccatgctcggccagagcaccgaggagctgcgggtgcgcctcgcctcccacctgcgcaagctgcgtaagcggctcctccgcgatgccgatgacctgcagaagcgcctggcagtgtaccaggccggggcccgcgagggcgccgagcgcggcctcagcgccatccgcgagcgcctggggcccctggtggaacagggccgcgtgcgggccgccactgtgggctccctggccggccagccgctacaggagcgggcccaggcctggggcgagcggctgcgcgcgcggatggaggagatgggcagccggacccgcgaccgcctggacgaggtgaaggagcaggtggcggaggtgcgcgccaagctggaggagcaggcccagcagatacgcctgcaggccgaggccttccaggcccgcctcaagagctggttcgagcccctggtggaagacatgcagcgccagtgggccgggctggtggagaaggtgcaggctgccgtgggcaccagcgccgcccctgtgcccagcgacaatcactga

SEQ ID NO: 1736 - DNA, 737 bp, Homo sapiens
gagtcctactcagccccagcggaggtgaaggacgtccttccccaggagccgtttctccttccccagactggccaatcacaggcaggaagatgaaggttctgtgggctgcgttgctggtcacattcctggcaggatgccaggccaaggtggagcaagcggtggagacagagccggagcccgagctgcgccagcagaccgagtggcagagcggccagcgctgggaactggcactgggtcgcttttgggattacctgcgctgggtgcagacactgtctgagcaggtgcaggaggagctgctcagctcccaggtcacccaggaactgagggcgctgatggacgagaccatgaaggagttgaaggcctacaaatcggaactggaggaacaactgaccccggtggcggaggagacgcgggcacggctgtccaaggagctgcaggcggcgcaggcccggctgggcgcggacatggaggacgtgtgcggccgcctggtgcagtaccgcggcgaggtgcaggccatgctcggccagagcaccgaggagctgcgggtgcgcctcgcctcccacctgcgcaagctgcgtaagcggctcctccgcgatgccgatgacctgcagaagcgcctggcagtgtaccaggccggggcccgcgagggcgccgagcgcggcctcagcgccatccgcgagcgcctggggcccctggtggaacagggccgcgtgcgggccgccactgtgggctccctg

SEQ ID NO: 1737 - DNA, 771 bp, Homo sapiens
ctactcagccccagcggaggtgaaggacgtccttccccaggagccgactggccaatcacaggcaggaagatgaaggttctgtgggctgcgttgctggtcacattcctggcaggtatgggggcggggcttgctcggttccccccgctcctccccctctcatcctcacctcaacctcctggccccattcaggcagaccctgggccccctcttctgaggcttctgtgctgcttcctggctctgaacagcgatttgacgctctctgggcctcggtttcccccatccttgagataggagttagaagttgttttgttgttgttgtttgttgttgttgttttgtttttttgagatgaagtctcgctctgtcgcccaggctggagtgcagtggcgggatctcggctcactgcaagctccgcctcccaggtccacgccattctcctgcctcagcctcccaagtagctgggactacaggcacatgccaccacacccgactaacttttttgtattttcagtagagacggggtttcaccatgttggccaggctggtctggaactcctgacctcaggtgatctgcccgtttcgatctcccaaagtgctgggattacaggcgtgagccaccgcacctggctgggagttagaggtttctaatgcattgcaggcagatagtgaataccagacacggggcagctgtgatctttattctccatcacccccacacagccctgcctggggcacacaaggacactcaatacatgcttttccgctgggcgcgg

SEQ ID NO: 1738 - DNA, 864 bp, Homo sapiens
gaggtgaaggacgtccttccccaggagccggtgagaagcgcagtcgggggcacggggatgagctcaggggcctctagaaagagctgggaccctgggaacccctggcctccagactggccaatcacaggcaggaagatgaaggttctgtgggctgcgttgctggtcacattcctggcaggatgccaggccaaggtggagcaagcggtggagacagagccggagcccgagctgcgccagcagaccgagtggcagagcggccagcgctgggaactggcactgggtcgcttttgggattacctgcgctgggtgcagacactgtctgagcaggtgcaggaggagctgctcagctcccaggtcacccaggaactgagggcgctgatggacgagaccatgaaggagttgaaggcctacaaatcggaactggaggaacaactgaccccggtggcggaggagacgcgggcacggctgtccaaggagctgcaggcggcgcaggcccggctgggcgcggacatggaggacgtgtgcggccgcctggtgcagtaccgcggcgaggtgcaggccatgctcggccagagcaccgaggagctgcgggtgcgcctcgcctcccacctgcgcaagctgcgtaagcggctcctccgcgatgccgatgacctgcagaagcgcctggcagtgtaccaggccggggcccgcgagggcgccgagcgcggcctcagcgccatccgcgagcgcctggggcccctggtggaacagggccgcgtgcgggccgccactgtgggctccctggccggccagccgctacaggagcgggcccaggcctggggcgagcggctgcgcgcgcggatggaggagatgggcagccggacc

SEQ ID NO: 1739 - DNA, 923 bp, Homo sapiens
ccgggagaggaagatggaattttctatggaggccgacctggggatggggagataagagaagaccaggagggagttaaatagggaatgggttgggggcggcttggtaaatgtgctgggattaggctgttgcagataatgcaacaaggcttggaaggctaacctggggtgaggccgggttggggccgggctgggggtgggaggagtcctcactggcggttgattgacagtttctccttccccagactggccaatcacaggcaggaagatgaaggttctgtgggctgcgttgctggtcacattcctggcaggatgccaggccaaggtggagcaagcggtggagacagagccggagcccgagctgcgccagcagaccgagtggcagagcggccagcgctgggaactggcactgggtcgcttttgggattacctgcgctgggtgcagacactgtctgagcaggtgcaggaggagctgctcagctcccaggtcacccaggaactgagggcgctgatggacgagaccatgaaggagttgaaggcctacaaatcggaactggaggaacaactgaccccggtggcggaggagacgcgggcacggctgtccaaggagctgcaggcggcgcaggcccggctgggcgcggacatggaggacgtgtgcggccgcctggtgcagtaccgcggcgaggtgcaggccatgctcggccagagcaccgaggagctgcgggtgcgcctcgcctcccacctgcgcaagctgcgtaagcggctcctccgcgatgccgatgacctgcagaagcgcctggcagtgtaccaggccggggcccgcgagggcgccgagcgcggcctcagcgccatccgcgagcgcctggggcccctggtggaacagggccgcgtgcgggccgccactgtgggctccctggccggccagc

SEQ ID NO: 1740 - DNA, 1234 bp, Homo sapiens
gggacagggggagccctataattggacaagtctgggatccttgagtcctactcagccccagcggaggtgaaggacgtccttccccaggagccgactggccaatcacaggcaggaagatgaaggttctgtgggctgcgttgctggtcacattcctggcaggatgccaggccaaggtggagcaagcggtggagacagagccggagcccgagctgcgccagcagaccgagtggcagagcggccagcgctgggaactggcactgggtcgcttttgggattacctgcgctgggtgcagacactgtctgagcaggtgcaggaggagctgctcagctcccaggtcacccaggaactgagggcgctgatggacgagaccatgaaggagttgaaggcctacaaatcggaactggaggaacaactgaccccggtggcggaggagacgcgggcacggctgtccaaggagctgcaggcggcgcaggcccggctgggcgcggacatggaggacgtgtgcggccgcctggtgcagtaccgcggcgaggtgcaggccatgctcggccagagcaccgaggagctgcgggtgcgcctcgcctcccacctgcgcaagctgcgtaagcggctcctccgcgatgccgatgacctgcagaagcgcctggcagtgtaccaggccggggcccgcgagggcgccgagcgcggcctcagcgccatccgcgagcgcctggggcccctggtggaacagggccgcgtgcgggccgccactgtgggctccctggccggccagccgctacaggagcgggcccaggcctggggcgagcggctgcgcgcgcggatggaggagatgggcagccggacccgcgaccgcctggacgaggtgaaggagcaggtggcggaggtgcgcgccaagctggaggagcaggcccagcagatacgcctgcaggccgaggccttccaggcccgcctcaagagctggttcgagcccctggtggaagacatgcagcgccagtgggccgggctggtggagaaggtgcaggctgccgtgggcaccagcgccgcccctgtgcccagcgacaatcactgaacgccgaagcctgcagccatgcgaccccacgccaccccgtgcctcctgcctccgcgcagcctgcagcgggagaccctgtccccgccccagccgtcctcctggggtggaccctagtttaataaagattcaccaagtttcacgcatcaaaaaaaaaaaaaaaaaaa

SEQ ID NO: 1741 - DNA, 1165 bp, Homo sapiens
agagacgacccgacccgctagaagactggccaatcacaggcaggaagatgaaggttctgtgggctgcgttgctggtcacattcctggcaggatgccaggccaaggtggagcaagcggtggagacagagccggagcccgagctgcgccagcagaccgagtggcagagcggccagcgctgggaactggcactgggtcgcttttgggattacctgcgctgggtgcagacactgtctgagcaggtgcaggaggagctgctcagctcccaggtcacccaggaactgagggcgctgatggacgagaccatgaaggagttgaaggcctacaaatcggaactggaggaacaactgaccccggtggcggaggagacgcgggcacggctgtccaaggagctgcaggcggcgcaggcccggctgggcgcggacatggaggacgtgtgcggccgcctggtgcagtaccgcggcgaggtgcaggccatgctcggccagagcaccgaggagctgcgggtgcgcctcgcctcccacctgcgcaagctgcgtaagcggctcctccgcgatgccgatgacctgcagaagcgcctggcagtgtaccaggccggggcccgcgagggcgccgagcgcggcctcagcgccatccgcgagcgcctggggcccctggtggaacagggccgcgtgcgggccgccactgtgggctccctggccggccagccgctacaggagcgggcccaggcctggggcgagcggctgcgcgcgcggatggaggagatgggcagccggacccgcgaccgcctggacgaggtgaaggagcaggtggcggaggtgcgcgccaagctggaggagcaggcccagcagatacgcctgcaggccgaggccttccaggcccgcctcaagagctggttcgagcccctggtggaagacatgcagcgccagtgggccgggctggtggagaaggtgcaggctgccgtgggcaccagcgccgcccctgtgcccagcgacaatcactgaacgccgaagcctgcagccatgcgaccccacgccaccccgtgcctcctgcctccgcgcagcctgcagcgggagaccctgtccccgccccagccgtcctcctggggtggaccctagtttaataaagattcaccaagtttcacgcatcaaaaaaaaaaaaaaaaaaa

SEQ ID NO: 1742 - DNA, 1265 bp, Homo sapiens
ggatggggagataagagaagaccaggagggagttaaatagggaatgggttgggggcggcttggtaaatgtgctgggattaggctgttgcagataatgcaacaaggcttggaaggctaacctgggactggccaatcacaggcaggaagatgaaggttctgtgggctgcgttgctggtcacattcctggcaggatgccaggccaaggtggagcaagcggtggagacagagccggagcccgagctgcgccagcagaccgagtggcagagcggccagcgctgggaactggcactgggtcgcttttgggattacctgcgctgggtgcagacactgtctgagcaggtgcaggaggagctgctcagctcccaggtcacccaggaactgagggcgctgatggacgagaccatgaaggagttgaaggcctacaaatcggaactggaggaacaactgaccccggtggcggaggagacgcgggcacggctgtccaaggagctgcaggcggcgcaggcccggctgggcgcggacatggaggacgtgtgcggccgcctggtgcagtaccgcggcgaggtgcaggccatgctcggccagagcaccgaggagctgcgggtgcgcctcgcctcccacctgcgcaagctgcgtaagcggctcctccgcgatgccgatgacctgcagaagcgcctggcagtgtaccaggccggggcccgcgagggcgccgagcgcggcctcagcgccatccgcgagcgcctggggcccctggtggaacagggccgcgtgcgggccgccactgtgggctccctggccggccagccgctacaggagcgggcccaggcctggggcgagcggctgcgcgcgcggatggaggagatgggcagccggacccgcgaccgcctggacgaggtgaaggagcaggtggcggaggtgcgcgccaagctggaggagcaggcccagcagatacgcctgcaggccgaggccttccaggcccgcctcaagagctggttcgagcccctggtggaagacatgcagcgccagtgggccgggctggtggagaaggtgcaggctgccgtgggcaccagcgccgcccctgtgcccagcgacaatcactgaacgccgaagcctgcagccatgcgaccccacgccaccccgtgcctcctgcctccgcgcagcctgcagcgggagaccctgtccccgccccagccgtcctcctggggtggaccctagtttaataaagattcaccaagtttcacgcatcaaaaaaaaaaaaaaaaaaa

SEQ ID NO: 1743 - DNA, 1249 bp, Homo sapiens
gggacagggggagccctataattggacaagtctgggatccttgagtcctactcagccccagcggaggtgaaggacgtccttccccaggagccgtttctccttccccagactggccaatcacaggcaggaagatgaaggttctgtgggctgcgttgctggtcacattcctggcaggatgccaggccaaggtggagcaagcggtggagacagagccggagcccgagctgcgccagcagaccgagtggcagagcggccagcgctgggaactggcactgggtcgcttttgggattacctgcgctgggtgcagacactgtctgagcaggtgcaggaggagctgctcagctcccaggtcacccaggaactgagggcgctgatggacgagaccatgaaggagttgaaggcctacaaatcggaactggaggaacaactgaccccggtggcggaggagacgcgggcacggctgtccaaggagctgcaggcggcgcaggcccggctgggcgcggacatggaggacgtgtgcggccgcctggtgcagtaccgcggcgaggtgcaggccatgctcggccagagcaccgaggagctgcgggtgcgcctcgcctcccacctgcgcaagctgcgtaagcggctcctccgcgatgccgatgacctgcagaagcgcctggcagtgtaccaggccggggcccgcgagggcgccgagcgcggcctcagcgccatccgcgagcgcctggggcccctggtggaacagggccgcgtgcgggccgccactgtgggctccctggccggccagccgctacaggagcgggcccaggcctggggcgagcggctgcgcgcgcggatggaggagatgggcagccggacccgcgaccgcctggacgaggtgaaggagcaggtggcggaggtgcgcgccaagctggaggagcaggcccagcagatacgcctgcaggccgaggccttccaggcccgcctcaagagctggttcgagcccctggtggaagacatgcagcgccagtgggccgggctggtggagaaggtgcaggctgccgtgggcaccagcgccgcccctgtgcccagcgacaatcactgaacgccgaagcctgcagccatgcgaccccacgccaccccgtgcctcctgcctccgcgcagcctgcagcgggagaccctgtccccgccccagccgtcctcctggggtggaccctagtttaataaagattcaccaagtttcacgcatcaaaaaaaaaaaaaaaaaaa

SEQ ID NO: 1744 - DNA, 1316 bp, Homo sapiens
gggacagggggagccctataattggacaagtctgggatccttgagtcctactcagccccagcggaggtgaaggacgtccttccccaggagccggtgagaagcgcagtcgggggcacggggatgagctcaggggcctctagaaagagctgggaccctgggaacccctggcctccagactggccaatcacaggcaggaagatgaaggttctgtgggctgcgttgctggtcacattcctggcaggatgccaggccaaggtggagcaagcggtggagacagagccggagcccgagctgcgccagcagaccgagtggcagagcggccagcgctgggaactggcactgggtcgcttttgggattacctgcgctgggtgcagacactgtctgagcaggtgcaggaggagctgctcagctcccaggtcacccaggaactgagggcgctgatggacgagaccatgaaggagttgaaggcctacaaatcggaactggaggaacaactgaccccggtggcggaggagacgcgggcacggctgtccaaggagctgcaggcggcgcaggcccggctgggcgcggacatggaggacgtgtgcggccgcctggtgcagtaccgcggcgaggtgcaggccatgctcggccagagcaccgaggagctgcgggtgcgcctcgcctcccacctgcgcaagctgcgtaagcggctcctccgcgatgccgatgacctgcagaagcgcctggcagtgtaccaggccggggcccgcgagggcgccgagcgcggcctcagcgccatccgcgagcgcctggggcccctggtggaacagggccgcgtgcgggccgccactgtgggctccctggccggccagccgctacaggagcgggcccaggcctggggcgagcggctgcgcgcgcggatggaggagatgggcagccggacccgcgaccgcctggacgaggtgaaggagcaggtggcggaggtgcgcgccaagctggaggagcaggcccagcagatacgcctgcaggccgaggccttccaggcccgcctcaagagctggttcgagcccctggtggaagacatgcagcgccagtgggccgggctggtggagaaggtgcaggctgccgtgggcaccagcgccgcccctgtgcccagcgacaatcactgaacgccgaagcctgcagccatgcgaccccacgccaccccgtgcctcctgcctccgcgcagcctgcagcgggagaccctgtccccgccccagccgtcctcctggggtggaccctagtttaataaagattcaccaagtttcacgcatcaaaaaaaaaaaaaaaaaaa

SEQ ID NO: 1745 - protein, 210 aa, Homo sapiens
MWTLGRRAVAGLLASPSPAQAQTLTRVPRPAELAPLCGRRGLRTDIDATCTPRRASSNQRGLNQIWNVKKQSVYLMNLRKSGTLGHPGSLDETTYERLAEETLDSLAEFFEDLADKPYTFEDYDVSFGSGVLTVKLGGDLGTYVINKQTPNKQIWLSSPSSGPKRYDWTGKNWVYSHDGVSLHELLAAELTKALKTKLDLSSLAYSGKDA

SEQ ID NO: 1746 - protein, 196 aa, Homo sapiens
MWTLGRRAVAGLLASPSPAQAQTLTRVPRPAELAPLCGRRGLRTDIDATCTPRRASSNQRGLNQIWNVKKQSVYLMNLRKSGTLGHPGSLDETTYERLAEETLDSLAEFFEDLADKPYTFEDYDVSFGSGVLTVKLGGDLGTYVINKQTPNKQIWLSSPSRYVVDLSVMTGLGKTGCTPTTACPSMSCWPQSSLKP

SEQ ID NO: 1747 - protein, 171 aa, Homo sapiens
MWTLGRRAVAGLLASPSPAQAQTLTRVPRPAELAPLCGRRGLRTDIDATCTPRRASSNQRGLNQIWNVKKQSVYLMNLRKSGTLGHPGSLDETTYERLAEETLDSLAEFFEDLADKPYTFEDYDVSFGSGVLTVKLGGDLGTYVINKQTPNKQIWLSSPSRLTWLLWLFHP

SEQ ID NO: 1748 - DNA, 7168 bp, Homo sapiens
agtctcccttgggtcaggggtcctggttgcactccgtgctttgcacaaagcaggctctccatttttgttaaatgcacgaatagtgctaagctgggaagttcttcctgaggtctaacctctagctgctcccccacagaagagtgcctgcggccagtggccaccaggggtcgccgcagcacccagcgctggagggcggagcgggcggcagacccggagcagcatgtggactctcgggcgccgcgcagtagccggcctcctggcgtcacccagcccagcccaggcccagaccctcacccgggtcccgcggccggcagagttggccccactctgcggccgccgtggcctgcgcaccgacatcgatgcgacctgcacgccccgccgcgcaagttcgaaccaacgtggcctcaaccagatttggaatgtcaaaaagcagagtgtctatttgatgaatttgaggaaatctggaactttgggccacccaggctctctagatgagaccacctatgaaagactagcagaggaaacgctggactctttagcagagttttttgaagaccttgcagacaagccatacacgtttgaggactatgatgtctcctttgggagtggtgtcttaactgtcaaactgggtggagatctaggaacctatgtgatcaacaagcagacgccaaacaagcaaatctggctatcttctccatccagtggacctaagcgttatgactggactgggaaaaactgggtgtactcccacgacggcgtgtccctccatgagctgctggccgcagagctcactaaagccttaaaaaccaaactggacttgtcttccttggcctattccggaaaagatgcttgatgcccagccccgttttaaggacattaaaagctatcaggccaagaccccagcttcattatgcagctgaggtctgttttttgttgttgttgttgtttattttttttattcctgcttttgaggacagttgggctatgtgtcacagctctgtagaaagaatgtgttgcctcctaccttgcccccaagttctgatttttaatttctatggaagattttttggattgtcggatttcctccctcacatgataccccttatcttttataatgtcttatgcctatacctgaatataacaacctttaaaaaagcaaaataataagaaggaaaaattccaggagggaaaatgaattgtcttcactcttcattctttgaaggatttactgcaagaagtacatgaagagcagctggtcaacctgctcactgttctatctccaaatgagacacattaaagggtagcctacaaatgttttcaggcttctttcaaagtgtaagcacttctgagctctttagcattgaagtgtcgaaagcaactcacacgggaagatcatttcttatttgtgctctgtgactgccaaggtgtggcctgcactgggttgtccagggagacctagtgctgtttctcccacatattcacatacgtgtctgtgtgtatatatattttttcaatttaaaggttagtatggaatcagctgctacaagaatgcaaaaaatcttccaaagacaagaaaagaggaaaaaaagccgttttcatgagctgagtgatgtagcgtaacaaacaaaatcatggagctgaggaggtgccttgtaaacatgaaggggcagataaaggaaggagatactcatgttgataaagagagccctggtcctagacatagttcagccacaaagtagttgtccctttgtggacaagtttcccaaattccctggacctctgcttccccatctgttaaatgagagaatagagtatggttgattcccagcattcagtggtcctgtcaagcaacctaacaggctagttctaattccctattgggtagatgaggggatgacaaagaacagtttttaagctatataggaaacattgttattggtgttgccctatcgtgatttcagttgaattcatgtgaaaataatagccatccttggcctggcgcggtggctcacacctgtaatcccagcacttttggaggccaaggtgggtggatcacctgaggtcaggagttcaagaccagcctggccaacatgatgaaaccccgtctctactaaaaatacaaaaaattagccgggcatgatggcaggtgcctgtaatcccagctacttgggaggctgaagcggaagaatcgcttgaacccagaggtggaggttgcagtgagccgagatcgtgccattgcactgtaacctgggtgactgagcaaaactctgtctcaaaataataataacaatataataataataatagccatcctttattgtacccttactgggttaatcgtattataccacattacctcattttaatttttactgacctgcactttatacaaagcaacaagcctccaggacattaaaattcatgcaaagttatgctcatgttatattattttcttacttaaagaaggatttattagtggctgggcatggtggcgtgcacctgtaatcccaggtactcaggaggctgagacgggagaattgcttgaccccaggcggaggaggttacagtgagtcgagatcgtacctgagcgacagagcgagactccgtctcaaaaaaaaaaaaaaggagggtttattaatgagaagtttgtattaatatgtagcaaaggcttttccaatgggtgaataaaaacacattccattaagtcaagctgggagcagtggcatatacctatagtcccagctgcacaggaggctgagacaggaggattgcttgaagccaggaattggagatcagcctgggcaacacagcaagatcctatctcttaaaaaaagaaaaaaaaacctattaataataaaacagtataaacaaaagctaaataggtaaaatattttttctgaaataaaattattttttgagtctgatggaaatgtttaagtgcagtaggccagtgccagtgagaaaataaataacatcatacatgtttgtatgtgtttgcatcttgcttctactgaaagtttcagtgcaccccacttacttagaactcggtgacatgatgtactcctttatctgggacacagcacaaaagaggtatgcagtggggctgctctgacatgaaagtggaagttaaggaatctgggctcttatggggtccttgtgggccagcccttcaggcctattttactttcattttacatatagctctaattggtttgattatctcgttcccaaggcagtgggagatccccatttaaggaaagaaaaggggcctggcacagtggctcatgcctgtaatcccagcactttgggaggctgaggcaagtgtatcacctgaggtcaggagttcaagaccagcctggccaacatggcaaaatcccgtctctactaaaaatattaaaaaattggctgggcgtggtggttcgtgcctataatttcagctactcaggaggctgaggcaggagaatcgctgtaacctggggggtggaggttgcagtgagacgagatcatgccacttcactccagcctggccaacagagccatactccgtctcaaataaataaataaataaataaagggacttcaaacacatgaacagcagccaggggaagaatcaaaatcatattctgtcaagcaaactggaaaagtaccactgtgtgtaccaatagcctccccaccacagaccctgggagcatcgcctcatttatggtgtggtccagtcatccatgtgaaggatgagtttccaggaaaaggttattaaatattcactgtaacatactggaggaggtgaggaattgcataatacaatcttagaaaacttttttttcccctttctattttttgagacaggatctcactttggcactcaggctggaggacagtggtacaatcaaagctcatggcagcctcgacctccctgggcttgggcaatcctcccacaggtgtgcacctccatagctggctaatttgtgtattttttgtagagatggggtttcaccatgttgcccaggctggtctctaacacttaggctcaagtgatccacctgcctcgtcctcccaagatgctgggattacaggtgtgtgccacaggtgttcatcagaaagctttttctattatttttaccttcttgagtgggtagaacctcagccacatagaaaataaaatgttctggcatgacttatttagctctctggaattacaaagaaggaatgaggtgtgtaaaagagaacctgggtttttgaatcacaaatttagaatttaatcgaaactctgcctcttacttgtttgtagacactgacagtggcctcatgttttttttttttttaatctataaaatggagatatctaacatgttgagcctgggcccacaggcaaagcacaatcctgatgtgagaagtactcagttcatgacaactgttgttctcacatgcatagcataatttcatattcacattggaggacttctcccaaaatatggatgacgttccctactcaaccttgaacttaatcaaaatactcagtttacttaacttcgtattagattctgattccctggaaccatttatcgtgtgccttaccatgcttatattttacttgatcttttgcataccttctaaaactattttagccaatttaaaatttgacagtttgcattaaattataggtttacaatatgctttatccagctatacctgccccaaattctgacagatgcttttgccacctctaaaggaagacccatgttcatagtgatggagtttgtgtggactaaccatgcaaggttgccaaggaaaaatcgctttacgcttccaaggtacacactaagatgaaagtaattttagtccgtgtccagttggattcttggcacatagttatcttctgctagaacaaactaaaacagctacatgccagcaagggagaaaggggaaggaggggcaaagttttgaaatttcatgtaaatttatgctgttcaaaacgacgagttcatgactttgtgtatagagtaagaaatgccttttcttttttgagacagagtcttgctctgtcacccaggctggagtgcagtggcacgatctgggctcactacaacctccgcctcctgggttcaagcaattctctgcctcagcctcccgagtagctgggattacaggtgcctgccaccacacccggctaatttttgtatttttagtagagacggggtttcaccatcatggccaggctggtcttgaactcctgacctagtaatccacctgcctccgcctcccaaagtgctgggattacaggcgtgagccactgcacccagccagaaatgccttctaatctttggtttatcttaattagccaggacacttggagtgcatcccgaagtacctgatcagtggcccctttggaatgtgtaaaactcagctcacttatatccctgcatccgctacagagacagaatccaagctcatatgttccatcttctctggctgtatagtttaaggaatggaaggcaccagaacagatttattgaaatgtttattagctgaagatttatttagacagttgaggaaaacatcagcacccagcagtaaaattggctctcaaagattttcttctcctgtggaaagtcagacctctgaggccccatccaggtagaagtactagtgcaagaagggcctctgctgtccacttgtgtttctgtgatctgtgggaacattgttaacgccacatcttgacctcaaattgtttagctcctggccagacacggtggctcacacctgtaatcccagcactttgagaggctgaggcaggtggatcacctgaggttaggagttcgaggccagcctggtcaacatggtaaaaccccgcctctactaaaaatacaaaaattagctggccgtagtggcgcacgcctgttatcccagctactcgggaggctgaggcaggagaattgcttgaacctgggtggtggaggttgcagtgagccgagattacaccactgcactccagcctgggtgacaagagggaaactccattaaaaaaatgtaattcccgtgtctgccatcttaagtgtaaaggtggctaaattatatagaaaaataagacaatatcatttcccaattacattcctttcctaccgcactctatgatgctagctgagatttttccaaaagaaaatggcttaaataaaaccctaagagaaagaaaaactttaaatccctccaaagctcaaaagtaatagaaacagatgagtttggagtcaggatttctctgtaagattgcctaggctgtgtactgcacatctccaggtgccactgttgacagagattataactacaatgtgaagtgaatggtgccactgacagttatgcaaaccgtccagagcatagccacctgatcctgctgggattcctcttgccagtccatcagcagttccccttgaaagtttcaccaaacatcccttaaatctgccctctcctgcccgtccccagtggaggtcctcatcatttttcacctgcatttttgcaggagctttcttatatccaccttcctccttttctctcagcccatcatctagctacacagtctccagggtaagctttcagaaaggcaatctcttgtctgtaaaacctaagcaggaccaaggccaagtttcttagcctgaaaaatgtgcttttctgactgaactgttcaggcactgactctacatataattatgcttttctaccccctcacactcaacactttgactccagcaatcccaaatccccagatccctaagtgtgctgtgctattttcacgtggctctcagacttggccagtgctgtttccattttggtctttattccccacatctctgcctggggggtagattctaccctgaaaaatgttcttggcacagccttgcaaactcctcctccactcagcctctgcctggatgcccttgattgttccatgtcctcagcataccatgtttgtctttcccagcactgacctaccatgtgtcacccctgcttggctgtaccttccatgaggctaggactatgtgtctcctttgttgactgctgttgccctagcatcttgcacagttccttgcacacaattagagctctataaatgtcaaataaatgtgttataattatatgtttaagatagttgttcaaataaactctaaataaccccaac

SEQ ID NO: 1749 - DNA, 7176 bp, Homo sapiens
agtctcccttgggtcaggggtcctggttgcactccgtgctttgcacaaagcaggctctccatttttgttaaatgcacgaatagtgctaagctgggaagttcttcctgaggtctaacctctagctgctcccccacagaagagtgcctgcggccagtggccaccaggggtcgccgcagcacccagcgctggagggcggagcgggcggcagacccggagcagcatgtggactctcgggcgccgcgcagtagccggcctcctggcgtcacccagcccagcccaggcccagaccctcacccgggtcccgcggccggcagagttggccccactctgcggccgccgtggcctgcgcaccgacatcgatgcgacctgcacgccccgccgcgcaagttcgaaccaacgtggcctcaaccagatttggaatgtcaaaaagcagagtgtctatttgatgaatttgaggaaatctggaactttgggccacccaggctctctagatgagaccacctatgaaagactagcagaggaaacgctggactctttagcagagttttttgaagaccttgcagacaagccatacacgtttgaggactatgatgtctcctttgggagtggtgtcttaactgtcaaactgggtggagatctaggaacctatgtgatcaacaagcagacgccaaacaagcaaatctggctatcttctccatccaggtatgtagtggacctaagcgttatgactggactgggaaaaactgggtgtactcccacgacggcgtgtccctccatgagctgctggccgcagagctcactaaagccttaaaaaccaaactggacttgtcttccttggcctattccggaaaagatgcttgatgcccagccccgttttaaggacattaaaagctatcaggccaagaccccagcttcattatgcagctgaggtctgttttttgttgttgttgttgtttattttttttattcctgcttttgaggacagttgggctatgtgtcacagctctgtagaaagaatgtgttgcctcctaccttgcccccaagttctgatttttaatttctatggaagattttttggattgtcggatttcctccctcacatgataccccttatcttttataatgtcttatgcctatacctgaatataacaacctttaaaaaagcaaaataataagaaggaaaaattccaggagggaaaatgaattgtcttcactcttcattctttgaaggatttactgcaagaagtacatgaagagcagctggtcaacctgctcactgttctatctccaaatgagacacattaaagggtagcctacaaatgttttcaggcttctttcaaagtgtaagcacttctgagctctttagcattgaagtgtcgaaagcaactcacacgggaagatcatttcttatttgtgctctgtgactgccaaggtgtggcctgcactgggttgtccagggagacctagtgctgtttctcccacatattcacatacgtgtctgtgtgtatatatattttttcaatttaaaggttagtatggaatcagctgctacaagaatgcaaaaaatcttccaaagacaagaaaagaggaaaaaaagccgttttcatgagctgagtgatgtagcgtaacaaacaaaatcatggagctgaggaggtgccttgtaaacatgaaggggcagataaaggaaggagatactcatgttgataaagagagccctggtcctagacatagttcagccacaaagtagttgtccctttgtggacaagtttcccaaattccctggacctctgcttccccatctgttaaatgagagaatagagtatggttgattcccagcattcagtggtcctgtcaagcaacctaacaggctagttctaattccctattgggtagatgaggggatgacaaagaacagtttttaagctatataggaaacattgttattggtgttgccctatcgtgatttcagttgaattcatgtgaaaataatagccatccttggcctggcgcggtggctcacacctgtaatcccagcacttttggaggccaaggtgggtggatcacctgaggtcaggagttcaagaccagcctggccaacatgatgaaaccccgtctctactaaaaatacaaaaaattagccgggcatgatggcaggtgcctgtaatcccagctacttgggaggctgaagcggaagaatcgcttgaacccagaggtggaggttgcagtgagccgagatcgtgccattgcactgtaacctgggtgactgagcaaaactctgtctcaaaataataataacaatataataataataatagccatcctttattgtacccttactgggttaatcgtattataccacattacctcattttaatttttactgacctgcactttatacaaagcaacaagcctccaggacattaaaattcatgcaaagttatgctcatgttatattattttcttacttaaagaaggatttattagtggctgggcatggtggcgtgcacctgtaatcccaggtactcaggaggctgagacgggagaattgcttgaccccaggcggaggaggttacagtgagtcgagatcgtacctgagcgacagagcgagactccgtctcaaaaaaaaaaaaaaggagggtttattaatgagaagtttgtattaatatgtagcaaaggcttttccaatgggtgaataaaaacacattccattaagtcaagctgggagcagtggcatatacctatagtcccagctgcacaggaggctgagacaggaggattgcttgaagccaggaattggagatcagcctgggcaacacagcaagatcctatctcttaaaaaaagaaaaaaaaacctattaataataaaacagtataaacaaaagctaaataggtaaaatattttttctgaaataaaattattttttgagtctgatggaaatgtttaagtgcagtaggccagtgccagtgagaaaataaataacatcatacatgtttgtatgtgtttgcatcttgcttctactgaaagtttcagtgcaccccacttacttagaactcggtgacatgatgtactcctttatctgggacacagcacaaaagaggtatgcagtggggctgctctgacatgaaagtggaagttaaggaatctgggctcttatggggtccttgtgggccagcccttcaggcctattttactttcattttacatatagctctaattggtttgattatctcgttcccaaggcagtgggagatccccatttaaggaaagaaaaggggcctggcacagtggctcatgcctgtaatcccagcactttgggaggctgaggcaagtgtatcacctgaggtcaggagttcaagaccagcctggccaacatggcaaaatcccgtctctactaaaaatattaaaaaattggctgggcgtggtggttcgtgcctataatttcagctactcaggaggctgaggcaggagaatcgctgtaacctggggggtggaggttgcagtgagacgagatcatgccacttcactccagcctggccaacagagccatactccgtctcaaataaataaataaataaataaagggacttcaaacacatgaacagcagccaggggaagaatcaaaatcatattctgtcaagcaaactggaaaagtaccactgtgtgtaccaatagcctccccaccacagaccctgggagcatcgcctcatttatggtgtggtccagtcatccatgtgaaggatgagtttccaggaaaaggttattaaatattcactgtaacatactggaggaggtgaggaattgcataatacaatcttagaaaacttttttttcccctttctattttttgagacaggatctcactttggcactcaggctggaggacagtggtacaatcaaagctcatggcagcctcgacctccctgggcttgggcaatcctcccacaggtgtgcacctccatagctggctaatttgtgtattttttgtagagatggggtttcaccatgttgcccaggctggtctctaacacttaggctcaagtgatccacctgcctcgtcctcccaagatgctgggattacaggtgtgtgccacaggtgttcatcagaaagctttttctattatttttaccttcttgagtgggtagaacctcagccacatagaaaataaaatgttctggcatgacttatttagctctctggaattacaaagaaggaatgaggtgtgtaaaagagaacctgggtttttgaatcacaaatttagaatttaatcgaaactctgcctcttacttgtttgtagacactgacagtggcctcatgttttttttttttttaatctataaaatggagatatctaacatgttgagcctgggcccacaggcaaagcacaatcctgatgtgagaagtactcagttcatgacaactgttgttctcacatgcatagcataatttcatattcacattggaggacttctcccaaaatatggatgacgttccctactcaaccttgaacttaatcaaaatactcagtttacttaacttcgtattagattctgattccctggaaccatttatcgtgtgccttaccatgcttatattttacttgatcttttgcataccttctaaaactattttagccaatttaaaatttgacagtttgcattaaattataggtttacaatatgctttatccagctatacctgccccaaattctgacagatgcttttgccacctctaaaggaagacccatgttcatagtgatggagtttgtgtggactaaccatgcaaggttgccaaggaaaaatcgctttacgcttccaaggtacacactaagatgaaagtaattttagtccgtgtccagttggattcttggcacatagttatcttctgctagaacaaactaaaacagctacatgccagcaagggagaaaggggaaggaggggcaaagttttgaaatttcatgtaaatttatgctgttcaaaacgacgagttcatgactttgtgtatagagtaagaaatgccttttcttttttgagacagagtcttgctctgtcacccaggctggagtgcagtggcacgatctgggctcactacaacctccgcctcctgggttcaagcaattctctgcctcagcctcccgagtagctgggattacaggtgcctgccaccacacccggctaatttttgtatttttagtagagacggggtttcaccatcatggccaggctggtcttgaactcctgacctagtaatccacctgcctccgcctcccaaagtgctgggattacaggcgtgagccactgcacccagccagaaatgccttctaatctttggtttatcttaattagccaggacacttggagtgcatcccgaagtacctgatcagtggcccctttggaatgtgtaaaactcagctcacttatatccctgcatccgctacagagacagaatccaagctcatatgttccatcttctctggctgtatagtttaaggaatggaaggcaccagaacagatttattgaaatgtttattagctgaagatttatttagacagttgaggaaaacatcagcacccagcagtaaaattggctctcaaagattttcttctcctgtggaaagtcagacctctgaggccccatccaggtagaagtactagtgcaagaagggcctctgctgtccacttgtgtttctgtgatctgtgggaacattgttaacgccacatcttgacctcaaattgtttagctcctggccagacacggtggctcacacctgtaatcccagcactttgagaggctgaggcaggtggatcacctgaggttaggagttcgaggccagcctggtcaacatggtaaaaccccgcctctactaaaaatacaaaaattagctggccgtagtggcgcacgcctgttatcccagctactcgggaggctgaggcaggagaattgcttgaacctgggtggtggaggttgcagtgagccgagattacaccactgcactccagcctgggtgacaagagggaaactccattaaaaaaatgtaattcccgtgtctgccatcttaagtgtaaaggtggctaaattatatagaaaaataagacaatatcatttcccaattacattcctttcctaccgcactctatgatgctagctgagatttttccaaaagaaaatggcttaaataaaaccctaagagaaagaaaaactttaaatccctccaaagctcaaaagtaatagaaacagatgagtttggagtcaggatttctctgtaagattgcctaggctgtgtactgcacatctccaggtgccactgttgacagagattataactacaatgtgaagtgaatggtgccactgacagttatgcaaaccgtccagagcatagccacctgatcctgctgggattcctcttgccagtccatcagcagttccccttgaaagtttcaccaaacatcccttaaatctgccctctcctgcccgtccccagtggaggtcctcatcatttttcacctgcatttttgcaggagctttcttatatccaccttcctccttttctctcagcccatcatctagctacacagtctccagggtaagctttcagaaaggcaatctcttgtctgtaaaacctaagcaggaccaaggccaagtttcttagcctgaaaaatgtgcttttctgactgaactgttcaggcactgactctacatataattatgcttttctaccccctcacactcaacactttgactccagcaatcccaaatccccagatccctaagtgtgctgtgctattttcacgtggctctcagacttggccagtgctgtttccattttggtctttattccccacatctctgcctggggggtagattctaccctgaaaaatgttcttggcacagccttgcaaactcctcctccactcagcctctgcctggatgcccttgattgttccatgtcctcagcataccatgtttgtctttcccagcactgacctaccatgtgtcacccctgcttggctgtaccttccatgaggctaggactatgtgtctcctttgttgactgctgttgccctagcatcttgcacagttccttgcacacaattagagctctataaatgtcaaataaatgtgttataattatatgtttaagatagttgttcaaataaactctaaataaccccaac

SEQ ID NO: 1750 - DNA, 980 bp, Homo sapiens
agtctcccttgggtcaggggtcctggttgcactccgtgctttgcacaaagcaggctctccatttttgttaaatgcacgaatagtgctaagctgggaagttcttcctgaggtctaacctctagctgctcccccacagaagagtgcctgcggccagtggccaccaggggtcgccgcagcacccagcgctggagggcggagcgggcggcagacccggagcagcatgtggactctcgggcgccgcgcagtagccggcctcctggcgtcacccagcccagcccaggcccagaccctcacccgggtcccgcggccggcagagttggccccactctgcggccgccgtggcctgcgcaccgacatcgatgcgacctgcacgccccgccgcgcaagttcgaaccaacgtggcctcaaccagatttggaatgtcaaaaagcagagtgtctatttgatgaatttgaggaaatctggaactttgggccacccaggctctctagatgagaccacctatgaaagactagcagaggaaacgctggactctttagcagagttttttgaagaccttgcagacaagccatacacgtttgaggactatgatgtctcctttgggagtggtgtcttaactgtcaaactgggtggagatctaggaacctatgtgatcaacaagcagacgccaaacaagcaaatctggctatcttctccatccaggttaacgtggctcctgtggctgttccatccctgaggaaaagtgaggaccatgctctccaaacaggccatgtgctggactacctctgtttctgtctcctgggattccaatcagcaagtgagcaacgaagcaacccagacagtgtggttcataggatggctgggtaagtggctgtttgttttttccttactgtggatatgtatcagtgaaggaatctgtagaacattcttgatgggaacatttagtcatatcaagtcaataaattaatgtttaggctggg

SEQ ID NO: 1751 - protein, 480 aa, Homo sapiens
MNASEFRRRGKEMVDYVANYMEGIEGRQVYPDVEPGYLRPLIPAAAPQEPDTFEDIINDVEKIIMPGVTHWHSPYFFAYFPTASSYPAMLADMLCGAIGCIGFSWAASPACTELETVMMDWLGKMLELPKAFLNEKAGEGGGVIQGSASEATLVALLAARTKVIHRLQAASPELTQAAIMEKLVAYSSDQAHSSVERAGLIGGVKLKAIPSDGNFAMRASALQEALERDKAAGLIPFFMVATLGTTTCCSFDNLLEVGPICNKEDIWLHVDAAYAGSAFICPEFRHLLNGVEFADSFNFNPHKWLLVNFDCSAMWVKKRTDLTGAFRLDPTYLKHSHQDSGLITDYRHWQIPLGRRFRSLKMWFVFRMYGVKGLQAYIRKHVQLSHEFESLVRQDPRFEICVEVILGLVCFRLKGSNKVNEALLQRINSAKKIHLVPCHLRDKFVLRFAICSRTVESAHVQRAWEHIKELAADVLRAERE

SEQ ID NO: 1752 - DNA, 1975 bp, Homo sapiens
aactgtcactgtggagaggagagagagaggacagagagcaagtcactcccggctgcctttttcacctctgacagagcccagacaccatgaacgcaagtgaattccgaaggagagggaaggagatggtggattacgtggccaactacatggaaggcattgagggacgccaggtctaccctgacgtggagcccgggtacctgcggccgctgatccctgccgctgcccctcaggagccagacacgtttgaggacatcatcaacgacgttgagaagataatcatgcctggggtgacgcactggcacagcccctacttcttcgcctacttccccactgccagctcgtacccggccatgcttgcggacatgctgtgcggggccattggctgcatcggcttctcctgggcggcaagcccagcatgcacagagctggagactgtgatgatggactggctcgggaagatgctggaactaccaaaggcatttttgaatgagaaagctggagaagggggaggagtgatccagggaagtgccagtgaagccaccctggtggccctgctggccgctcggaccaaagtgatccatcggctgcaggcagcgtccccagagctcacacaggccgctatcatggagaagctggtggcttactcatccgatcaggcacactcctcagtggaaagagctgggttaattggtggagtgaaattaaaagccatcccctcagatggcaacttcgccatgcgtgcgtctgccctgcaggaagccctggagagagacaaagcggctggcctgattcctttctttatggttgccaccctggggaccacaacatgctgctcctttgacaatctcttagaagtcggtcctatctgcaacaaggaagacatatggctgcacgttgatgcagcctacgcaggcagtgcattcatctgccctgagttccggcaccttctgaatggagtggagtttgcagattcattcaactttaatccccacaaatggctattggtgaattttgactgttctgccatgtgggtgaaaaagagaacagacttaacgggagcctttagactggaccccacttacctgaagcacagccatcaggattcagggcttatcactgactaccggcattggcagataccactgggcagaagatttcgctctttgaaaatgtggtttgtatttaggatgtatggagtcaaaggactgcaggcttatatccgcaagcatgtccagctgtcccatgagtttgagtcactggtgcgccaggatccccgctttgaaatctgtgtggaagtcattctggggcttgtctgctttcggctaaagggttccaacaaagtgaatgaagctcttctgcaaagaataaacagtgccaaaaaaatccacttggttccatgtcacctcagggacaagtttgtcctgcgctttgccatctgttctcgcacggtggaatctgcccatgtgcagcgggcctgggaacacatcaaagagctggcggccgacgtgctgcgagcagagagggagtaggagtgaagccagctgcaggaatcaaaaattgaagagagatatatctgaaaactggaataagaagcaaataaatatcatcctgccttcatggaactcagctgtctgtggcttcccatgtctttctccaaagttatccagagggttgtgattttgtctgcttagtatctcatcaacaaagaaatattatttgctaattaaaaagttaatcttcatggccatagcttttattcattagctgtgatttttgttgattaaaacattatagattttcatgttcttgcagtcatcagaagtggtaggaaagcctcactgatatattttccagggcaatcaatgttcacgcaacttgaaattatatctgtggtcttcaaattgtcttttgtcatgtggctaaatgcctaataaacaattcaagtgaaatactaaaaaaaaaaaaaaaaaaaaaa

SEQ ID NO: 1753 - DNA, 981 bp, Homo sapiens
gtttggggccagagtgggcgaggcgcggaggtctggcctataaagtagtcgcggagacggggtgctggtttgcgtcgtagtctcctgcagcgtctggggtttccgttgcagtcctcggaaccaggacctcggcgtggcctagcgagttatggcgacgaaggccgtgtgcgtgctgaagggcgacggcccagtgcagggcatcatcaatttcgagcagaaggaaagtaatggaccagtgaaggtgtggggaagcattaaaggactgactgaaggcctgcatggattccatgttcatgagtttggagataatacagcaggctgtaccagtgcaggtcctcactttaatcctctatccagaaaacacggtgggccaaaggatgaagagaggcatgttggagacttgggcaatgtgactgctgacaaagatggtgtggccgatgtgtctattgaagattctgtgatctcactctcaggagaccattgcatcattggccgcacactggtggtccatgaaaaagcagatgacttgggcaaaggtggaaatgaagaaagtacaaagacaggaaacgctggaagtcgtttggcttgtggtgtaattgggatcgcccaataaacattcccttggatgtagtctgaggccccttaactcatctgttatcctgctagctgtagaaatgtatcctgataaacattaaacactgtaatcttaaaagtgtaattgtgtgactttttcagagttgctttaaagtacctgtagtgagaaactgatttatgatcacttggaagatttgtatagttttataaaactcagttaaaatgtctgtttcaatgacctgtattttgccagacttaaatcacagatgggtattaaacttgtcagaatttctttgtcattcaagcctgtgaataaaaaccctgtatggcacttattatgaggctattaaaagaatccaaattcaaactaaaaaaaaaaaaaaaaaa

SEQ ID NO: 1754 - DNA, 13669 bp, Homo sapiens
ttgctgtgtgaggcagaacctgcgggggcaggggcgggctggttccctggccagccattggcagagtccgcaggctagggctgtcaatcatgctggccggcgtggccccgcctccgccggcgcggccccgcctccgccggcgcagcgtctgggacgcaaggcgccgtgggggctgccgggacgggtccaagatggacggccgctcaggttctgcttttacctgcggcccagagccccattcattgccccggtgctgagcggcgccgcgagtcggcccgaggcctccggggactgccgtgccgggcgggagaccgccatggcgaccctggaaaagctgatgaaggccttcgagtccctcaagtccttccagcagcagcagcagcagcagcagcagcagcagcagcagcagcagcagcagcagcagcagcagcaacagccgccaccgccgccgccgccgccgccgcctcctcagcttcctcagccgccgccgcaggcacagccgctgctgcctcagccgcagccgcccccgccgccgcccccgccgccacccggcccggctgtggctgaggagccgctgcaccgaccaaagaaagaactttcagctaccaagaaagaccgtgtgaatcattgtctgacaatatgtgaaaacatagtggcacagtctgtcagaaattctccagaatttcagaaacttctgggcatcgctatggaactttttctgctgtgcagtgatgacgcagagtcagatgtcaggatggtggctgacgaatgcctcaacaaagttatcaaagctttgatggattctaatcttccaaggttacagctcgagctctataaggaaattaaaaagaatggtgcccctcggagtttgcgtgctgccctgtggaggtttgctgagctggctcacctggttcggcctcagaaatgcaggccttacctggtgaaccttctgccgtgcctgactcgaacaagcaagagacccgaagaatcagtccaggagaccttggctgcagctgttcccaaaattatggcttcttttggcaattttgcaaatgacaatgaaattaaggttttgttaaaggccttcatagcgaacctgaagtcaagctcccccaccattcggcggacagcggctggatcagcagtgagcatctgccagcactcaagaaggacacaatatttctatagttggctactaaatgtgctcttaggcttactcgttcctgtcgaggatgaacactccactctgctgattcttggcgtgctgctcaccctgaggtatttggtgcccttgctgcagcagcaggtcaaggacacaagcctgaaaggcagcttcggagtgacaaggaaagaaatggaagtctctccttctgcagagcagcttgtccaggtttatgaactgacgttacatcatacacagcaccaagaccacaatgttgtgaccggagccctggagctgttgcagcagctcttcagaacgcctccacccgagcttctgcaaaccctgaccgcagtcgggggcattgggcagctcaccgctgctaaggaggagtctggtggccgaagccgtagtgggagtattgtggaacttatagctggagggggttcctcatgcagccctgtcctttcaagaaaacaaaaaggcaaagtgctcttaggagaagaagaagccttggaggatgactctgaatcgagatcggatgtcagcagctctgccttaacagcctcagtgaaggatgagatcagtggagagctggctgcttcttcaggggtttccactccagggtcagcaggtcatgacatcatcacagaacagccacggtcacagcacacactgcaggcggactcagtggatctggccagctgtgacttgacaagctctgccactgatggggatgaggaggatatcttgagccacagctccagccaggtcagcgccgtcccatctgaccctgccatggacctgaatgatgggacccaggcctcgtcgcccatcagcgacagctcccagaccaccaccgaagggcctgattcagctgttaccccttcagacagttctgaaattgtgttagacggtaccgacaaccagtatttgggcctgcagattggacagccccaggatgaagatgaggaagccacaggtattcttcctgatgaagcctcggaggccttcaggaactcttccatggcccttcaacaggcacatttattgaaaaacatgagtcactgcaggcagccttctgacagcagtgttgataaatttgtgttgagagatgaagctactgaaccgggtgatcaagaaaacaagccttgccgcatcaaaggtgacattggacagtccactgatgatgactctgcacctcttgtccattgtgtccgccttttatctgcttcgtttttgctaacagggggaaaaaatgtgctggttccggacagggatgtgagggtcagcgtgaaggccctggccctcagctgtgtgggagcagctgtggccctccacccggaatctttcttcagcaaactctataaagttcctcttgacaccacggaataccctgaggaacagtatgtctcagacatcttgaactacatcgatcatggagacccacaggttcgaggagccactgccattctctgtgggaccctcatctgctccatcctcagcaggtcccgcttccacgtgggagattggatgggcaccattagaaccctcacaggaaatacattttctttggcggattgcattcctttgctgcggaaaacactgaaggatgagtcttctgttacttgcaagttagcttgtacagctgtgaggaactgtgtcatgagtctctgcagcagcagctacagtgagttaggactgcagctgatcatcgatgtgctgactctgaggaacagttcctattggctggtgaggacagagcttctggaaacccttgcagagattgacttcaggctggtgagctttttggaggcaaaagcagaaaacttacacagaggggctcatcattatacagggcttttaaaactgcaagaacgagtgctcaataatgttgtcatccatttgcttggagatgaagaccccagggtgcgacatgttgccgcagcatcactaattaggcttgtcccaaagctgttttataaatgtgaccaaggacaagctgatccagtagtggccgtggcaagagatcaaagcagtgtttacctgaaacttctcatgcatgagacgcagcctccatctcatttctccgtcagcacaataaccagaatatatagaggctataacctactaccaagcataacagacgtcactatggaaaataacctttcaagagttattgcagcagtttctcatgaactaatcacatcaaccaccagagcactcacatttggatgctgtgaagctttgtgtcttctttccactgccttcccagtttgcatttggagtttaggttggcactgtggagtgcctccactgagtgcctcagatgagtctaggaagagctgtaccgttgggatggccacaatgattctgaccctgctctcgtcagcttggttcccattggatctctcagcccatcaagatgctttgattttggccggaaacttgcttgcagccagtgctcccaaatctctgagaagttcatgggcctctgaagaagaagccaacccagcagccaccaagcaagaggaggtctggccagccctgggggaccgggccctggtgcccatggtggagcagctcttctctcacctgctgaaggtgattaacatttgtgcccacgtcctggatgacgtggctcctggacccgcaataaaggcagccttgccttctctaacaaaccccccttctctaagtcccatccgacgaaaggggaaggagaaagaaccaggagaacaagcatctgtaccgttgagtcccaagaaaggcagtgaggccagtgcagcttctagacaatctgatacctcaggtcctgttacaacaagtaaatcctcatcactggggagtttctatcatcttccttcatacctcaaactgcatgatgtcctgaaagctacacacgctaactacaaggtcacgctggatcttcagaacagcacggaaaagtttggagggtttctccgctcagccttggatgttctttctcagatactagagctggccacactgcaggacattgggaagtgtgttgaagagatcctaggatacctgaaatcctgctttagtcgagaaccaatgatggcaactgtttgtgttcaacaattgttgaagactctctttggcacaaacttggcctcccagtttgatggcttatcttccaaccccagcaagtcacaaggccgagcacagcgccttggctcctccagtgtgaggccaggcttgtaccactactgcttcatggccccgtacacccacttcacccaggccctcgctgacgccagcctgaggaacatggtgcaggcggagcaggagaacgacacctcgggatggtttgatgtcctccagaaagtgtctacccagttgaagacaaacctcacgagtgtcacaaagaaccgtgcagataagaatgctattcataatcacattcgtttgtttgaacctcttgttataaaagctttaaaacagtacacgactacaacatgtgtgcagttacagaagcaggttttagatttgctggcgcagctggttcagttacgggttaattactgtcttctggattcagatcaggtgtttattggctttgtattgaaacagtttgaatacattgaagtgggccagttcagggaatcagaggcaatcattccaaacatctttttcttcttggtattactatcttatgaacgctatcattcaaaacagatcattggaattcctaaaatcattcagctctgtgatggcatcatggccagtggaaggaaggctgtgacacatgccataccggctctgcagcccatagtccacgacctctttgtattaagaggaacaaataaagctgatgcaggaaaagagcttgaaacccaaaaagaggtggtggtgtcaatgttactgagactcatccagtaccatcaggtgttggagatgttcattcttgtcctgcagcagtgccacaaggagaatgaagacaagtggaagcgactgtctcgacagatagctgacatcatcctcccaatgttagccaaacagcagatgcacattgactctcatgaagcccttggagtgttaaatacattatttgagattttggccccttcctccctccgtccggtagacatgcttttacggagtatgttcgtcactccaaacacaatggcgtccgtgagcactgttcaactgtggatatcgggaattctggccattttgagggttctgatttcccagtcaactgaagatattgttctttctcgtattcaggagctctccttctctccgtatttaatctcctgtacagtaattaataggttaagagatggggacagtacttcaacgctagaagaacacagtgaagggaaacaaataaagaatttgccagaagaaacattttcaaggtttctattacaactggttggtattcttttagaagacattgttacaaaacagctgaaggtggaaatgagtgagcagcaacatactttctattgccaggaactaggcacactgctaatgtgtctgatccacatcttcaagtctggaatgttccggagaatcacagcagctgccactaggctgttccgcagtgatggctgtggcggcagtttctacaccctggacagcttgaacttgcgggctcgttccatgatcaccacccacccggccctggtgctgctctggtgtcagatactgctgcttgtcaaccacaccgactaccgctggtgggcagaagtgcagcagaccccgaaaagacacagtctgtccagcacaaagttacttagtccccagatgtctggagaagaggaggattctgacttggcagccaaacttggaatgtgcaatagagaaatagtacgaagaggggctctcattctcttctgtgattatgtctgtcagaacctccatgactccgagcacttaacgtggctcattgtaaatcacattcaagatctgatcagcctttcccacgagcctccagtacaggacttcatcagtgccgttcatcggaactctgctgccagcggcctgttcatccaggcaattcagtctcgttgtgaaaacctttcaactccaaccatgctgaagaaaactcttcagtgcttggaggggatccatctcagccagtcgggagctgtgctcacgctgtatgtggacaggcttctgtgcacccctttccgtgtgctggctcgcatggtcgacatccttgcttgtcgccgggtagaaatgcttctggctgcaaatttacagagcagcatggcccagttgccaatggaagaactcaacagaatccaggaataccttcagagcagcgggctcgctcagagacaccaaaggctctattccctgctggacaggtttcgtctctccaccatgcaagactcacttagtccctctcctccagtctcttcccacccgctggacggggatgggcacgtgtcactggaaacagtgagtccggacaaagactggtacgttcatcttgtcaaatcccagtgttggaccaggtcagattctgcactgctggaaggtgcagagctggtgaatcggattcctgctgaagatatgaatgccttcatgatgaactcggagttcaacctaagcctgctagctccatgcttaagcctagggatgagtgaaatttctggtggccagaagagtgccctttttgaagcagcccgtgaggtgactctggcccgtgtgagcggcaccgtgcagcagctccctgctgtccatcatgtcttccagcccgagctgcctgcagagccggcggcctactggagcaagttgaatgatctgtttggggatgctgcactgtatcagtccctgcccactctggcccgggccctggcacagtacctggtggtggtctccaaactgcccagtcatttgcaccttcctcctgagaaagagaaggacattgtgaaattcgtggtggcaacccttgaggccctgtcctggcatttgatccatgagcagatcccgctgagtctggatctccaggcagggctggactgctgctgcctggccctgcagctgcctggcctctggagcgtggtctcctccacagagtttgtgacccacgcctgctccctcatctactgtgtgcacttcatcctggaggccgttgcagtgcagcctggagagcagcttcttagtccagaaagaaggacaaataccccaaaagccatcagcgaggaggaggaggaagtagatccaaacacacagaatcctaagtatatcactgcagcctgtgagatggtggcagaaatggtggagtctctgcagtcggtgttggccttgggtcataaaaggaatagcggcgtgccggcgtttctcacgccattgctaaggaacatcatcatcagcctggcccgcctgccccttgtcaacagctacacacgtgtgcccccactggtgtggaagcttggatggtcacccaaaccgggaggggattttggcacagcattccctgagatccccgtggagttcctccaggaaaaggaagtctttaaggagttcatctaccgcatcaacacactaggctggaccagtcgtactcagtttgaagaaacttgggccaccctccttggtgtcctggtgacgcagcccctcgtgatggagcaggaggagagcccaccagaagaagacacagagaggacccagatcaacgtcctggccgtgcaggccatcacctcactggtgctcagtgcaatgactgtgcctgtggccggcaacccagctgtaagctgcttggagcagcagccccggaacaagcctctgaaagctctcgacaccaggtttgggaggaagctgagcattatcagagggattgtggagcaagagattcaagcaatggtttcaaagagagagaatattgccacccatcatttatatcaggcatgggatcctgtcccttctctgtctccggctactacaggtgccctcatcagccacgagaagctgctgctacagatcaaccccgagcgggagctggggagcatgagctacaaactcggccaggtgtccatacactccgtgtggctggggaacagcatcacacccctgagggaggaggaatgggacgaggaagaggaggaggaggccgacgcccctgcaccttcgtcaccacccacgtctccagtcaactccaggaaacaccgggctggagttgacatccactcctgttcgcagtttttgcttgagttgtacagccgctggatcctgccgtccagctcagccaggaggaccccggccatcctgatcagtgaggtggtcagatcccttctagtggtctcagacttgttcaccgagcgcaaccagtttgagctgatgtatgtgacgctgacagaactgcgaagggtgcacccttcagaagacgagatcctcgctcagtacctggtgcctgccacctgcaaggcagctgccgtccttgggatggacaaggccgtggcggagcctgtcagccgcctgctggagagcacgctcaggagcagccacctgcccagcagggttggagccctgcacggcgtcctctatgtgctggagtgcgacctgctggacgacactgccaagcagctcatcccggtcatcagcgactatctcctctccaacctgaaagggatcgcccactgcgtgaacattcacagccagcagcacgtactggtcatgtgtgccactgcgttttacctcattgagaactatcctctggacgtagggccggaattttcagcatcaataatacagatgtgtggggtgatgctgtctggaagtgaggagtccaccccctccatcatttaccactgtgccctcagaggcctggagcgcctcctgctctctgagcagctctcccgcctggatgcagaatcgctggtcaagctgagtgtggacagagtgaacgtgcacagcccgcaccgggccatggcggctctgggcctgatgctcacctgcatgtacacaggaaaggagaaagtcagtccgggtagaacttcagaccctaatcctgcagcccccgacagcgagtcagtgattgttgctatggagcgggtatctgttctttttgataggatcaggaaaggctttccttgtgaagccagagtggtggccaggatcctgccccagtttctagacgacttcttcccaccccaggacatcatgaacaaagtcatcggagagtttctgtccaaccagcagccatacccccagttcatggccaccgtggtgtataaggtgtttcagactctgcacagcaccgggcagtcgtccatggtccgggactgggtcatgctgtccctctccaacttcacgcagagggccccggtcgccatggccacgtggagcctctcctgcttctttgtcagcgcgtccaccagcccgtgggtcgcggcgatcctcccacatgtcatcagcaggatgggcaagctggagcaggtggacgtgaaccttttctgcctggtcgccacagacttctacagacaccagatagaggaggagctcgaccgcagggccttccagtctgtgcttgaggtggttgcagccccaggaagcccatatcaccggctgctgacttgtttacgaaatgtccacaaggtcaccacctgctgagcgccatggtgggagagactgtgaggcggcagctggggccggagcctttggaagtctgcgcccttgtgccctgcctccaccgagccagcttggtccctatgggcttccgcacatgccgcgggcggccaggcaacgtgcgtgtctctgccatgtggcagaagtgctctttgtggcagtggccaggcagggagtgtctgcagtcctggtggggctgagcctgaggccttccagaaagcaggagcagctgtgctgcaccccatgtgggtgaccaggtcctttctcctgatagtcacctgctggttgttgccaggttgcagctgctcttgcatctgggccagaagtcctccctcctgcaggctggctgttggcccctctgctgtcctgcagtagaaggtgccgtgagcaggctttgggaacactggcctgggtctccctggtggggtgtgcatgccacgccccgtgtctggatgcacagatgccatggcctgtgctgggccagtggctgggggtgctagacacccggcaccattctcccttctctcttttcttctcaggatttaaaatttaattatatcagtaaagagattaattttaacgtaactctttctatgcccgtgtaaagtatgtgaatcgcaaggcctgtgctgcatgcgacagcgtccggggtggtggacagggcccccggccacgctccctctcctgtagccactggcatagccctcctgagcacccgctgacatttccgttgtacatgttcctgtttatgcattcacaaggtgactgggatgtagagaggcgttagtgggcaggtggccacagcaggactgaggacaggcccccattatcctaggggtgcgctcacctgcagcccctcctcctcgggcacagacgactgtcgttctccacccaccagtcagggacagcagcctccctgtcactcagctgagaaggccagccctccctggctgtgagcagcctccactgtgtccagagacatgggcctcccactcctgttccttgctagccctggggtggcgtctgcctaggagctggctggcaggtgttgggacctgctgctccatggatgcatgccctaagagtgtcactgagctgtgttttgtctgagcctctctcggtcaacagcaaagcttggtgtcttggcactgttagtgacagagcccagcatcccttctgcccccgttccagctgacatcttgcacggtgaccccttttagtcaggagagtgcagatctgtgctcatcggagactgccccacggccctgtcagagccgccactcctatccccaggccaggtccctggaccagcctcctgtttgcaggcccagaggagccaagtcattaaaatggaagtggattctggatggccgggctgctgctgatgtaggagctggatttgggagctctgcttgccgactggctgtgagacgaggcaggggctctgcttcctcagccctagaggcgagccaggcaaggttggcgactgtcatgtggcttggtttggtcatgcccgtcgatgttttgggtattgaatgtggtaagtggaggaaatgttggaactctgtgcaggtgctgccttgagacccccaagcttccacctgtccctctcctatgtggcagctggggagcagctgagatgtggacttgtatgctgcccacatacgtgagggggagctgaaagggagcccctcctctgagcagcctctgccaggcctgtatgaggcttttcccaccagctcccaacagaggcctcccccagccaggaccacctcgtcctcgtggcggggcagcaggagcggtagaaaggggtccgatgtttgaggaggcccttaagggaagctactgaattataacacgtaagaaaatcaccattccgtattggttgggggctcctgtttctcatcctagctttttcctggaaagcccgctagaaggtttgggaacgaggggaaagttctcagaactgttggctgctccccacccgcctcccgcctcccccgcaggttatgtcagcagctctgagacagcagtatcacaggccagatgttgttcctggctagatgtttacatttgtaagaaataacactgtgaatgtaaaacagagccattcccttggaatgcatatcgctgggctcaacatagagtttgtcttcctcttgtttacgacgtgatctaaaccagtccttagcaaggggctcagaacaccccgctctggcagtaggtgtcccccacccccaaagacctgcctgtgtgctccggagatgaatatgagctcattagtaaaaatgacttcacccacgcatatacataaagtatccatgcatgtgcatatagacacatctataattttacacacacacctctcaagacggagatgcatggcctctaagagtgcccgtgtcggttcttcctggaagttgactttccttagacccgccaggtcaagttagccgcgtgacggacatccaggcgtgggacgtggtcagggcagggctcattcattgcccactaggatcccactggcgaagatggtctccatatcagctctctgcagaagggaggaagactttatcatgttcctaaaaatctgtggcaagcacccatcgtattatccaaattttgttgcaaatgtgattaatttggttgtcaagttttgggggtgggctgtggggagattgcttttgttttcctgctggtaatatcgggaaagattttaatgaaaccagggtagaattgtttggcaatgcactgaagcgtgtttctttcccaaaatgtgcctcccttccgctgcgggcccagctgagtctatgtaggtgatgtttccagctgccaagtgctctttgttactgtccaccctcatttctgccagcgcatgtgtcctttcaaggggaaaatgtgaagctgaaccccctccagacacccagaatgtagcatctgagaaggccctgtgccctaaaggacacccctcgcccccatcttcatggagggggtcatttcagagccctcggagccaatgaacagctcctcctcttggagctgagatgagccccacgtggagctcgggacggatagtagacagcaataactcggtgtgtggccgcctggcaggtggaacttcctcccgttgcggggtggagtgaggttagttctgtgtgtctggtgggtggagtcaggcttctcttgctacctgtgagcatccttcccagcagacatcctcatcgggctttgtccctcccccgcttcctccctctgcggggaggacccgggaccacagctgctggccagggtagacttggagctgtcctccagaggggtcacgtgtaggagtgagaagaaggaagatcttgagagctgctgagggaccttggagagctcaggatggctcagacgaggacactcgcttgccgggcctgggcctcctgggaaggagggagctgctcagaatgccgcatgacaactgaaggcaacctggaaggttcaggggccgctcttcccccatgtgcctgtcacgctctggtgcagtcaaaggaacgccttcccctcagttgtttctaagagcagagtctcccgctgcaatctgggtggtaactgccagccttggaggatcgtggccaacgtggacctgcctacggagggtgggctctgacccaagtggggcctccttgtccaggtctcactgctttgcaccgtggtcagagggactgtcagctgagcttgagctcccctggagccagcagggctgtgatgggcgagtcccggagccccacccagacctgaatgcttctgagagcaaagggaaggactgacgagagatgtatatttaattttttaactgctgcaaacattgtacatccaaattaaaggaaaaaaatggaaaccatcaaaaaaaaaaaaaaaaaa

SEQ ID NO: 1755 - protein, 3137 aa, Homo sapiens
MATLEKLMKAFESLKSFQQQQQQQQQQQQQQQQQQQQQQQPPPPPPPPPPPQLPQPPPQAQPLLPQPQPPPPPPPPPPGPAVAEEPLHRPKKELSATKKDRVNHCLTICENIVAQSVRNSPEFQKLLGIAMELFLLCSDDAESDVRMVADECLNKVIKALMDSNLPRLQLELYKEIKKNGAPRSLRAALWRFAELAHLVRPQKCRPYLVNLLPCLTRTSKRPEESVQETLAAAVPKIMASFGNFANDNEIKVLLKAFIANLKSSSPTIRRTAAGSAVSICQHSRRTQYFYSWLLNVLLGLLVPVEDEHSTLLILGVLLTLRYLVPLLQQQVKTSLKGSFGVTRKEMEVSPSAEQLVQVYELTLHHTQHQDHNVVTGALELLQQLFRTPPPELLQTLTAVGGIGQLTAAKEESGGRSRSGSIVELIAGGGSSCSPVLSRKQKGKVLLGEEEALEDDSESRSDVSSSALTASVKDEISGELAASSGVSTPGSAGHDIITEQPRSQHTLQADSVDLASCDLTSSATDGDEEDILSHSSSQVSAVPSDPAMDLNDGTQASSPISDSSQTTTEGPDSAVTPSDSSEIVLDGTDNQYLGLQIGQPQDEDEEATGILPDEASEAFRNSSMALQQAHLLKNMSHCRQPSDSSVDKFVLRDEATEPGDQENKPCRIKGDIGQSTDDDSAPLVHCVRLLSASFLLTGGKNVLVPDRDVRVSVKALALSCVGAAVALHPESFFSKLYKVPLTTEYPEEQYVSDILNYIDHGDPQVRGATAILCGTLICSILSRSRFHVGDWMGTIRTLTGNTFSLADCIPLLRKTLKDESSVTCKLACTAVRNCVMSLCSSSYSELGLQLIIDVLTLRNSSYWLVRTELLETLAEIDFRLVSFLEAKAENLHRGAHHYTGLLKLQERVLNNVVIHLLGDEDPRVRHVAAASLIRLVPKLFYKCDQGQADPVVAVARDQSSVYLKLLMHETQPPSHFSVSTITRIYRGYNLLPSITDVTMENNLSRVIAAVSHELITSTTRALTFGCCEALCLLSTAFPVCIWSLGWHCGVPPLSASDESRKSCTVGMATMILTLLSSAWFPLDLSAHQDALILAGNLLAASAPKSLRSSWASEEEANPAATKQEEVWPALGDRALVPMVEQLFSHLLKVINICAHVLDDVAPGPAIKAALPSLTNPPSLSPIRRKGKEKEPGEQASVPLSPKKGSEASAASRQSTSGPVTTSKSSSLGSFYHLPSYLKLHDVLKATHANYKVTLDLQNSTEKFGGFLRSALDVLSQILELATLQDIGKCVEEILGYLKSCFSREPMMATVCVQQLLKTLFGTNLASQFDGLSSNPSKSQGRAQRLGSSSVRPGLYHYCFMAPYTHFTQALADASLRNMVQAEQENTSGWFDVLQKVSTQLKTNLTSVTKNRADKNAIHNHIRLFEPLVIKALKQYTTTTCVQLQKQVLDLLAQLVQLRVNYCLLDSDQVFIGFVLKQFEYIEVGQFRESEAIIPNIFFFLVLLSYERYHSKQIIGIPKIIQLCDGIMASGRKAVTHAIPALQPIVHDLFVLRGTNKADAGKELETQKEVVVSMLLRLIQYHQVLEMFILVLQQCHKENEDKWKRLSRQIADIILPMLAKQQMHIDSHEALGVLNTLFEILAPSSLRPVDMLLRSMFVTPNTMASVSTVQLWISGILAILRVLISQSTEDIVLSRIQELSFSPYLISCTVINRLRDGDSTSTLEEHSEGKQIKNLPEETFSRFLLQLVGILLEDIVTKQLKVEMSEQQHTFYCQELGTLLMCLIHIFKSGMFRRITAAATRLFRSDGCGGSFYTLDSLNLRARSMITTHPALVLLWCQILLLVNHTDYRWWAEVQQTPKRHSLSSTKLLSPQMSGEEEDSDLAAKLGMCNREIVRRGALILFCDYVCQNLHDSEHLTWLIVNHIQDLISLSHEPPVQDFISAVHRNSAASGLFIQAIQSRCENLSTPTMLKKTLQCLEGIHLSQSGAVLTLYVDRLLCTPFRVLARMVDILACRRVEMLLAANLQSSMAQLPMEELNRIQEYLQSSGLAQRHQRLYSLLDRFRLSTMQDSLSPSPPVSSHPLDGDGHVSLETVSPDKDWYVHLVKSQCWTRSDSALLEGAELVNRIPAEDMNAFMMNSEFNLSLLAPCLSLGMSEISGGQKSALFEAAREVTLARVSGTVQQLPAVHHVFQPELPAEPAAYWSKLNDLFGDAALYQSLPTLARALAQYLVVVSKLPSHLHLPPEKEKDIVKFVVATLEALSWHLIHEQIPLSLDLQAGLDCCCLALQLPGLWSVVSSTEFVTHACSLIYCVHFILEAVAVQPGEQLLSPERRTNTPKAISEEEEEVDPNTQNPKYITAACEMVAEMVESLQSVLALGHKRNSGVPAFLTPLLRNIIISLARLPLVNSYTRVPPLVWKLGWSPKPGGDFGTAFPEIPVEFLQEKEVFKEFIYRINTLGWTSRTQFEETWATLLGVLVTQPLVMEQEESPPEETERTQINVLAVQAITSLVLSAMTVPVAGNPAVSCLEQQPRNKPLKALTRFGRKLSIIRGIVEQEIQAMVSKRENIATHHLYQAWDPVPSLSPATTGALISHEKLLLQINPERELGSMSYKLGQVSIHSVWLGNSITPLREEEWDEEEEEEADAPAPSSPPTSPVNSRKHRAGVDIHSCSQFLLELYSRWILPSSSARRTPAILISEVVRSLLVVSDLFTERNQFELMYVTLTELRRVHPSEDEILAQYLVPATCKAAAVLGMDKAVAEPVSRLLESTLRSSHLPSRVGALHGVLYVLECDLLDTAKQLIPVISDYLLSNLKGIAHCVNIHSQQHVLVMCATAFYLIENYPLDVGPEFSASIIQMCGVMLSGSEESTPSIIYHCALRGLERLLLSEQLSRLDAESLVKLSVDRVNVHSPHRAMAALGLMLTCMYTGKEKVSPGRTSDPNPAAPDSESVIVAMERVSVLFDRIRKGFPCEARVVARILPQFLDDFFPPQDIMNKVIGEFLSNQQPYPQFMATVVYKVFQTLHSTGQSSMVRDWVMLSLSNFTQRAPVAMATWSLSCFFVSASTSPWVAAILPHVISRMGKLEQVDVNLFCLVATDFYRHQIEEELDRRAFQSVLEVVAAPGSPYHRLLTCLRNVHKVTTC

SEQ ID NO: 1756 - protein, 758 aa, Homo sapiens
MAEPRQEFEVMEDHAGTYGLGDRKDQGGYTMHQDQEGDTDAGLKESPLQTPTEDGSEEPGSETSDAKSTPTAEDVTAPLVDEGAPGKQAAAQPHTEIPEGTTAEEAGIGDTPSLEDEAAGHVTQEPESGKVVQEGFLREPGPPGLSHQLMSGMPGAPLLPEGPREATRQPSGTGPEDTEGGRHAPELLKHQLLGDLHQEGPPLKGAGGKERPGSKEEVDEDRDVDESSPQDSPPSKASPAQDGRPPQTAAREATSIPGFPAEGAIPLPVDFLSKVSTEIPASEPDGPSVGRAKGQDAPLEFTFHVEITPNVQKEQAHSEEHLGRAAFPGAPGEGPEARGPSLGEDTKEADLPEPSEKQPAAAPRGKPVSRVPQLKARMVSKSKDGTGSDDKKAKTSTRSSAKTLKNRPCLSPKHPTPGSSDPLIQPSSPAVCPEPPSSPKYVSSVTSRTGSSGAKEMKLKGADGKTKIATPRGAAPPGQKGQANATRIPAKTPPAPKTPPSSGEPPKSGDRSGYSSPGSPGTPGSRSRTPSLPTPPTREPKKVAVVRTPPKSPSSAKSRLQTAPVPMPDLKNVKSKIGSTENLKHQPGGGKVQIINKKLDLSNVQSKCGSKDNIKHVPGGGSVQIVYKPVDLSKVTSKCGSLGNIHHKPGGGQVEVKSEKLDFKDRVQSKIGSLDNITHVPGGGNKKIETHKLTFRENAKAKTDHGAEIVYKSPVVSGDTSPRHLSNVSSTGSIDMVDSPQLATLADEVSASLAKQGL

SEQ ID NO: 1757 - protein, 441 aa, Homo sapiens
MAEPRQEFEVMEDHAGTYGLGDRKDQGGYTMHQDQEGDTDAGLKESPLQTPTEDGSEEPGSETSDAKSTPTAEDVTAPLVDEGAPGKQAAAQPHTEIPEGTTAEEAGIGDTPSLEDEAAGHVTQARMVSKSKDGTGSDDKKAKGADGKTKIATPRGAAPPGQKGQANATRIPAKTPPAPKTPPSSGEPPKSGDRSGYSSPGSPGTPGSRSRTPSLPTPPTREPKKVAVVRTPPKSPSSAKSRLQTAPVPMPDLKNVKSKIGSTENLKHQPGGGKVQIINKKLDLSNVQSKCGSKDNIKHVPGGGSVQIVYKPVDLSKVTSKCGSLGNIHHKPGGGQVEVKSEKLDFKDRVQSKIGSLDNITHVPGGGNKKIETHKLTFRENAKAKTDHGAEIVYKSPVVSGDTSPRHLSNVSSTGSIDMVDSPQLATLADEVSASLAKQGL

SEQ ID NO: 1758 - protein, 383 aa, Homo sapiens
MAEPRQEFEVMEDHAGTYGLGDRKDQGGYTMHQDQEGDTDAGLKAEEAGIGDTPSLEDEAAGHVTQARMVSKSKDGTGSDDKKAKGADGKTKIATPRGAAPPGQKGQANATRIPAKTPPAPKTPPSSGEPPKSGDRSGYSSPGSPGTPGSRSRTPSLPTPPTREPKKVAVVRTPPKSPSSAKSRLQTAPVPMPDLKNVKSKIGSTENLKHQPGGGKVQIINKKLDLSNVQSKCGSKDNIKHVPGGGSVQIVYKPVDLSKVTSKCGSLGNIHHKPGGGQVEVKSEKLDFKDRVQSKIGSLDNITHVPGGGNKKIETHKLTFRENAKAKTDHGAEIVYKSPVVSGDTSPRHLSNVSSTGSIDMVDSPQLATLADEVSASLAKQGL

SEQ ID NO: 1759 - protein, 352 aa, Homo sapiens
MAEPRQEFEVMEDHAGTYGLGDRKDQGGYTMHQDQEGDTDAGLKAEEAGIGDTPSLEDEAAGHVTQARMVSKSKDGTGSDDKKAKGADGKTKIATPRGAAPPGQKGQANATRIPAKTPPAPKTPPSSGEPPKSGDRSGYSSPGSPGTPGSRSRTPSLPTPPTREPKKVAVVRTPPKSPSSAKSRLQTAPVPMPDLKNVKSKIGSTENLKHQPGGGKVQIVYKPVDLSKVTSKCGSLGNIHHKPGGGQVEVKSEKLDFKDRVQSKIGSLDNITHVPGGGNKKIETHKLTFRENAKAKTDHGAEIVYKSPVVSGDTSPRHLSNVSSTGSIDMVDSPQLATLADEVSASLAKQGL

SEQ ID NO: 1760 - protein, 412 aa, Homo sapiens
MAEPRQEFEVMEDHAGTYGLGDRKDQGGYTMHQDQEGDTDAGLKESPLQTPTEDGSEEPGSETSDAKSTPTAEAEEAGIGDTPSLEDEAAGHVTQARMVSKSKDGTGSDDKKAKGADGKTKIATPRGAAPPGQKGQANATRIPAKTPPAPKTPPSSGEPPKSGDRSGYSSPGSPGTPGSRSRTPSLPTPPTREPKKVAVVRTPPKSPSSAKSRLQTAPVPMPDLKNVKSKIGSTENLKHQPGGGKVQIINKKLDLSNVQSKCGSKDNIKHVPGGGSVQIVYKPVDLSKVTSKCGSLGNIHHKPGGGQVEVKSEKLDFKDRVQSKIGSLDNITHVPGGGNKKIETHKLTFRENAKAKTDHGAEIVYKSPVVSGDTSPRHLSNVSSTGSIDMVDSPQLATLADEVSASLAKQGL

SEQ ID NO: 1761 - protein, 776 aa, Homo sapiens
MAEPRQEFEVMEDHAGTYGLGDRKDQGGYTMHQDQEGDTDAGLKESPLQTPTEDGSEEPGSETSDAKSTPTAEDVTAPLVDEGAPGKQAAAQPHTEIPEGTTAEEAGIGDTPSLEDEAAGHVTQEPESGKVVQEGFLREPGPPGLSHQLMSGMPGAPLLPEGPREATRQPSGTGPEDTEGGRHAPELLKHQLLGDLHQEGPPLKGAGGKERPGSKEEVDEDRDVDESSPQDSPPSKASPAQDGRPPQTAAREATSIPGFPAEGAIPLPVDFLSKVSTEIPASEPDGPSVGRAKGQDAPLEFTFHVEITPNVQKEQAHSEEHLGRAAFPGAPGEGPEARGPSLGEDTKEADLPEPSEKQPAAAPRGKPVSRVPQLKARMVSKSKDGTGSDDKKAKTSTRSSAKTLKNRPCLSPKHPTPGSSDPLIQPSSPAVCPEPPSSPKYVSSVTSRTGSSGAKEMKLKGADGKTKIATPRGAAPPGQKGQANATRIPAKTPPAPKTPPSSATKQVQRRPPPAGPRSERGEPPKSGDRSGYSSPGSPGTPGSRSRTPSLPTPPTREPKKVAVVRTPPKSPSSAKSRLQTAPVPMPDLKNVKSKIGSTENLKHQPGGGKVQIINKKLDLSNVQSKCGSKDNIKHVPGGGSVQIVYKPVDLSKVTSKCGSLGNIHHKPGGGQVEVKSEKLDFKDRVQSKIGSLDNITHVPGGGNKKIETHKLTFRENAKAKTDHGAEIVYKSPVVSGDTSPRHLSNVSSTGSIDMVDSPQLATLADEVSASLAKQGL

SEQ ID NO: 1762 - protein, 381 aa, Homo sapiens
MAEPRQEFEVMEDHAGTYGLGDRKDQGGYTMHQDQEGDTDAGLKESPLQTPTEDGSEEPGSETSDAKSTPTAEAEEAGIGDTPSLEDEAAGHVTQARMVSKSKDGTGSDDKKAKGADGKTKIATPRGAAPPGQKGQANATRIPAKTPPAPKTPPSSGEPPKSGDRSGYSSPGSPGTPGSRSRTPSLPTPPTREPKKVAVVRTPPKSPSSAKSRLQTAPVPMPDLKNVKSKIGSTENLKHQPGGGKVQIVYKPVDLSKVTSKCGSLGNIHHKPGGGQVEVKSEKLDFKDRVQSKIGSLDNITHVPGGGNKKIETHKLTFRENAKAKTDHGAEIVYKSPVVSGDTSPRHLSNVSSTGSIDMVDSPQLATLADEVSASLAKQGL

SEQ ID NO: 1763 - protein, 410 aa, Homo sapiens
MAEPRQEFEVMEDHAGTYGLGDRKDQGGYTMHQDQEGDTDAGLKESPLQTPTEDGSEEPGSETSDAKSTPTAEDVTAPLVDEGAPGKQAAAQPHTEIPEGTTAEEAGIGDTPSLEDEAAGHVTQARMVSKSKDGTGSDDKKAKGADGKTKIATPRGAAPPGQKGQANATRIPAKTPPAPKTPPSSGEPPKSGDRSGYSSPGSPGTPGSRSRTPSLPTPPTREPKKVAVVRTPPKSPSSAKSRLQTAPVPMPDLKNVKSKIGSTENLKHQPGGGKVQIVYKPVDLSKVTSKCGSLGNIHHKPGGGQVEVKSEKLDFKDRVQSKIGSLDNITHVPGGGNKKIETHKLTFRENAKAKTDHGAEIVYKSPVVSGDTSPRHLSNVSSTGSIDMVDSPQLATLADEVSASLAKQGL

SEQ ID NO: 1764 - DNA, 6762 bp, Homo sapiens
ggacggccgagcggcagggcgctcgcgcgcgcccactagtggccggaggagaaggctcccgcggaggccgcgctgcccgccccctcccctggggaggctcgcgttcccgctgctcgcgcctgcgccgcccgccggcctcaggaacgcgccctcttcgccggcgcgcgccctcgcagtcaccgccacccaccagctccggcaccaacagcagcgccgctgccaccgcccaccttctgccgccgccaccacagccaccttctcctcctccgctgtcctctcccgtcctcgcctctgtcgactatcaggtgaactttgaaccaggatggctgagccccgccaggagttcgaagtgatggaagatcacgctgggacgtacgggttgggggacaggaaagatcaggggggctacaccatgcaccaagaccaagagggtgacacggacgctggcctgaaagaatctcccctgcagacccccactgaggacggatctgaggaaccgggctctgaaacctctgatgctaagagcactccaacagcggaagatgtgacagcacccttagtggatgagggagctcccggcaagcaggctgccgcgcagccccacacggagatcccagaaggaaccacagctgaagaagcaggcattggagacacccccagcctggaagacgaagctgctggtcacgtgacccaagagcctgaaagtggtaaggtggtccaggaaggcttcctccgagagccaggccccccaggtctgagccaccagctcatgtccggcatgcctggggctcccctcctgcctgagggccccagagaggccacacgccaaccttcggggacaggacctgaggacacagagggcggccgccacgcccctgagctgctcaagcaccagcttctaggagacctgcaccaggaggggccgccgctgaagggggcagggggcaaagagaggccggggagcaaggaggaggtggatgaagaccgcgacgtcgatgagtcctccccccaagactcccctccctccaaggcctccccagcccaagatgggcggcctccccagacagccgccagagaagccaccagcatcccaggcttcccagcggagggtgccatccccctccctgtggatttcctctccaaagtttccacagagatcccagcctcagagcccgacgggcccagtgtagggcgggccaaagggcaggatgcccccctggagttcacgtttcacgtggaaatcacacccaacgtgcagaaggagcaggcgcactcggaggagcatttgggaagggctgcatttccaggggcccctggagaggggccagaggcccggggcccctctttgggagaggacacaaaagaggctgaccttccagagccctctgaaaagcagcctgctgctgctccgcgggggaagcccgtcagccgggtccctcaactcaaagctcgcatggtcagtaaaagcaaagacgggactggaagcgatgacaaaaaagccaagacatccacacgttcctctgctaaaaccttgaaaaataggccttgccttagccccaaacaccccactcctggtagctcagaccctctgatccaaccctccagccctgctgtgtgcccagagccaccttcctctcctaaatacgtctcttctgtcacttcccgaactggcagttctggagcaaaggagatgaaactcaagggggctgatggtaaaacgaagatcgccacaccgcggggagcagcccctccaggccagaagggccaggccaacgccaccaggattccagcaaaaaccccgcccgctccaaagacaccacccagctctggtgaacctccaaaatcaggggatcgcagcggctacagcagccccggctccccaggcactcccggcagccgctcccgcaccccgtcccttccaaccccacccacccgggagcccaagaaggtggcagtggtccgtactccacccaagtcgccgtcttccgccaagagccgcctgcagacagcccccgtgcccatgccagacctgaagaatgtcaagtccaagatcggctccactgagaacctgaagcaccagccgggaggcgggaaggtgcagataattaataagaagctggatcttagcaacgtccagtccaagtgtggctcaaaggataatatcaaacacgtcccgggaggcggcagtgtgcaaatagtctacaaaccagttgacctgagcaaggtgacctccaagtgtggctcattaggcaacatccatcataaaccaggaggtggccaggtggaagtaaaatctgagaagcttgacttcaaggacagagtccagtcgaagattgggtccctggacaatatcacccacgtccctggcggaggaaataaaaagattgaaacccacaagctgaccttccgcgagaacgccaaagccaagacagaccacggggcggagatcgtgtacaagtcgccagtggtgtctggggacacgtctccacggcatctcagcaatgtctcctccaccggcagcatcgacatggtagactcgccccagctcgccacgctagctgacgaggtgtctgcctccctggccaagcagggtttgtgatcaggcccctggggcggtcaataattgtggagaggagagaatgagagagtgtggaaaaaaaaagaataatgacccggcccccgccctctgcccccagctgctcctcgcagttcggttaattggttaatcacttaacctgcttttgtcactcggctttggctcgggacttcaaaatcagtgatgggagtaagagcaaatttcatctttccaaattgatgggtgggctagtaataaaatatttaaaaaaaaacattcaaaaacatggccacatccaacatttcctcaggcaattccttttgattcttttttcttccccctccatgtagaagagggagaaggagaggctctgaaagctgcttctgggggatttcaagggactgggggtgccaaccacctctggccctgttgtgggggtgtcacagaggcagtggcagcaacaaaggatttgaaacttggtgtgttcgtggagccacaggcagacgatgtcaaccttgtgtgagtgtgacgggggttggggtggggcgggaggccacgggggaggccgaggcaggggctgggcagaggggagaggaagcacaagaagtgggagtgggagaggaagccacgtgctggagagtagacatccccctccttgccgctgggagagccaaggcctatgccacctgcagcgtctgagcggccgcctgtccttggtggccgggggtgggggcctgctgtgggtcagtgtgccaccctctgcagggcagcctgtgggagaagggacagcgggtaaaaagagaaggcaagctggcaggagggtggcacttcgtggatgacctccttagaaaagactgaccttgatgtcttgagagcgctggcctcttcctccctccctgcagggtagggggcctgagttgaggggcttccctctgctccacagaaaccctgttttattgagttctgaaggttggaactgctgccatgattttggccactttgcagacctgggactttagggctaaccagttctctttgtaaggacttgtgcctcttgggagacgtccacccgtttccaagcctgggccactggcatctctggagtgtgtgggggtctgggaggcaggtcccgagccccctgtccttcccacggccactgcagtcaccccgtctgcgccgctgtgctgttgtctgccgtgagagcccaatcactgcctatacccctcatcacacgtcacaatgtcccgaattcccagcctcaccaccccttctcagtaatgaccctggttggttgcaggaggtacctactccatactgagggtgaaattaagggaaggcaaagtccaggcacaagagtgggaccccagcctctcactctcagttccactcatccaactgggaccctcaccacgaatctcatgatctgattcggttccctgtctcctcctcccgtcacagatgtgagccagggcactgctcagctgtgaccctaggtgtttctgccttgttgacatggagagagccctttcccctgagaaggcctggccccttcctgtgctgagcccacagcagcaggctgggtgtcttggttgtcagtggtggcaccaggatggaagggcaaggcacccagggcaggcccacagtcccgctgtcccccacttgcaccctagcttgtagctgccaacctcccagacagcccagcccgctgctcagctccacatgcatagtatcagccctccacacccgacaaaggggaacacacccccttggaaatggttcttttcccccagtcccagctggaagccatgctgtctgttctgctggagcagctgaacatatacatagatgttgccctgccctccccatctgcaccctgttgagttgtagttggatttgtctgtttatgcttggattcaccagagtgactatgatagtgaaaagaaaaaaaaaaaaaaaaaaggacgcatgtatcttgaaatgcttgtaaagaggtttctaacccaccctcacgaggtgtctctcacccccacactgggactcgtgtggcctgtgtggtgccaccctgctggggcctcccaagttttgaaaggctttcctcagcacctgggacccaacagagaccagcttctagcagctaaggaggccgttcagctgtgacgaaggcctgaagcacaggattaggactgaagcgatgatgtccccttccctacttccccttggggctccctgtgtcagggcacagactaggtcttgtggctggtctggcttgcggcgcgaggatggttctctctggtcatagcccgaagtctcatggcagtcccaaaggaggcttacaactcctgcatcacaagaaaaaggaagccactgccagctggggggatctgcagctcccagaagctccgtgagcctcagccacccctcagactgggttcctctccaagctcgccctctggaggggcagcgcagcctcccaccaagggccctgcgaccacagcagggattgggatgaattgcctgtcctggatctgctctagaggcccaagctgcctgcctgaggaaggatgacttgacaagtcaggagacactgttcccaaagccttgaccagagcacctcagcccgctgaccttgcacaaactccatctgctgccatgagaaaagggaagccgcctttgcaaaacattgctgcctaaagaaactcagcagcctcaggcccaattctgccacttctggtttgggtacagttaaaggcaaccctgagggacttggcagtagaaatccagggcctcccctggggctggcagcttcgtgtgcagctagagctttacctgaaaggaagtctctgggcccagaactctccaccaagagcctccctgccgttcgctgagtcccagcaattctcctaagttgaagggatctgagaaggagaaggaaatgtggggtagatttggtggtggttagagatatgcccccctcattactgccaacagtttcggctgcatttcttcacgcacctcggttcctcttcctgaagttcttgtgccctgctcttcagcaccatgggccttcttatacggaaggctctgggatctcccccttgtggggcaggctcttggggccagcctaagatcatggtttagggtgatcagtgctggcagataaattgaaaaggcacgctggcttgtgatcttaaatgaggacaatccccccagggctgggcactcctcccctcccctcacttctcccacctgcagagccagtgtccttgggtgggctagataggatatactgtatgccggctccttcaagctgctgactcactttatcaatagttccatttaaattgacttcagtggtgagactgtatcctgtttgctattgcttgttgtgctatggggggaggggggaggaatgtgtaagatagttaacatgggcaaagggagatcttggggtgcagcacttaaactgcctcgtaacccttttcatgatttcaaccacatttgctagagggagggagcagccacggagttagaggcccttggggtttctcttttccactgacaggctttcccaggcagctggctagttcattccctccccagccaggtgcaggcgtaggaatatggacatctggttgctttggcctgctgccctctttcaggggtcctaagcccacaatcatgcctccctaagaccttggcatccttccctctaagccgttggcacctctgtgccacctctcacactggctccagacacacagcctgtgcttttggagctgagatcactcgcttcaccctcctcatctttgttctccaagtaaagccacgaggtcggggcgagggcagaggtgatcacctgcgtgtcccatctacagacctgcagcttcataaaacttctgatttctcttcagctttgaaaagggttaccctgggcactggcctagagcctcacctcctaatagacttagccccatgagtttgccatgttgagcaggactatttctggcacttgcaagtcccatgatttcttcggtaattctgagggtggggggagggacatgaaatcatcttagcttagctttctgtctgtgaatgtctatatagtgtattgtgtgttttaacaaatgatttacactgactgttgctgtaaaagtgaatttggaaataaagttattactctgattaaa

SEQ ID NO: 1765 - DNA, 5811 bp, Homo sapiens
ggacggccgagcggcagggcgctcgcgcgcgcccactagtggccggaggagaaggctcccgcggaggccgcgctgcccgccccctcccctggggaggctcgcgttcccgctgctcgcgcctgcgccgcccgccggcctcaggaacgcgccctcttcgccggcgcgcgccctcgcagtcaccgccacccaccagctccggcaccaacagcagcgccgctgccaccgcccaccttctgccgccgccaccacagccaccttctcctcctccgctgtcctctcccgtcctcgcctctgtcgactatcaggtgaactttgaaccaggatggctgagccccgccaggagttcgaagtgatggaagatcacgctgggacgtacgggttgggggacaggaaagatcaggggggctacaccatgcaccaagaccaagagggtgacacggacgctggcctgaaagaatctcccctgcagacccccactgaggacggatctgaggaaccgggctctgaaacctctgatgctaagagcactccaacagcggaagatgtgacagcacccttagtggatgagggagctcccggcaagcaggctgccgcgcagccccacacggagatcccagaaggaaccacagctgaagaagcaggcattggagacacccccagcctggaagacgaagctgctggtcacgtgacccaagctcgcatggtcagtaaaagcaaagacgggactggaagcgatgacaaaaaagccaagggggctgatggtaaaacgaagatcgccacaccgcggggagcagcccctccaggccagaagggccaggccaacgccaccaggattccagcaaaaaccccgcccgctccaaagacaccacccagctctggtgaacctccaaaatcaggggatcgcagcggctacagcagccccggctccccaggcactcccggcagccgctcccgcaccccgtcccttccaaccccacccacccgggagcccaagaaggtggcagtggtccgtactccacccaagtcgccgtcttccgccaagagccgcctgcagacagcccccgtgcccatgccagacctgaagaatgtcaagtccaagatcggctccactgagaacctgaagcaccagccgggaggcgggaaggtgcagataattaataagaagctggatcttagcaacgtccagtccaagtgtggctcaaaggataatatcaaacacgtcccgggaggcggcagtgtgcaaatagtctacaaaccagttgacctgagcaaggtgacctccaagtgtggctcattaggcaacatccatcataaaccaggaggtggccaggtggaagtaaaatctgagaagcttgacttcaaggacagagtccagtcgaagattgggtccctggacaatatcacccacgtccctggcggaggaaataaaaagattgaaacccacaagctgaccttccgcgagaacgccaaagccaagacagaccacggggcggagatcgtgtacaagtcgccagtggtgtctggggacacgtctccacggcatctcagcaatgtctcctccaccggcagcatcgacatggtagactcgccccagctcgccacgctagctgacgaggtgtctgcctccctggccaagcagggtttgtgatcaggcccctggggcggtcaataattgtggagaggagagaatgagagagtgtggaaaaaaaaagaataatgacccggcccccgccctctgcccccagctgctcctcgcagttcggttaattggttaatcacttaacctgcttttgtcactcggctttggctcgggacttcaaaatcagtgatgggagtaagagcaaatttcatctttccaaattgatgggtgggctagtaataaaatatttaaaaaaaaacattcaaaaacatggccacatccaacatttcctcaggcaattccttttgattcttttttcttccccctccatgtagaagagggagaaggagaggctctgaaagctgcttctgggggatttcaagggactgggggtgccaaccacctctggccctgttgtgggggtgtcacagaggcagtggcagcaacaaaggatttgaaacttggtgtgttcgtggagccacaggcagacgatgtcaaccttgtgtgagtgtgacgggggttggggtggggcgggaggccacgggggaggccgaggcaggggctgggcagaggggagaggaagcacaagaagtgggagtgggagaggaagccacgtgctggagagtagacatccccctccttgccgctgggagagccaaggcctatgccacctgcagcgtctgagcggccgcctgtccttggtggccgggggtgggggcctgctgtgggtcagtgtgccaccctctgcagggcagcctgtgggagaagggacagcgggtaaaaagagaaggcaagctggcaggagggtggcacttcgtggatgacctccttagaaaagactgaccttgatgtcttgagagcgctggcctcttcctccctccctgcagggtagggggcctgagttgaggggcttccctctgctccacagaaaccctgttttattgagttctgaaggttggaactgctgccatgattttggccactttgcagacctgggactttagggctaaccagttctctttgtaaggacttgtgcctcttgggagacgtccacccgtttccaagcctgggccactggcatctctggagtgtgtgggggtctgggaggcaggtcccgagccccctgtccttcccacggccactgcagtcaccccgtctgcgccgctgtgctgttgtctgccgtgagagcccaatcactgcctatacccctcatcacacgtcacaatgtcccgaattcccagcctcaccaccccttctcagtaatgaccctggttggttgcaggaggtacctactccatactgagggtgaaattaagggaaggcaaagtccaggcacaagagtgggaccccagcctctcactctcagttccactcatccaactgggaccctcaccacgaatctcatgatctgattcggttccctgtctcctcctcccgtcacagatgtgagccagggcactgctcagctgtgaccctaggtgtttctgccttgttgacatggagagagccctttcccctgagaaggcctggccccttcctgtgctgagcccacagcagcaggctgggtgtcttggttgtcagtggtggcaccaggatggaagggcaaggcacccagggcaggcccacagtcccgctgtcccccacttgcaccctagcttgtagctgccaacctcccagacagcccagcccgctgctcagctccacatgcatagtatcagccctccacacccgacaaaggggaacacacccccttggaaatggttcttttcccccagtcccagctggaagccatgctgtctgttctgctggagcagctgaacatatacatagatgttgccctgccctccccatctgcaccctgttgagttgtagttggatttgtctgtttatgcttggattcaccagagtgactatgatagtgaaaagaaaaaaaaaaaaaaaaaaggacgcatgtatcttgaaatgcttgtaaagaggtttctaacccaccctcacgaggtgtctctcacccccacactgggactcgtgtggcctgtgtggtgccaccctgctggggcctcccaagttttgaaaggctttcctcagcacctgggacccaacagagaccagcttctagcagctaaggaggccgttcagctgtgacgaaggcctgaagcacaggattaggactgaagcgatgatgtccccttccctacttccccttggggctccctgtgtcagggcacagactaggtcttgtggctggtctggcttgcggcgcgaggatggttctctctggtcatagcccgaagtctcatggcagtcccaaaggaggcttacaactcctgcatcacaagaaaaaggaagccactgccagctggggggatctgcagctcccagaagctccgtgagcctcagccacccctcagactgggttcctctccaagctcgccctctggaggggcagcgcagcctcccaccaagggccctgcgaccacagcagggattgggatgaattgcctgtcctggatctgctctagaggcccaagctgcctgcctgaggaaggatgacttgacaagtcaggagacactgttcccaaagccttgaccagagcacctcagcccgctgaccttgcacaaactccatctgctgccatgagaaaagggaagccgcctttgcaaaacattgctgcctaaagaaactcagcagcctcaggcccaattctgccacttctggtttgggtacagttaaaggcaaccctgagggacttggcagtagaaatccagggcctcccctggggctggcagcttcgtgtgcagctagagctttacctgaaaggaagtctctgggcccagaactctccaccaagagcctccctgccgttcgctgagtcccagcaattctcctaagttgaagggatctgagaaggagaaggaaatgtggggtagatttggtggtggttagagatatgcccccctcattactgccaacagtttcggctgcatttcttcacgcacctcggttcctcttcctgaagttcttgtgccctgctcttcagcaccatgggccttcttatacggaaggctctgggatctcccccttgtggggcaggctcttggggccagcctaagatcatggtttagggtgatcagtgctggcagataaattgaaaaggcacgctggcttgtgatcttaaatgaggacaatccccccagggctgggcactcctcccctcccctcacttctcccacctgcagagccagtgtccttgggtgggctagataggatatactgtatgccggctccttcaagctgctgactcactttatcaatagttccatttaaattgacttcagtggtgagactgtatcctgtttgctattgcttgttgtgctatggggggaggggggaggaatgtgtaagatagttaacatgggcaaagggagatcttggggtgcagcacttaaactgcctcgtaacccttttcatgatttcaaccacatttgctagagggagggagcagccacggagttagaggcccttggggtttctcttttccactgacaggctttcccaggcagctggctagttcattccctccccagccaggtgcaggcgtaggaatatggacatctggttgctttggcctgctgccctctttcaggggtcctaagcccacaatcatgcctccctaagaccttggcatccttccctctaagccgttggcacctctgtgccacctctcacactggctccagacacacagcctgtgcttttggagctgagatcactcgcttcaccctcctcatctttgttctccaagtaaagccacgaggtcggggcgagggcagaggtgatcacctgcgtgtcccatctacagacctgcagcttcataaaacttctgatttctcttcagctttgaaaagggttaccctgggcactggcctagagcctcacctcctaatagacttagccccatgagtttgccatgttgagcaggactatttctggcacttgcaagtcccatgatttcttcggtaattctgagggtggggggagggacatgaaatcatcttagcttagctttctgtctgtgaatgtctatatagtgtattgtgtgttttaacaaatgatttacactgactgttgctgtaaaagtgaatttggaaataaagttattactctgattaaa

SEQ ID NO: 1766 - DNA, 5637 bp, Homo sapiens
ggacggccgagcggcagggcgctcgcgcgcgcccactagtggccggaggagaaggctcccgcggaggccgcgctgcccgccccctcccctggggaggctcgcgttcccgctgctcgcgcctgcgccgcccgccggcctcaggaacgcgccctcttcgccggcgcgcgccctcgcagtcaccgccacccaccagctccggcaccaacagcagcgccgctgccaccgcccaccttctgccgccgccaccacagccaccttctcctcctccgctgtcctctcccgtcctcgcctctgtcgactatcaggtgaactttgaaccaggatggctgagccccgccaggagttcgaagtgatggaagatcacgctgggacgtacgggttgggggacaggaaagatcaggggggctacaccatgcaccaagaccaagagggtgacacggacgctggcctgaaagctgaagaagcaggcattggagacacccccagcctggaagacgaagctgctggtcacgtgacccaagctcgcatggtcagtaaaagcaaagacgggactggaagcgatgacaaaaaagccaagggggctgatggtaaaacgaagatcgccacaccgcggggagcagcccctccaggccagaagggccaggccaacgccaccaggattccagcaaaaaccccgcccgctccaaagacaccacccagctctggtgaacctccaaaatcaggggatcgcagcggctacagcagccccggctccccaggcactcccggcagccgctcccgcaccccgtcccttccaaccccacccacccgggagcccaagaaggtggcagtggtccgtactccacccaagtcgccgtcttccgccaagagccgcctgcagacagcccccgtgcccatgccagacctgaagaatgtcaagtccaagatcggctccactgagaacctgaagcaccagccgggaggcgggaaggtgcagataattaataagaagctggatcttagcaacgtccagtccaagtgtggctcaaaggataatatcaaacacgtcccgggaggcggcagtgtgcaaatagtctacaaaccagttgacctgagcaaggtgacctccaagtgtggctcattaggcaacatccatcataaaccaggaggtggccaggtggaagtaaaatctgagaagcttgacttcaaggacagagtccagtcgaagattgggtccctggacaatatcacccacgtccctggcggaggaaataaaaagattgaaacccacaagctgaccttccgcgagaacgccaaagccaagacagaccacggggcggagatcgtgtacaagtcgccagtggtgtctggggacacgtctccacggcatctcagcaatgtctcctccaccggcagcatcgacatggtagactcgccccagctcgccacgctagctgacgaggtgtctgcctccctggccaagcagggtttgtgatcaggcccctggggcggtcaataattgtggagaggagagaatgagagagtgtggaaaaaaaaagaataatgacccggcccccgccctctgcccccagctgctcctcgcagttcggttaattggttaatcacttaacctgcttttgtcactcggctttggctcgggacttcaaaatcagtgatgggagtaagagcaaatttcatctttccaaattgatgggtgggctagtaataaaatatttaaaaaaaaacattcaaaaacatggccacatccaacatttcctcaggcaattccttttgattcttttttcttccccctccatgtagaagagggagaaggagaggctctgaaagctgcttctgggggatttcaagggactgggggtgccaaccacctctggccctgttgtgggggtgtcacagaggcagtggcagcaacaaaggatttgaaacttggtgtgttcgtggagccacaggcagacgatgtcaaccttgtgtgagtgtgacgggggttggggtggggcgggaggccacgggggaggccgaggcaggggctgggcagaggggagaggaagcacaagaagtgggagtgggagaggaagccacgtgctggagagtagacatccccctccttgccgctgggagagccaaggcctatgccacctgcagcgtctgagcggccgcctgtccttggtggccgggggtgggggcctgctgtgggtcagtgtgccaccctctgcagggcagcctgtgggagaagggacagcgggtaaaaagagaaggcaagctggcaggagggtggcacttcgtggatgacctccttagaaaagactgaccttgatgtcttgagagcgctggcctcttcctccctccctgcagggtagggggcctgagttgaggggcttccctctgctccacagaaaccctgttttattgagttctgaaggttggaactgctgccatgattttggccactttgcagacctgggactttagggctaaccagttctctttgtaaggacttgtgcctcttgggagacgtccacccgtttccaagcctgggccactggcatctctggagtgtgtgggggtctgggaggcaggtcccgagccccctgtccttcccacggccactgcagtcaccccgtctgcgccgctgtgctgttgtctgccgtgagagcccaatcactgcctatacccctcatcacacgtcacaatgtcccgaattcccagcctcaccaccccttctcagtaatgaccctggttggttgcaggaggtacctactccatactgagggtgaaattaagggaaggcaaagtccaggcacaagagtgggaccccagcctctcactctcagttccactcatccaactgggaccctcaccacgaatctcatgatctgattcggttccctgtctcctcctcccgtcacagatgtgagccagggcactgctcagctgtgaccctaggtgtttctgccttgttgacatggagagagccctttcccctgagaaggcctggccccttcctgtgctgagcccacagcagcaggctgggtgtcttggttgtcagtggtggcaccaggatggaagggcaaggcacccagggcaggcccacagtcccgctgtcccccacttgcaccctagcttgtagctgccaacctcccagacagcccagcccgctgctcagctccacatgcatagtatcagccctccacacccgacaaaggggaacacacccccttggaaatggttcttttcccccagtcccagctggaagccatgctgtctgttctgctggagcagctgaacatatacatagatgttgccctgccctccccatctgcaccctgttgagttgtagttggatttgtctgtttatgcttggattcaccagagtgactatgatagtgaaaagaaaaaaaaaaaaaaaaaaggacgcatgtatcttgaaatgcttgtaaagaggtttctaacccaccctcacgaggtgtctctcacccccacactgggactcgtgtggcctgtgtggtgccaccctgctggggcctcccaagttttgaaaggctttcctcagcacctgggacccaacagagaccagcttctagcagctaaggaggccgttcagctgtgacgaaggcctgaagcacaggattaggactgaagcgatgatgtccccttccctacttccccttggggctccctgtgtcagggcacagactaggtcttgtggctggtctggcttgcggcgcgaggatggttctctctggtcatagcccgaagtctcatggcagtcccaaaggaggcttacaactcctgcatcacaagaaaaaggaagccactgccagctggggggatctgcagctcccagaagctccgtgagcctcagccacccctcagactgggttcctctccaagctcgccctctggaggggcagcgcagcctcccaccaagggccctgcgaccacagcagggattgggatgaattgcctgtcctggatctgctctagaggcccaagctgcctgcctgaggaaggatgacttgacaagtcaggagacactgttcccaaagccttgaccagagcacctcagcccgctgaccttgcacaaactccatctgctgccatgagaaaagggaagccgcctttgcaaaacattgctgcctaaagaaactcagcagcctcaggcccaattctgccacttctggtttgggtacagttaaaggcaaccctgagggacttggcagtagaaatccagggcctcccctggggctggcagcttcgtgtgcagctagagctttacctgaaaggaagtctctgggcccagaactctccaccaagagcctccctgccgttcgctgagtcccagcaattctcctaagttgaagggatctgagaaggagaaggaaatgtggggtagatttggtggtggttagagatatgcccccctcattactgccaacagtttcggctgcatttcttcacgcacctcggttcctcttcctgaagttcttgtgccctgctcttcagcaccatgggccttcttatacggaaggctctgggatctcccccttgtggggcaggctcttggggccagcctaagatcatggtttagggtgatcagtgctggcagataaattgaaaaggcacgctggcttgtgatcttaaatgaggacaatccccccagggctgggcactcctcccctcccctcacttctcccacctgcagagccagtgtccttgggtgggctagataggatatactgtatgccggctccttcaagctgctgactcactttatcaatagttccatttaaattgacttcagtggtgagactgtatcctgtttgctattgcttgttgtgctatggggggaggggggaggaatgtgtaagatagttaacatgggcaaagggagatcttggggtgcagcacttaaactgcctcgtaacccttttcatgatttcaaccacatttgctagagggagggagcagccacggagttagaggcccttggggtttctcttttccactgacaggctttcccaggcagctggctagttcattccctccccagccaggtgcaggcgtaggaatatggacatctggttgctttggcctgctgccctctttcaggggtcctaagcccacaatcatgcctccctaagaccttggcatccttccctctaagccgttggcacctctgtgccacctctcacactggctccagacacacagcctgtgcttttggagctgagatcactcgcttcaccctcctcatctttgttctccaagtaaagccacgaggtcggggcgagggcagaggtgatcacctgcgtgtcccatctacagacctgcagcttcataaaacttctgatttctcttcagctttgaaaagggttaccctgggcactggcctagagcctcacctcctaatagacttagccccatgagtttgccatgttgagcaggactatttctggcacttgcaagtcccatgatttcttcggtaattctgagggtggggggagggacatgaaatcatcttagcttagctttctgtctgtgaatgtctatatagtgtattgtgtgttttaacaaatgatttacactgactgttgctgtaaaagtgaatttggaaataaagttattactctgattaaa

SEQ ID NO: 1767 - DNA, 5544 bp, Homo sapiens
ggacggccgagcggcagggcgctcgcgcgcgcccactagtggccggaggagaaggctcccgcggaggccgcgctgcccgccccctcccctggggaggctcgcgttcccgctgctcgcgcctgcgccgcccgccggcctcaggaacgcgccctcttcgccggcgcgcgccctcgcagtcaccgccacccaccagctccggcaccaacagcagcgccgctgccaccgcccaccttctgccgccgccaccacagccaccttctcctcctccgctgtcctctcccgtcctcgcctctgtcgactatcaggtgaactttgaaccaggatggctgagccccgccaggagttcgaagtgatggaagatcacgctgggacgtacgggttgggggacaggaaagatcaggggggctacaccatgcaccaagaccaagagggtgacacggacgctggcctgaaagctgaagaagcaggcattggagacacccccagcctggaagacgaagctgctggtcacgtgacccaagctcgcatggtcagtaaaagcaaagacgggactggaagcgatgacaaaaaagccaagggggctgatggtaaaacgaagatcgccacaccgcggggagcagcccctccaggccagaagggccaggccaacgccaccaggattccagcaaaaaccccgcccgctccaaagacaccacccagctctggtgaacctccaaaatcaggggatcgcagcggctacagcagccccggctccccaggcactcccggcagccgctcccgcaccccgtcccttccaaccccacccacccgggagcccaagaaggtggcagtggtccgtactccacccaagtcgccgtcttccgccaagagccgcctgcagacagcccccgtgcccatgccagacctgaagaatgtcaagtccaagatcggctccactgagaacctgaagcaccagccgggaggcgggaaggtgcaaatagtctacaaaccagttgacctgagcaaggtgacctccaagtgtggctcattaggcaacatccatcataaaccaggaggtggccaggtggaagtaaaatctgagaagcttgacttcaaggacagagtccagtcgaagattgggtccctggacaatatcacccacgtccctggcggaggaaataaaaagattgaaacccacaagctgaccttccgcgagaacgccaaagccaagacagaccacggggcggagatcgtgtacaagtcgccagtggtgtctggggacacgtctccacggcatctcagcaatgtctcctccaccggcagcatcgacatggtagactcgccccagctcgccacgctagctgacgaggtgtctgcctccctggccaagcagggtttgtgatcaggcccctggggcggtcaataattgtggagaggagagaatgagagagtgtggaaaaaaaaagaataatgacccggcccccgccctctgcccccagctgctcctcgcagttcggttaattggttaatcacttaacctgcttttgtcactcggctttggctcgggacttcaaaatcagtgatgggagtaagagcaaatttcatctttccaaattgatgggtgggctagtaataaaatatttaaaaaaaaacattcaaaaacatggccacatccaacatttcctcaggcaattccttttgattcttttttcttccccctccatgtagaagagggagaaggagaggctctgaaagctgcttctgggggatttcaagggactgggggtgccaaccacctctggccctgttgtgggggtgtcacagaggcagtggcagcaacaaaggatttgaaacttggtgtgttcgtggagccacaggcagacgatgtcaaccttgtgtgagtgtgacgggggttggggtggggcgggaggccacgggggaggccgaggcaggggctgggcagaggggagaggaagcacaagaagtgggagtgggagaggaagccacgtgctggagagtagacatccccctccttgccgctgggagagccaaggcctatgccacctgcagcgtctgagcggccgcctgtccttggtggccgggggtgggggcctgctgtgggtcagtgtgccaccctctgcagggcagcctgtgggagaagggacagcgggtaaaaagagaaggcaagctggcaggagggtggcacttcgtggatgacctccttagaaaagactgaccttgatgtcttgagagcgctggcctcttcctccctccctgcagggtagggggcctgagttgaggggcttccctctgctccacagaaaccctgttttattgagttctgaaggttggaactgctgccatgattttggccactttgcagacctgggactttagggctaaccagttctctttgtaaggacttgtgcctcttgggagacgtccacccgtttccaagcctgggccactggcatctctggagtgtgtgggggtctgggaggcaggtcccgagccccctgtccttcccacggccactgcagtcaccccgtctgcgccgctgtgctgttgtctgccgtgagagcccaatcactgcctatacccctcatcacacgtcacaatgtcccgaattcccagcctcaccaccccttctcagtaatgaccctggttggttgcaggaggtacctactccatactgagggtgaaattaagggaaggcaaagtccaggcacaagagtgggaccccagcctctcactctcagttccactcatccaactgggaccctcaccacgaatctcatgatctgattcggttccctgtctcctcctcccgtcacagatgtgagccagggcactgctcagctgtgaccctaggtgtttctgccttgttgacatggagagagccctttcccctgagaaggcctggccccttcctgtgctgagcccacagcagcaggctgggtgtcttggttgtcagtggtggcaccaggatggaagggcaaggcacccagggcaggcccacagtcccgctgtcccccacttgcaccctagcttgtagctgccaacctcccagacagcccagcccgctgctcagctccacatgcatagtatcagccctccacacccgacaaaggggaacacacccccttggaaatggttcttttcccccagtcccagctggaagccatgctgtctgttctgctggagcagctgaacatatacatagatgttgccctgccctccccatctgcaccctgttgagttgtagttggatttgtctgtttatgcttggattcaccagagtgactatgatagtgaaaagaaaaaaaaaaaaaaaaaaggacgcatgtatcttgaaatgcttgtaaagaggtttctaacccaccctcacgaggtgtctctcacccccacactgggactcgtgtggcctgtgtggtgccaccctgctggggcctcccaagttttgaaaggctttcctcagcacctgggacccaacagagaccagcttctagcagctaaggaggccgttcagctgtgacgaaggcctgaagcacaggattaggactgaagcgatgatgtccccttccctacttccccttggggctccctgtgtcagggcacagactaggtcttgtggctggtctggcttgcggcgcgaggatggttctctctggtcatagcccgaagtctcatggcagtcccaaaggaggcttacaactcctgcatcacaagaaaaaggaagccactgccagctggggggatctgcagctcccagaagctccgtgagcctcagccacccctcagactgggttcctctccaagctcgccctctggaggggcagcgcagcctcccaccaagggccctgcgaccacagcagggattgggatgaattgcctgtcctggatctgctctagaggcccaagctgcctgcctgaggaaggatgacttgacaagtcaggagacactgttcccaaagccttgaccagagcacctcagcccgctgaccttgcacaaactccatctgctgccatgagaaaagggaagccgcctttgcaaaacattgctgcctaaagaaactcagcagcctcaggcccaattctgccacttctggtttgggtacagttaaaggcaaccctgagggacttggcagtagaaatccagggcctcccctggggctggcagcttcgtgtgcagctagagctttacctgaaaggaagtctctgggcccagaactctccaccaagagcctccctgccgttcgctgagtcccagcaattctcctaagttgaagggatctgagaaggagaaggaaatgtggggtagatttggtggtggttagagatatgcccccctcattactgccaacagtttcggctgcatttcttcacgcacctcggttcctcttcctgaagttcttgtgccctgctcttcagcaccatgggccttcttatacggaaggctctgggatctcccccttgtggggcaggctcttggggccagcctaagatcatggtttagggtgatcagtgctggcagataaattgaaaaggcacgctggcttgtgatcttaaatgaggacaatccccccagggctgggcactcctcccctcccctcacttctcccacctgcagagccagtgtccttgggtgggctagataggatatactgtatgccggctccttcaagctgctgactcactttatcaatagttccatttaaattgacttcagtggtgagactgtatcctgtttgctattgcttgttgtgctatggggggaggggggaggaatgtgtaagatagttaacatgggcaaagggagatcttggggtgcagcacttaaactgcctcgtaacccttttcatgatttcaaccacatttgctagagggagggagcagccacggagttagaggcccttggggtttctcttttccactgacaggctttcccaggcagctggctagttcattccctccccagccaggtgcaggcgtaggaatatggacatctggttgctttggcctgctgccctctttcaggggtcctaagcccacaatcatgcctccctaagaccttggcatccttccctctaagccgttggcacctctgtgccacctctcacactggctccagacacacagcctgtgcttttggagctgagatcactcgcttcaccctcctcatctttgttctccaagtaaagccacgaggtcggggcgagggcagaggtgatcacctgcgtgtcccatctacagacctgcagcttcataaaacttctgatttctcttcagctttgaaaagggttaccctgggcactggcctagagcctcacctcctaatagacttagccccatgagtttgccatgttgagcaggactatttctggcacttgcaagtcccatgatttcttcggtaattctgagggtggggggagggacatgaaatcatcttagcttagctttctgtctgtgaatgtctatatagtgtattgtgtgttttaacaaatgatttacactgactgttgctgtaaaagtgaatttggaaataaagttattactctgattaaa

SEQ ID NO: 1768 - DNA, 5724 bp, Homo sapiens
ggacggccgagcggcagggcgctcgcgcgcgcccactagtggccggaggagaaggctcccgcggaggccgcgctgcccgccccctcccctggggaggctcgcgttcccgctgctcgcgcctgcgccgcccgccggcctcaggaacgcgccctcttcgccggcgcgcgccctcgcagtcaccgccacccaccagctccggcaccaacagcagcgccgctgccaccgcccaccttctgccgccgccaccacagccaccttctcctcctccgctgtcctctcccgtcctcgcctctgtcgactatcaggtgaactttgaaccaggatggctgagccccgccaggagttcgaagtgatggaagatcacgctgggacgtacgggttgggggacaggaaagatcaggggggctacaccatgcaccaagaccaagagggtgacacggacgctggcctgaaagaatctcccctgcagacccccactgaggacggatctgaggaaccgggctctgaaacctctgatgctaagagcactccaacagcggaagctgaagaagcaggcattggagacacccccagcctggaagacgaagctgctggtcacgtgacccaagctcgcatggtcagtaaaagcaaagacgggactggaagcgatgacaaaaaagccaagggggctgatggtaaaacgaagatcgccacaccgcggggagcagcccctccaggccagaagggccaggccaacgccaccaggattccagcaaaaaccccgcccgctccaaagacaccacccagctctggtgaacctccaaaatcaggggatcgcagcggctacagcagccccggctccccaggcactcccggcagccgctcccgcaccccgtcccttccaaccccacccacccgggagcccaagaaggtggcagtggtccgtactccacccaagtcgccgtcttccgccaagagccgcctgcagacagcccccgtgcccatgccagacctgaagaatgtcaagtccaagatcggctccactgagaacctgaagcaccagccgggaggcgggaaggtgcagataattaataagaagctggatcttagcaacgtccagtccaagtgtggctcaaaggataatatcaaacacgtcccgggaggcggcagtgtgcaaatagtctacaaaccagttgacctgagcaaggtgacctccaagtgtggctcattaggcaacatccatcataaaccaggaggtggccaggtggaagtaaaatctgagaagcttgacttcaaggacagagtccagtcgaagattgggtccctggacaatatcacccacgtccctggcggaggaaataaaaagattgaaacccacaagctgaccttccgcgagaacgccaaagccaagacagaccacggggcggagatcgtgtacaagtcgccagtggtgtctggggacacgtctccacggcatctcagcaatgtctcctccaccggcagcatcgacatggtagactcgccccagctcgccacgctagctgacgaggtgtctgcctccctggccaagcagggtttgtgatcaggcccctggggcggtcaataattgtggagaggagagaatgagagagtgtggaaaaaaaaagaataatgacccggcccccgccctctgcccccagctgctcctcgcagttcggttaattggttaatcacttaacctgcttttgtcactcggctttggctcgggacttcaaaatcagtgatgggagtaagagcaaatttcatctttccaaattgatgggtgggctagtaataaaatatttaaaaaaaaacattcaaaaacatggccacatccaacatttcctcaggcaattccttttgattcttttttcttccccctccatgtagaagagggagaaggagaggctctgaaagctgcttctgggggatttcaagggactgggggtgccaaccacctctggccctgttgtgggggtgtcacagaggcagtggcagcaacaaaggatttgaaacttggtgtgttcgtggagccacaggcagacgatgtcaaccttgtgtgagtgtgacgggggttggggtggggcgggaggccacgggggaggccgaggcaggggctgggcagaggggagaggaagcacaagaagtgggagtgggagaggaagccacgtgctggagagtagacatccccctccttgccgctgggagagccaaggcctatgccacctgcagcgtctgagcggccgcctgtccttggtggccgggggtgggggcctgctgtgggtcagtgtgccaccctctgcagggcagcctgtgggagaagggacagcgggtaaaaagagaaggcaagctggcaggagggtggcacttcgtggatgacctccttagaaaagactgaccttgatgtcttgagagcgctggcctcttcctccctccctgcagggtagggggcctgagttgaggggcttccctctgctccacagaaaccctgttttattgagttctgaaggttggaactgctgccatgattttggccactttgcagacctgggactttagggctaaccagttctctttgtaaggacttgtgcctcttgggagacgtccacccgtttccaagcctgggccactggcatctctggagtgtgtgggggtctgggaggcaggtcccgagccccctgtccttcccacggccactgcagtcaccccgtctgcgccgctgtgctgttgtctgccgtgagagcccaatcactgcctatacccctcatcacacgtcacaatgtcccgaattcccagcctcaccaccccttctcagtaatgaccctggttggttgcaggaggtacctactccatactgagggtgaaattaagggaaggcaaagtccaggcacaagagtgggaccccagcctctcactctcagttccactcatccaactgggaccctcaccacgaatctcatgatctgattcggttccctgtctcctcctcccgtcacagatgtgagccagggcactgctcagctgtgaccctaggtgtttctgccttgttgacatggagagagccctttcccctgagaaggcctggccccttcctgtgctgagcccacagcagcaggctgggtgtcttggttgtcagtggtggcaccaggatggaagggcaaggcacccagggcaggcccacagtcccgctgtcccccacttgcaccctagcttgtagctgccaacctcccagacagcccagcccgctgctcagctccacatgcatagtatcagccctccacacccgacaaaggggaacacacccccttggaaatggttcttttcccccagtcccagctggaagccatgctgtctgttctgctggagcagctgaacatatacatagatgttgccctgccctccccatctgcaccctgttgagttgtagttggatttgtctgtttatgcttggattcaccagagtgactatgatagtgaaaagaaaaaaaaaaaaaaaaaaggacgcatgtatcttgaaatgcttgtaaagaggtttctaacccaccctcacgaggtgtctctcacccccacactgggactcgtgtggcctgtgtggtgccaccctgctggggcctcccaagttttgaaaggctttcctcagcacctgggacccaacagagaccagcttctagcagctaaggaggccgttcagctgtgacgaaggcctgaagcacaggattaggactgaagcgatgatgtccccttccctacttccccttggggctccctgtgtcagggcacagactaggtcttgtggctggtctggcttgcggcgcgaggatggttctctctggtcatagcccgaagtctcatggcagtcccaaaggaggcttacaactcctgcatcacaagaaaaaggaagccactgccagctggggggatctgcagctcccagaagctccgtgagcctcagccacccctcagactgggttcctctccaagctcgccctctggaggggcagcgcagcctcccaccaagggccctgcgaccacagcagggattgggatgaattgcctgtcctggatctgctctagaggcccaagctgcctgcctgaggaaggatgacttgacaagtcaggagacactgttcccaaagccttgaccagagcacctcagcccgctgaccttgcacaaactccatctgctgccatgagaaaagggaagccgcctttgcaaaacattgctgcctaaagaaactcagcagcctcaggcccaattctgccacttctggtttgggtacagttaaaggcaaccctgagggacttggcagtagaaatccagggcctcccctggggctggcagcttcgtgtgcagctagagctttacctgaaaggaagtctctgggcccagaactctccaccaagagcctccctgccgttcgctgagtcccagcaattctcctaagttgaagggatctgagaaggagaaggaaatgtggggtagatttggtggtggttagagatatgcccccctcattactgccaacagtttcggctgcatttcttcacgcacctcggttcctcttcctgaagttcttgtgccctgctcttcagcaccatgggccttcttatacggaaggctctgggatctcccccttgtggggcaggctcttggggccagcctaagatcatggtttagggtgatcagtgctggcagataaattgaaaaggcacgctggcttgtgatcttaaatgaggacaatccccccagggctgggcactcctcccctcccctcacttctcccacctgcagagccagtgtccttgggtgggctagataggatatactgtatgccggctccttcaagctgctgactcactttatcaatagttccatttaaattgacttcagtggtgagactgtatcctgtttgctattgcttgttgtgctatggggggaggggggaggaatgtgtaagatagttaacatgggcaaagggagatcttggggtgcagcacttaaactgcctcgtaacccttttcatgatttcaaccacatttgctagagggagggagcagccacggagttagaggcccttggggtttctcttttccactgacaggctttcccaggcagctggctagttcattccctccccagccaggtgcaggcgtaggaatatggacatctggttgctttggcctgctgccctctttcaggggtcctaagcccacaatcatgcctccctaagaccttggcatccttccctctaagccgttggcacctctgtgccacctctcacactggctccagacacacagcctgtgcttttggagctgagatcactcgcttcaccctcctcatctttgttctccaagtaaagccacgaggtcggggcgagggcagaggtgatcacctgcgtgtcccatctacagacctgcagcttcataaaacttctgatttctcttcagctttgaaaagggttaccctgggcactggcctagagcctcacctcctaatagacttagccccatgagtttgccatgttgagcaggactatttctggcacttgcaagtcccatgatttcttcggtaattctgagggtggggggagggacatgaaatcatcttagcttagctttctgtctgtgaatgtctatatagtgtattgtgtgttttaacaaatgatttacactgactgttgctgtaaaagtgaatttggaaataaagttattactctgattaaa

SEQ ID NO: 1769 - DNA, 6816 bp, Homo sapiens
ggacggccgagcggcagggcgctcgcgcgcgcccactagtggccggaggagaaggctcccgcggaggccgcgctgcccgccccctcccctggggaggctcgcgttcccgctgctcgcgcctgcgccgcccgccggcctcaggaacgcgccctcttcgccggcgcgcgccctcgcagtcaccgccacccaccagctccggcaccaacagcagcgccgctgccaccgcccaccttctgccgccgccaccacagccaccttctcctcctccgctgtcctctcccgtcctcgcctctgtcgactatcaggtgaactttgaaccaggatggctgagccccgccaggagttcgaagtgatggaagatcacgctgggacgtacgggttgggggacaggaaagatcaggggggctacaccatgcaccaagaccaagagggtgacacggacgctggcctgaaagaatctcccctgcagacccccactgaggacggatctgaggaaccgggctctgaaacctctgatgctaagagcactccaacagcggaagatgtgacagcacccttagtggatgagggagctcccggcaagcaggctgccgcgcagccccacacggagatcccagaaggaaccacagctgaagaagcaggcattggagacacccccagcctggaagacgaagctgctggtcacgtgacccaagagcctgaaagtggtaaggtggtccaggaaggcttcctccgagagccaggccccccaggtctgagccaccagctcatgtccggcatgcctggggctcccctcctgcctgagggccccagagaggccacacgccaaccttcggggacaggacctgaggacacagagggcggccgccacgcccctgagctgctcaagcaccagcttctaggagacctgcaccaggaggggccgccgctgaagggggcagggggcaaagagaggccggggagcaaggaggaggtggatgaagaccgcgacgtcgatgagtcctccccccaagactcccctccctccaaggcctccccagcccaagatgggcggcctccccagacagccgccagagaagccaccagcatcccaggcttcccagcggagggtgccatccccctccctgtggatttcctctccaaagtttccacagagatcccagcctcagagcccgacgggcccagtgtagggcgggccaaagggcaggatgcccccctggagttcacgtttcacgtggaaatcacacccaacgtgcagaaggagcaggcgcactcggaggagcatttgggaagggctgcatttccaggggcccctggagaggggccagaggcccggggcccctctttgggagaggacacaaaagaggctgaccttccagagccctctgaaaagcagcctgctgctgctccgcgggggaagcccgtcagccgggtccctcaactcaaagctcgcatggtcagtaaaagcaaagacgggactggaagcgatgacaaaaaagccaagacatccacacgttcctctgctaaaaccttgaaaaataggccttgccttagccccaaacaccccactcctggtagctcagaccctctgatccaaccctccagccctgctgtgtgcccagagccaccttcctctcctaaatacgtctcttctgtcacttcccgaactggcagttctggagcaaaggagatgaaactcaagggggctgatggtaaaacgaagatcgccacaccgcggggagcagcccctccaggccagaagggccaggccaacgccaccaggattccagcaaaaaccccgcccgctccaaagacaccacccagctctgcgactaagcaagtccagagaagaccaccccctgcagggcccagatctgagagaggtgaacctccaaaatcaggggatcgcagcggctacagcagccccggctccccaggcactcccggcagccgctcccgcaccccgtcccttccaaccccacccacccgggagcccaagaaggtggcagtggtccgtactccacccaagtcgccgtcttccgccaagagccgcctgcagacagcccccgtgcccatgccagacctgaagaatgtcaagtccaagatcggctccactgagaacctgaagcaccagccgggaggcgggaaggtgcagataattaataagaagctggatcttagcaacgtccagtccaagtgtggctcaaaggataatatcaaacacgtcccgggaggcggcagtgtgcaaatagtctacaaaccagttgacctgagcaaggtgacctccaagtgtggctcattaggcaacatccatcataaaccaggaggtggccaggtggaagtaaaatctgagaagcttgacttcaaggacagagtccagtcgaagattgggtccctggacaatatcacccacgtccctggcggaggaaataaaaagattgaaacccacaagctgaccttccgcgagaacgccaaagccaagacagaccacggggcggagatcgtgtacaagtcgccagtggtgtctggggacacgtctccacggcatctcagcaatgtctcctccaccggcagcatcgacatggtagactcgccccagctcgccacgctagctgacgaggtgtctgcctccctggccaagcagggtttgtgatcaggcccctggggcggtcaataattgtggagaggagagaatgagagagtgtggaaaaaaaaagaataatgacccggcccccgccctctgcccccagctgctcctcgcagttcggttaattggttaatcacttaacctgcttttgtcactcggctttggctcgggacttcaaaatcagtgatgggagtaagagcaaatttcatctttccaaattgatgggtgggctagtaataaaatatttaaaaaaaaacattcaaaaacatggccacatccaacatttcctcaggcaattccttttgattcttttttcttccccctccatgtagaagagggagaaggagaggctctgaaagctgcttctgggggatttcaagggactgggggtgccaaccacctctggccctgttgtgggggtgtcacagaggcagtggcagcaacaaaggatttgaaacttggtgtgttcgtggagccacaggcagacgatgtcaaccttgtgtgagtgtgacgggggttggggtggggcgggaggccacgggggaggccgaggcaggggctgggcagaggggagaggaagcacaagaagtgggagtgggagaggaagccacgtgctggagagtagacatccccctccttgccgctgggagagccaaggcctatgccacctgcagcgtctgagcggccgcctgtccttggtggccgggggtgggggcctgctgtgggtcagtgtgccaccctctgcagggcagcctgtgggagaagggacagcgggtaaaaagagaaggcaagctggcaggagggtggcacttcgtggatgacctccttagaaaagactgaccttgatgtcttgagagcgctggcctcttcctccctccctgcagggtagggggcctgagttgaggggcttccctctgctccacagaaaccctgttttattgagttctgaaggttggaactgctgccatgattttggccactttgcagacctgggactttagggctaaccagttctctttgtaaggacttgtgcctcttgggagacgtccacccgtttccaagcctgggccactggcatctctggagtgtgtgggggtctgggaggcaggtcccgagccccctgtccttcccacggccactgcagtcaccccgtctgcgccgctgtgctgttgtctgccgtgagagcccaatcactgcctatacccctcatcacacgtcacaatgtcccgaattcccagcctcaccaccccttctcagtaatgaccctggttggttgcaggaggtacctactccatactgagggtgaaattaagggaaggcaaagtccaggcacaagagtgggaccccagcctctcactctcagttccactcatccaactgggaccctcaccacgaatctcatgatctgattcggttccctgtctcctcctcccgtcacagatgtgagccagggcactgctcagctgtgaccctaggtgtttctgccttgttgacatggagagagccctttcccctgagaaggcctggccccttcctgtgctgagcccacagcagcaggctgggtgtcttggttgtcagtggtggcaccaggatggaagggcaaggcacccagggcaggcccacagtcccgctgtcccccacttgcaccctagcttgtagctgccaacctcccagacagcccagcccgctgctcagctccacatgcatagtatcagccctccacacccgacaaaggggaacacacccccttggaaatggttcttttcccccagtcccagctggaagccatgctgtctgttctgctggagcagctgaacatatacatagatgttgccctgccctccccatctgcaccctgttgagttgtagttggatttgtctgtttatgcttggattcaccagagtgactatgatagtgaaaagaaaaaaaaaaaaaaaaaaggacgcatgtatcttgaaatgcttgtaaagaggtttctaacccaccctcacgaggtgtctctcacccccacactgggactcgtgtggcctgtgtggtgccaccctgctggggcctcccaagttttgaaaggctttcctcagcacctgggacccaacagagaccagcttctagcagctaaggaggccgttcagctgtgacgaaggcctgaagcacaggattaggactgaagcgatgatgtccccttccctacttccccttggggctccctgtgtcagggcacagactaggtcttgtggctggtctggcttgcggcgcgaggatggttctctctggtcatagcccgaagtctcatggcagtcccaaaggaggcttacaactcctgcatcacaagaaaaaggaagccactgccagctggggggatctgcagctcccagaagctccgtgagcctcagccacccctcagactgggttcctctccaagctcgccctctggaggggcagcgcagcctcccaccaagggccctgcgaccacagcagggattgggatgaattgcctgtcctggatctgctctagaggcccaagctgcctgcctgaggaaggatgacttgacaagtcaggagacactgttcccaaagccttgaccagagcacctcagcccgctgaccttgcacaaactccatctgctgccatgagaaaagggaagccgcctttgcaaaacattgctgcctaaagaaactcagcagcctcaggcccaattctgccacttctggtttgggtacagttaaaggcaaccctgagggacttggcagtagaaatccagggcctcccctggggctggcagcttcgtgtgcagctagagctttacctgaaaggaagtctctgggcccagaactctccaccaagagcctccctgccgttcgctgagtcccagcaattctcctaagttgaagggatctgagaaggagaaggaaatgtggggtagatttggtggtggttagagatatgcccccctcattactgccaacagtttcggctgcatttcttcacgcacctcggttcctcttcctgaagttcttgtgccctgctcttcagcaccatgggccttcttatacggaaggctctgggatctcccccttgtggggcaggctcttggggccagcctaagatcatggtttagggtgatcagtgctggcagataaattgaaaaggcacgctggcttgtgatcttaaatgaggacaatccccccagggctgggcactcctcccctcccctcacttctcccacctgcagagccagtgtccttgggtgggctagataggatatactgtatgccggctccttcaagctgctgactcactttatcaatagttccatttaaattgacttcagtggtgagactgtatcctgtttgctattgcttgttgtgctatggggggaggggggaggaatgtgtaagatagttaacatgggcaaagggagatcttggggtgcagcacttaaactgcctcgtaacccttttcatgatttcaaccacatttgctagagggagggagcagccacggagttagaggcccttggggtttctcttttccactgacaggctttcccaggcagctggctagttcattccctccccagccaggtgcaggcgtaggaatatggacatctggttgctttggcctgctgccctctttcaggggtcctaagcccacaatcatgcctccctaagaccttggcatccttccctctaagccgttggcacctctgtgccacctctcacactggctccagacacacagcctgtgcttttggagctgagatcactcgcttcaccctcctcatctttgttctccaagtaaagccacgaggtcggggcgagggcagaggtgatcacctgcgtgtcccatctacagacctgcagcttcataaaacttctgatttctcttcagctttgaaaagggttaccctgggcactggcctagagcctcacctcctaatagacttagccccatgagtttgccatgttgagcaggactatttctggcacttgcaagtcccatgatttcttcggtaattctgagggtggggggagggacatgaaatcatcttagcttagctttctgtctgtgaatgtctatatagtgtattgtgtgttttaacaaatgatttacactgactgttgctgtaaaagtgaatttggaaataaagttattactctgattaaa

SEQ ID NO: 1770 - DNA, 5631 bp, Homo sapiens
ggacggccgagcggcagggcgctcgcgcgcgcccactagtggccggaggagaaggctcccgcggaggccgcgctgcccgccccctcccctggggaggctcgcgttcccgctgctcgcgcctgcgccgcccgccggcctcaggaacgcgccctcttcgccggcgcgcgccctcgcagtcaccgccacccaccagctccggcaccaacagcagcgccgctgccaccgcccaccttctgccgccgccaccacagccaccttctcctcctccgctgtcctctcccgtcctcgcctctgtcgactatcaggtgaactttgaaccaggatggctgagccccgccaggagttcgaagtgatggaagatcacgctgggacgtacgggttgggggacaggaaagatcaggggggctacaccatgcaccaagaccaagagggtgacacggacgctggcctgaaagaatctcccctgcagacccccactgaggacggatctgaggaaccgggctctgaaacctctgatgctaagagcactccaacagcggaagctgaagaagcaggcattggagacacccccagcctggaagacgaagctgctggtcacgtgacccaagctcgcatggtcagtaaaagcaaagacgggactggaagcgatgacaaaaaagccaagggggctgatggtaaaacgaagatcgccacaccgcggggagcagcccctccaggccagaagggccaggccaacgccaccaggattccagcaaaaaccccgcccgctccaaagacaccacccagctctggtgaacctccaaaatcaggggatcgcagcggctacagcagccccggctccccaggcactcccggcagccgctcccgcaccccgtcccttccaaccccacccacccgggagcccaagaaggtggcagtggtccgtactccacccaagtcgccgtcttccgccaagagccgcctgcagacagcccccgtgcccatgccagacctgaagaatgtcaagtccaagatcggctccactgagaacctgaagcaccagccgggaggcgggaaggtgcaaatagtctacaaaccagttgacctgagcaaggtgacctccaagtgtggctcattaggcaacatccatcataaaccaggaggtggccaggtggaagtaaaatctgagaagcttgacttcaaggacagagtccagtcgaagattgggtccctggacaatatcacccacgtccctggcggaggaaataaaaagattgaaacccacaagctgaccttccgcgagaacgccaaagccaagacagaccacggggcggagatcgtgtacaagtcgccagtggtgtctggggacacgtctccacggcatctcagcaatgtctcctccaccggcagcatcgacatggtagactcgccccagctcgccacgctagctgacgaggtgtctgcctccctggccaagcagggtttgtgatcaggcccctggggcggtcaataattgtggagaggagagaatgagagagtgtggaaaaaaaaagaataatgacccggcccccgccctctgcccccagctgctcctcgcagttcggttaattggttaatcacttaacctgcttttgtcactcggctttggctcgggacttcaaaatcagtgatgggagtaagagcaaatttcatctttccaaattgatgggtgggctagtaataaaatatttaaaaaaaaacattcaaaaacatggccacatccaacatttcctcaggcaattccttttgattcttttttcttccccctccatgtagaagagggagaaggagaggctctgaaagctgcttctgggggatttcaagggactgggggtgccaaccacctctggccctgttgtgggggtgtcacagaggcagtggcagcaacaaaggatttgaaacttggtgtgttcgtggagccacaggcagacgatgtcaaccttgtgtgagtgtgacgggggttggggtggggcgggaggccacgggggaggccgaggcaggggctgggcagaggggagaggaagcacaagaagtgggagtgggagaggaagccacgtgctggagagtagacatccccctccttgccgctgggagagccaaggcctatgccacctgcagcgtctgagcggccgcctgtccttggtggccgggggtgggggcctgctgtgggtcagtgtgccaccctctgcagggcagcctgtgggagaagggacagcgggtaaaaagagaaggcaagctggcaggagggtggcacttcgtggatgacctccttagaaaagactgaccttgatgtcttgagagcgctggcctcttcctccctccctgcagggtagggggcctgagttgaggggcttccctctgctccacagaaaccctgttttattgagttctgaaggttggaactgctgccatgattttggccactttgcagacctgggactttagggctaaccagttctctttgtaaggacttgtgcctcttgggagacgtccacccgtttccaagcctgggccactggcatctctggagtgtgtgggggtctgggaggcaggtcccgagccccctgtccttcccacggccactgcagtcaccccgtctgcgccgctgtgctgttgtctgccgtgagagcccaatcactgcctatacccctcatcacacgtcacaatgtcccgaattcccagcctcaccaccccttctcagtaatgaccctggttggttgcaggaggtacctactccatactgagggtgaaattaagggaaggcaaagtccaggcacaagagtgggaccccagcctctcactctcagttccactcatccaactgggaccctcaccacgaatctcatgatctgattcggttccctgtctcctcctcccgtcacagatgtgagccagggcactgctcagctgtgaccctaggtgtttctgccttgttgacatggagagagccctttcccctgagaaggcctggccccttcctgtgctgagcccacagcagcaggctgggtgtcttggttgtcagtggtggcaccaggatggaagggcaaggcacccagggcaggcccacagtcccgctgtcccccacttgcaccctagcttgtagctgccaacctcccagacagcccagcccgctgctcagctccacatgcatagtatcagccctccacacccgacaaaggggaacacacccccttggaaatggttcttttcccccagtcccagctggaagccatgctgtctgttctgctggagcagctgaacatatacatagatgttgccctgccctccccatctgcaccctgttgagttgtagttggatttgtctgtttatgcttggattcaccagagtgactatgatagtgaaaagaaaaaaaaaaaaaaaaaaggacgcatgtatcttgaaatgcttgtaaagaggtttctaacccaccctcacgaggtgtctctcacccccacactgggactcgtgtggcctgtgtggtgccaccctgctggggcctcccaagttttgaaaggctttcctcagcacctgggacccaacagagaccagcttctagcagctaaggaggccgttcagctgtgacgaaggcctgaagcacaggattaggactgaagcgatgatgtccccttccctacttccccttggggctccctgtgtcagggcacagactaggtcttgtggctggtctggcttgcggcgcgaggatggttctctctggtcatagcccgaagtctcatggcagtcccaaaggaggcttacaactcctgcatcacaagaaaaaggaagccactgccagctggggggatctgcagctcccagaagctccgtgagcctcagccacccctcagactgggttcctctccaagctcgccctctggaggggcagcgcagcctcccaccaagggccctgcgaccacagcagggattgggatgaattgcctgtcctggatctgctctagaggcccaagctgcctgcctgaggaaggatgacttgacaagtcaggagacactgttcccaaagccttgaccagagcacctcagcccgctgaccttgcacaaactccatctgctgccatgagaaaagggaagccgcctttgcaaaacattgctgcctaaagaaactcagcagcctcaggcccaattctgccacttctggtttgggtacagttaaaggcaaccctgagggacttggcagtagaaatccagggcctcccctggggctggcagcttcgtgtgcagctagagctttacctgaaaggaagtctctgggcccagaactctccaccaagagcctccctgccgttcgctgagtcccagcaattctcctaagttgaagggatctgagaaggagaaggaaatgtggggtagatttggtggtggttagagatatgcccccctcattactgccaacagtttcggctgcatttcttcacgcacctcggttcctcttcctgaagttcttgtgccctgctcttcagcaccatgggccttcttatacggaaggctctgggatctcccccttgtggggcaggctcttggggccagcctaagatcatggtttagggtgatcagtgctggcagataaattgaaaaggcacgctggcttgtgatcttaaatgaggacaatccccccagggctgggcactcctcccctcccctcacttctcccacctgcagagccagtgtccttgggtgggctagataggatatactgtatgccggctccttcaagctgctgactcactttatcaatagttccatttaaattgacttcagtggtgagactgtatcctgtttgctattgcttgttgtgctatggggggaggggggaggaatgtgtaagatagttaacatgggcaaagggagatcttggggtgcagcacttaaactgcctcgtaacccttttcatgatttcaaccacatttgctagagggagggagcagccacggagttagaggcccttggggtttctcttttccactgacaggctttcccaggcagctggctagttcattccctccccagccaggtgcaggcgtaggaatatggacatctggttgctttggcctgctgccctctttcaggggtcctaagcccacaatcatgcctccctaagaccttggcatccttccctctaagccgttggcacctctgtgccacctctcacactggctccagacacacagcctgtgcttttggagctgagatcactcgcttcaccctcctcatctttgttctccaagtaaagccacgaggtcggggcgagggcagaggtgatcacctgcgtgtcccatctacagacctgcagcttcataaaacttctgatttctcttcagctttgaaaagggttaccctgggcactggcctagagcctcacctcctaatagacttagccccatgagtttgccatgttgagcaggactatttctggcacttgcaagtcccatgatttcttcggtaattctgagggtggggggagggacatgaaatcatcttagcttagctttctgtctgtgaatgtctatatagtgtattgtgtgttttaacaaatgatttacactgactgttgctgtaaaagtgaatttggaaataaagttattactctgattaaa

SEQ ID NO: 1771 - DNA, 5718 bp, Homo sapiens
ggacggccgagcggcagggcgctcgcgcgcgcccactagtggccggaggagaaggctcccgcggaggccgcgctgcccgccccctcccctggggaggctcgcgttcccgctgctcgcgcctgcgccgcccgccggcctcaggaacgcgccctcttcgccggcgcgcgccctcgcagtcaccgccacccaccagctccggcaccaacagcagcgccgctgccaccgcccaccttctgccgccgccaccacagccaccttctcctcctccgctgtcctctcccgtcctcgcctctgtcgactatcaggtgaactttgaaccaggatggctgagccccgccaggagttcgaagtgatggaagatcacgctgggacgtacgggttgggggacaggaaagatcaggggggctacaccatgcaccaagaccaagagggtgacacggacgctggcctgaaagaatctcccctgcagacccccactgaggacggatctgaggaaccgggctctgaaacctctgatgctaagagcactccaacagcggaagatgtgacagcacccttagtggatgagggagctcccggcaagcaggctgccgcgcagccccacacggagatcccagaaggaaccacagctgaagaagcaggcattggagacacccccagcctggaagacgaagctgctggtcacgtgacccaagctcgcatggtcagtaaaagcaaagacgggactggaagcgatgacaaaaaagccaagggggctgatggtaaaacgaagatcgccacaccgcggggagcagcccctccaggccagaagggccaggccaacgccaccaggattccagcaaaaaccccgcccgctccaaagacaccacccagctctggtgaacctccaaaatcaggggatcgcagcggctacagcagccccggctccccaggcactcccggcagccgctcccgcaccccgtcccttccaaccccacccacccgggagcccaagaaggtggcagtggtccgtactccacccaagtcgccgtcttccgccaagagccgcctgcagacagcccccgtgcccatgccagacctgaagaatgtcaagtccaagatcggctccactgagaacctgaagcaccagccgggaggcgggaaggtgcaaatagtctacaaaccagttgacctgagcaaggtgacctccaagtgtggctcattaggcaacatccatcataaaccaggaggtggccaggtggaagtaaaatctgagaagcttgacttcaaggacagagtccagtcgaagattgggtccctggacaatatcacccacgtccctggcggaggaaataaaaagattgaaacccacaagctgaccttccgcgagaacgccaaagccaagacagaccacggggcggagatcgtgtacaagtcgccagtggtgtctggggacacgtctccacggcatctcagcaatgtctcctccaccggcagcatcgacatggtagactcgccccagctcgccacgctagctgacgaggtgtctgcctccctggccaagcagggtttgtgatcaggcccctggggcggtcaataattgtggagaggagagaatgagagagtgtggaaaaaaaaagaataatgacccggcccccgccctctgcccccagctgctcctcgcagttcggttaattggttaatcacttaacctgcttttgtcactcggctttggctcgggacttcaaaatcagtgatgggagtaagagcaaatttcatctttccaaattgatgggtgggctagtaataaaatatttaaaaaaaaacattcaaaaacatggccacatccaacatttcctcaggcaattccttttgattcttttttcttccccctccatgtagaagagggagaaggagaggctctgaaagctgcttctgggggatttcaagggactgggggtgccaaccacctctggccctgttgtgggggtgtcacagaggcagtggcagcaacaaaggatttgaaacttggtgtgttcgtggagccacaggcagacgatgtcaaccttgtgtgagtgtgacgggggttggggtggggcgggaggccacgggggaggccgaggcaggggctgggcagaggggagaggaagcacaagaagtgggagtgggagaggaagccacgtgctggagagtagacatccccctccttgccgctgggagagccaaggcctatgccacctgcagcgtctgagcggccgcctgtccttggtggccgggggtgggggcctgctgtgggtcagtgtgccaccctctgcagggcagcctgtgggagaagggacagcgggtaaaaagagaaggcaagctggcaggagggtggcacttcgtggatgacctccttagaaaagactgaccttgatgtcttgagagcgctggcctcttcctccctccctgcagggtagggggcctgagttgaggggcttccctctgctccacagaaaccctgttttattgagttctgaaggttggaactgctgccatgattttggccactttgcagacctgggactttagggctaaccagttctctttgtaaggacttgtgcctcttgggagacgtccacccgtttccaagcctgggccactggcatctctggagtgtgtgggggtctgggaggcaggtcccgagccccctgtccttcccacggccactgcagtcaccccgtctgcgccgctgtgctgttgtctgccgtgagagcccaatcactgcctatacccctcatcacacgtcacaatgtcccgaattcccagcctcaccaccccttctcagtaatgaccctggttggttgcaggaggtacctactccatactgagggtgaaattaagggaaggcaaagtccaggcacaagagtgggaccccagcctctcactctcagttccactcatccaactgggaccctcaccacgaatctcatgatctgattcggttccctgtctcctcctcccgtcacagatgtgagccagggcactgctcagctgtgaccctaggtgtttctgccttgttgacatggagagagccctttcccctgagaaggcctggccccttcctgtgctgagcccacagcagcaggctgggtgtcttggttgtcagtggtggcaccaggatggaagggcaaggcacccagggcaggcccacagtcccgctgtcccccacttgcaccctagcttgtagctgccaacctcccagacagcccagcccgctgctcagctccacatgcatagtatcagccctccacacccgacaaaggggaacacacccccttggaaatggttcttttcccccagtcccagctggaagccatgctgtctgttctgctggagcagctgaacatatacatagatgttgccctgccctccccatctgcaccctgttgagttgtagttggatttgtctgtttatgcttggattcaccagagtgactatgatagtgaaaagaaaaaaaaaaaaaaaaaaggacgcatgtatcttgaaatgcttgtaaagaggtttctaacccaccctcacgaggtgtctctcacccccacactgggactcgtgtggcctgtgtggtgccaccctgctggggcctcccaagttttgaaaggctttcctcagcacctgggacccaacagagaccagcttctagcagctaaggaggccgttcagctgtgacgaaggcctgaagcacaggattaggactgaagcgatgatgtccccttccctacttccccttggggctccctgtgtcagggcacagactaggtcttgtggctggtctggcttgcggcgcgaggatggttctctctggtcatagcccgaagtctcatggcagtcccaaaggaggcttacaactcctgcatcacaagaaaaaggaagccactgccagctggggggatctgcagctcccagaagctccgtgagcctcagccacccctcagactgggttcctctccaagctcgccctctggaggggcagcgcagcctcccaccaagggccctgcgaccacagcagggattgggatgaattgcctgtcctggatctgctctagaggcccaagctgcctgcctgaggaaggatgacttgacaagtcaggagacactgttcccaaagccttgaccagagcacctcagcccgctgaccttgcacaaactccatctgctgccatgagaaaagggaagccgcctttgcaaaacattgctgcctaaagaaactcagcagcctcaggcccaattctgccacttctggtttgggtacagttaaaggcaaccctgagggacttggcagtagaaatccagggcctcccctggggctggcagcttcgtgtgcagctagagctttacctgaaaggaagtctctgggcccagaactctccaccaagagcctccctgccgttcgctgagtcccagcaattctcctaagttgaagggatctgagaaggagaaggaaatgtggggtagatttggtggtggttagagatatgcccccctcattactgccaacagtttcggctgcatttcttcacgcacctcggttcctcttcctgaagttcttgtgccctgctcttcagcaccatgggccttcttatacggaaggctctgggatctcccccttgtggggcaggctcttggggccagcctaagatcatggtttagggtgatcagtgctggcagataaattgaaaaggcacgctggcttgtgatcttaaatgaggacaatccccccagggctgggcactcctcccctcccctcacttctcccacctgcagagccagtgtccttgggtgggctagataggatatactgtatgccggctccttcaagctgctgactcactttatcaatagttccatttaaattgacttcagtggtgagactgtatcctgtttgctattgcttgttgtgctatggggggaggggggaggaatgtgtaagatagttaacatgggcaaagggagatcttggggtgcagcacttaaactgcctcgtaacccttttcatgatttcaaccacatttgctagagggagggagcagccacggagttagaggcccttggggtttctcttttccactgacaggctttcccaggcagctggctagttcattccctccccagccaggtgcaggcgtaggaatatggacatctggttgctttggcctgctgccctctttcaggggtcctaagcccacaatcatgcctccctaagaccttggcatccttccctctaagccgttggcacctctgtgccacctctcacactggctccagacacacagcctgtgcttttggagctgagatcactcgcttcaccctcctcatctttgttctccaagtaaagccacgaggtcggggcgagggcagaggtgatcacctgcgtgtcccatctacagacctgcagcttcataaaacttctgatttctcttcagctttgaaaagggttaccctgggcactggcctagagcctcacctcctaatagacttagccccatgagtttgccatgttgagcaggactatttctggcacttgcaagtcccatgatttcttcggtaattctgagggtggggggagggacatgaaatcatcttagcttagctttctgtctgtgaatgtctatatagtgtattgtgtgttttaacaaatgatttacactgactgttgctgtaaaagtgaatttggaaataaagttattactctgattaaa

SEQ ID NO: 1772 - RNA, 50 nt, Artificial Sequence
  Description of Artificial Sequence: Synthetic oligonucleotide
uuuaugccucauccucugagugcugaaggcuugcuguaggcuguaugcug

SEQ ID NO: 1773 - RNA, 54 nt, Artificial Sequence
  Description of Artificial Sequence: Synthetic oligonucleotide
gugcugggcggggggcggcgggcccucccgcagaacaccaugcgcucuucggaa

SEQ ID NO: 1774 - RNA, 100 nt, Artificial Sequence
  Description of Artificial Sequence: Synthetic polynucleotide
gaagcaaagaaggggcagagggagcccgugagcugagugggccagggacugggagaaggagugaggaggcagggccggcaugccucugcugcuggccaga

SEQ ID NO: 1775 - RNA, 54 nt, Artificial Sequence
  Description of Artificial Sequence: Synthetic oligonucleotide
gugcugggcggggggcggcgggcccucccgcagaacaccaugcgcucuucggga

SEQ ID NO: 1776 - RNA, 54 nt, Artificial Sequence
  Description of Artificial Sequence: Synthetic oligonucleotide
gugcugggcggggggcggcgggcccucccgcagaacaccaugcgcuccacggaa

SEQ ID NO: 1777 - RNA, 35 nt, Artificial Sequence
  Description of Artificial Sequence: Synthetic oligonucleotide
gggcccucccgcagaacaccaugcgcuccacggaa

SEQ ID NO: 1778 - RNA, 30 nt, Artificial Sequence
  Description of Artificial Sequence: Synthetic oligonucleotide
cucccgcagaacaccaugcgcuccacggaa

SEQ ID NO: 1779 - RNA, 55 nt, Artificial Sequence
  Description of Artificial Sequence: Synthetic oligonucleotide
gugcugggcggggggcggcgggcccucccgcagaacaccaugcgcuccacggaag

SEQ ID NO: 1780 - RNA, 54 nt, Artificial Sequence
  Description of Artificial Sequence: Synthetic oligonucleotide
gugcugggcggggggcggcgggcccucccgcagaacaccaugcgcuccucggaa

SEQ ID NO: 1781 - RNA, 10 nt, Artificial Sequence
  Description of Artificial Sequence: Synthetic oligonucleotide
ugugaccugg

SEQ ID NO: 1782 - RNA, 10 nt, Artificial Sequence
  Description of Artificial Sequence: Synthetic oligonucleotide
ugugauuugg

SEQ ID NO: 1783 - RNA, 10 nt, Artificial Sequence
  Description of Artificial Sequence: Synthetic oligonucleotide
uauaauuugg

SEQ ID NO: 1784 - RNA, 11 nt, Artificial Sequence
  Description of Artificial Sequence: Synthetic oligonucleotide
ccugacccagu

SEQ ID NO: 1785 - RNA, 18 nt, Artificial Sequence
  Description of Artificial Sequence: Synthetic oligonucleotide
gucugcaccugucacuag

SEQ ID NO: 1786 - RNA, 10 nt, Artificial Sequence
  Description of Artificial Sequence: Synthetic oligonucleotide
gugacccaag

SEQ ID NO: 1787 - RNA, 15 nt, Artificial Sequence
  Description of Artificial Sequence: Synthetic oligonucleotide
guggccacugagaag

SEQ ID NO: 1788 - RNA, 10 nt, Artificial Sequence
  Description of Artificial Sequence: Synthetic oligonucleotide
gugacccaau

SEQ ID NO: 1789 - RNA, 10 nt, Artificial Sequence
  Description of Artificial Sequence: Synthetic oligonucleotide
gugacccaac

SEQ ID NO: 1790 - RNA, 15 nt, Artificial Sequence
  Description of Artificial Sequence: Synthetic oligonucleotide
guggccacugagaaa

SEQ ID NO: 1791 - RNA, 50 nt, Artificial Sequence
  Description of Artificial Sequence: Synthetic oligonucleotide
aguguaugaugccuguuacuagcauucacauggaacaaauugcugccgug

SEQ ID NO: 1792 - RNA, 52 nt, Artificial Sequence
  Description of Artificial Sequence: Synthetic oligonucleotide
cugaggagcgccuugacagcagccaugggagggccgcccccuaccucaguga

SEQ ID NO: 1793 - RNA, 52 nt, Artificial Sequence
  Description of Artificial Sequence: Synthetic oligonucleotide
cuguggagcgccuugacagcagccaugggagggccgcccccuaccucaguga

SEQ ID NO: 1794 - RNA, 100 nt, Artificial Sequence
  Description of Artificial Sequence: Synthetic polynucleotide
uggccguguagugcuacccagcgcuggcugccuccucagcauugcaauuccucucccaucugggcaccagucagcuacccuggugggaaucuggguagcc

SEQ ID NO: 1795 - RNA, 99 nt, Artificial Sequence
  Description of Artificial Sequence: Synthetic oligonucleotide
ggccguguagugcuacccagcgcuggcugccuccucagcauugcaauuccucucccaucugggcaccagucagcuacccuggugggaaucuggguagcc

SEQ ID NO: 1796 - RNA, 54 nt, Artificial Sequence
  Description of Artificial Sequence: Synthetic oligonucleotide
uccugaggagcgccuugacagcagccaugggagggccgcccccuaccucaguga

SEQ ID NO: 1797 - RNA, 35 nt, Artificial Sequence
  Description of Artificial Sequence: Synthetic oligonucleotide
cugaggagcgccuugacagcagccaugggagggcc

SEQ ID NO: 1798 - RNA, 52 nt, Artificial Sequence
  Description of Artificial Sequence: Synthetic oligonucleotide
cugcggagcgccuugacagcagccaugggagggccgcccccuaccucaguga

SEQ ID NO: 1799 - DNA, 2313 bp, Artificial Sequence
  Description of Artificial Sequence: Synthetic polynucleotide
ctgcgcgctcgctcgctcactgaggccgcccgggcaaagcccgggcgtcgggcgacctttggtcgcccggcctcagtgagcgagcgagcgcgcagagagggagtggccaactccatcactaggggttccttgtagttaatgattaacccgccatgctacttatctaccagggtaatggggatcctctagaactatagctagtcgacattgattattgactagttattaatagtaatcaattacggggtcattagttcatagcccatatatggagttccgcgttacataacttacggtaaatggcccgcctggctgaccgcccaacgacccccgcccattgacgtcaataatgacgtatgttcccatagtaacgccaatagggactttccattgacgtcaatgggtggagtatttacggtaaactgcccacttggcagtacatcaagtgtatcatatgccaagtacgccccctattgacgtcaatgacggtaaatggcccgcctggcattatgcccagtacatgaccttatgggactttcctacttggcagtacatctacgtattagtcatcgctattaccatgtcgaggccacgttctgcttcactctccccatctcccccccctccccacccccaattttgtatttatttattttttaattattttgtgcagcgatgggggcggggggggggggcgcgcgccaggcggggcggggcggggcgaggggcggggcggggcgaggcggagaggtgcggcggcagccaatcagagcggcgcgctccgaaagtttccttttatggcgaggcggcggcggcggcggccctataaaaagcgaagcgcgcggcgggcgggagcaagctttattgcggtagtttatcacagttaaattgctaacgcagtcagtgcttctgacacaacagtctcgaacttaagctgcagaagttggtcgtgaggcactgggcaggtaagtatcaaggttacaagacaggtttaaggagaccaatagaaactgggcttgtcgagacagagaagactcttgcgtttctgataggcacctattggtcttactgacatccactttgcctttctctccacaggtgtccactcccagttcaattacagctcttaaggctagagtacttaatacgactcactataggctagtaatacgactcactatagatggtgagcaagggcgaggagctgttcaccggggtggtgcccatcctggtcgagctggacggcgacgtaaacggccacaagttcagcgtgtccggcgagggcgagggcgatgccacctacggcaagctgaccctgaagttcatctgcaccaccggcaagctgcccgtgccctggcccaccctcgtgaccaccctgacctacggcgtgcagtgcttcagccgctaccccgaccacatgaagcagcacgacttcttcaagtccgccatgcccgaaggctacgtccaggagcgcaccatcttcttcaaggacgacggcaactacaagacccgcgccgaggtgaagttcgagggcgacaccctggtgaaccgcatcgagctgaagggcatcgacttcaaggaggacggcaacatcctggggcacaagctggagtacaactacaacagccacaacgtctatatcatggccgacaagcagaagaacggcatcaaggtgaacttcaagatccgccacaacatcgaggacggcagcgtgcagctcgccgaccactaccagcagaacacccccatcggcgacggccccgtgctgctgcccgacaaccactacctgagcacccagtccgccctgagcaaagaccccaacgagaagcgcgatcacatggtcctgctggagttcgtgaccgccgccgggatcactctcggcatggacgagctgtacaagtaaagcggccctagcgtttaaacgggccctctagactcgaggacggggtgaactacgcctgaggatccgatctttttccctctgccaaaaattatggggacatcatgaagccccttgagcatctgacttctggctaataaaggaaatttattttcattgcaatagtgtgttggaattttttgtgtctctcactcggaagcaattcgttgatctgaatttcgaccacccataatacccattaccctggtagataagtagcatggcgggttaatcattaactacaaggaacccctagtgatggagttggccactccctctctgcgcgctcgctcgctcactgaggccgggcgaccaaaggtcgcccgacgcccgggctttgcccgggcggcctcagtgagcgagcgagcgcgcag

SEQ ID NO: 1800 - DNA, 2232 bp, Artificial Sequence
  Description of Artificial Sequence: Synthetic polynucleotide
atggctgccgatggttatcttccagattggctcgaggacaaccttagtgaaggaattcgcgagtggtgggctttgaaacctggagcccctcaacccaaggcaaatcaacaacatcaagacaacgctcgaggtcttgtgcttccgggttacaaataccttggacccggcaacggactcgacaagggggagccggtcaacgcagcagacgcggcggccctcgagcacgacaaggcctacgaccagcagctcaaggccggagacaacccgtacctcaagtacaaccacgccgacgccgagttccaggagcggctcaaagaagatacgtcttttgggggcaacctcgggcgagcagtcttccaggccaaaaagaggcttcttgaacctcttggtctggttgaggaagcggctaagacggctcctggaaagaagaggcctgtagagcagtctcctcaggaaccggactcctccgcgggtattggcaaatcgggtgcacagcccgctaaaaagagactcaatttcggtcagactggcgacacagagtcagtcccagaccctcaaccaatcggagaacctcccgcagccccctcaggtgtgggatctcttacaatggcttcaggtggtggcgcaccagtggcagacaataacgaaggtgccgatggagtgggtagttcctcgggaaattggcattgcgattcccaatggctgggggacagagtcatcaccaccagcacccgaacctgggccctgcccacctacaacaatcacctctacaagcaaatctccaacagcacatctggaggatcttcaaatgacaacgcctacttcggctacagcaccccctgggggtattttgacttcaacagattccactgccacttctcaccacgtgactggcagcgactcatcaacaacaactggggattccggcctaagcgactcaacttcaagctcttcaacattcaggtcaaagaggttacggacaacaatggagtcaagaccatcgccaataaccttaccagcacggtccaggtcttcacggactcagactatcagctcccgtacgtgctcgggtcggctcacgagggctgcctcccgccgttcccagcggacgttttcatgattcctcagtacgggtatctgacgcttaatgatggaagccaggccgtgggtcgttcgtccttttactgcctggaatatttcccgtcgcaaatgctaagaacgggtaacaacttccagttcagctacgagtttgagaacgtacctttccatagcagctacgctcacagccaaagcctggaccgactaatgaatccactcatcgaccaatacttgtactatctctcaaagactattaacggttctggacagaatcaacaaacgctaaaattcagtgtggccggacccagcaacatggctgtccagggaagaaactacatacctggacccagctaccgacaacaacgtgtctcaaccactgtgactcaaaacaacaacagcgaatttgcttggcctggagcttcttcttgggctctcaatggacgtaatagcttgatgaatcctggacctgctatggccagccacaaagaaggagaggaccgtttctttcctttgtctggatctttaatttttggcaaacaaggaactggaagagacaacgtggatgcggacaaagtcatgataaccaacgaagaagaaattaaaactactaacccggtagcaacggagtcctatggacaagtggccacaaaccaccagagtgatgggactttggcggtgccttttaaggcacaggcgcagaccggctgggttcaaaaccaaggaatacttccgggtatggtttggcaggacagagatgtgtacctgcaaggacccatttgggccaaaattcctcacacggacggcaactttcacccttctccgctgatgggagggtttggaatgaagcacccgcctcctcagatcctcatcaaaaacacacctgtacctgcggatcctccaacggccttcaacaaggacaagctgaactctttcatcacccagtattctactggccaagtcagcgtggagatcgagtgggagctgcagaaggaaaacagcaagcgctggaacccggagatccagtacacttccaactattacaagtctaataatgttgaatttgctgttaatactgaaggtgtatatagtgaaccccgccccattggcaccagatacctgactcgtaatctgtaa

SEQ ID NO: 1801 - DNA, 1984 bp, Artificial Sequence
  Description of Artificial Sequence: Synthetic polynucleotide
ctgcgcgctcgctcgctcactgaggccgcccgggcaaagcccgggcgtcgggcgacctttggtcgcccggcctcagtgagcgagcgagcgcgcagagagggagtgtagccatgctctaggaagatcaattcaattcacgcgtcgacattgattattgactagttattaatagtaatcaattacggggtcattagttcatagcccatatatggagttccgcgttacataacttacggtaaatggcccgcctggctgaccgcccaacgacccccgcccattgacgtcaataatgacgtatgttcccatagtaacgccaatagggactttccattgacgtcaatgggtggagtatttacggtaaactgcccacttggcagtacatcaagtgtatcatatgccaagtacgccccctattgacgtcaatgacggtaaatggcccgcctggcattatgcccagtacatgaccttatgggactttcctacttggcagtacatctacgtattagtcatcgctattaccatgtcgaggccacgttctgcttcactctccccatctcccccccctccccacccccaattttgtatttatttattttttaattattttgtgcagcgatgggggcggggggggggggcgcgcgccaggcggggcggggcggggcgaggggcggggcggggcgaggcggagaggtgcggcggcagccaatcagagcggcgcgctccgaaagtttccttttatggcgaggcggcggcggcggcggccctataaaaagcgaagcgcgcggcgggcgggagcaagcttgaactgaaaaaccagaaagttaactggtaagtttagtctttttgtcttttatttcaggtcccggatccggtggtggtgcaaatcaaagaactgctcctcagtggatgttgcctttacttctaggcctgtacggaagtgttacttctgctctaaaagctgcggaattgtacccgcggccgatccaccggtatgtggactttcgggcgccgcgcagttgccggcctcctggcgtccccgagcccggcccaggcccagaccctcacccgggccccgcggctggcagagttggcccagctctgcagccgccggggcctgcgcaccggcatcaatgcgacctgcacaacccaccacaccagttcgaacctccgtggcctcaaccagattcggaatgtcaaaaggcagagtgtctacttgatgaatttgaggaaatcgggaactttgggccacccaggctctctagatgacaccacctatgaaagactagcagaggaaacgctggactctttagcagagttttttgaagaccttgcagacaagccatacacctttgaggactatgatgtttcctttgggagtggtgtcttaactgttaaactgggtggagatctaggaacctacgtgatcaacaagcagacgccaaacaagcaaatctggttatcttctccatccagtggacccaagcgttatgactggactgggaaaaactgggtgtattcccacgacggcgtttccctccatgagctgctgggcgcagagctcactaaagccttaaaaaccaaactggacttgtcttccttggcctattccggaaaagacgcttatccttatgacgtgcctgactatgcctgactcgaggacggggtgaactacgcctgaggatccgatctttttccctctgccaaaaattatggggacatcatgaagccccttgagcatctgacttctggctaataaaggaaatttattttcattgcaatagtgtgttggaattttttgtgtctctcactcggcctaggtagataagtagcatggcgggttaatcattaactacaaggaacccctagtgatggagttggccactccctctctgcgcgctcgctcgctcactgaggccgggcgaccaaaggtcgcccgacgcccgggctttgcccgggcggcctcagtgagcgagcgagcgcgcag

SEQ ID NO: 1802 - DNA, 2911 bp, Artificial Sequence
  Description of Artificial Sequence: Synthetic polynucleotide
cctgcaggcagctgcgcgctcgctcgctcactgaggccgcccgggcaaagcccgggcgtcgggcgacctttggtcgcccggcctcagtgagcgagcgagcgcgcagagagggagtggccaactccatcactaggggttccttgtagttaatgattaacccgccatgctacttatctacgtagccatgcgtcgacataacgcgtcgacattgattattgactagttattaatagtaatcaattacggggtcattagttcatagcccatatatggagttccgcgttacataacttacggtaaatggcccgcctggctgaccgcccaacgacccccgcccattgacgtcaataatgacgtatgttcccatagtaacgccaatagggactttccattgacgtcaatgggtggagtatttacggtaaactgcccacttggcagtacatcaagtgtatcatatgccaagtacgccccctattgacgtcaatgacggtaaatggcccgcctggcattatgcccagtacatgaccttatgggactttcctacttggcagtacatctacgtattagtcatcgctattaccatgtcgaggccacgttctgcttcactctccccatctcccccccctccccacccccaattttgtatttatttattttttaattattttgtgcagcgatgggggcggggggggggggcgcgcgccaggcggggcggggcggggcgaggggcggggcggggcgaggcggagaggtgcggcggcagccaatcagagcggcgcgctccgaaagtttccttttatggcgaggcggcggcggcggcggccctataaaaagcgaagcgcgcggcgggcgggagcaagcttcgtttagtgaaccgtcagatcgcctggagacgccatccacgctgttttgacctccatagaagacaccgggaccgatccagcctccgcggattcgaatcccggccgggaacggtgcattggaacgcggattccccgtgccaagagtgacgtaagtaccgcctatagagtctataggcccacaaaaaatgctttcttcttttaatatacttttttgtttatcttatttctaatactttccctaatctctttctttcagggcaataatgatacaatgtatcatgcctctttgcaccattctaaagaataacagtgataatttctgggttaaggcaatagcaatatttctgcatataaatatttctgcatataaattgtaactgatgtaagaggtttcatattgctaatagcagctacaatccagctaccattctgcttttattttatggttgggataaggctggattattctgagtccaagctaggcccttttgctaatcatgttcatacctcttatcttcctcccacagctcctgggcaacgtgctggtctgtgtgctggcccatcactttggcaaagaattgggattcgaaccggtatgtggactttcgggcgccgcgcagttgccggcctcctggcgtccccgagcccggcccaggcccagaccctcacccgggccccgcggctggcagagttggcccagctctgcagccgccggggcctgcgcaccggcatcaatgcgacctgcacaacccaccacaccagttcgaacctccgtggcctcaaccagattcggaatgtcaaaaggcagagtgtctacttgatgaatttgaggaaatcgggaactttgggccacccaggctctctagatgacaccacctatgaaagactagcagaggaaacgctggactctttagcagagttttttgaagaccttgcagacaagccatacacctttgaggactatgatgtttcctttgggagtggtgtcttaactgttaaactgggtggagatctaggaacctacgtgatcaacaagcagacgccaaacaagcaaatctggttatcttctccatccagtggacccaagcgttatgactggactgggaaaaactgggtgtattcccacgacggcgtttccctccatgagctgctgggcgcagagctcactaaagccttaaaaaccaaactggacttgtcttccttggcctattccggaaaagacgcttatccttatgacgtgcctgactatgcctgatgactcgagccattgactagtacaaacaccattgtcacactccacacaaacaccattgtcacactccacacaaacaccattgtcacactccactgcagtcaggtctatcctgaggatgggtggcatccctgtgacccctccccagtgcctctcctggccctggaagttgccactccagtgcccaccagccttgtcctaataaaattaagttgcatcattttgtctgactaggtgtccttctataatattatggggtggaggggggtggtatggagcaaggggcaagttgggaagacaacctgtagggcctgcggggtctattgggaaccaagctggagtgcagtggcacaatcttggctcactgcaatctccgcctcctgggttcaagcgattctcctgcctcagcctcccgagttgttgggattccaggcatgcatgaccaggctcagctaatttttgtttttttggtagagacggggtttcaccatattggccaggctggtctccaactcctaatctcaggtgatctacccaccttggcctcccaaattgctgggattacaggcgtgaaccactgctcccttccctgtccttggcctaggtatcgatgctacgtagataagtagcatggcgggttaatcattaactacagaggaacccctagtgatggagttggccactccctctctgcgcgctcgctcgctcactgaggccgggcgaccaaaggtcgcccgacgcccgggctttgcccgggcggcctcagtgagcgagcgagcgcgcagctgcctgcagg

SEQ ID NO: 1803 - protein, 997 aa, Homo sapiens
MENAHTKTVEEVLGHFGVNESTGLSLEQVKKLKERWGSNELPAEEGKTLLELVIEQFEDLLVRILLLAACISFVLAWFEEGEETITAFVEPFVILLILVANAIVGVWQERNAENAIEALKEYEPEMGKVYRQDRKSVQRIKAKDIVPGDIVEIAVGDKVPADIRLTSIKSTTLRVDQSILTGESVSVIKHTDPVPDPRAVNQDKKNMLFSGTNIAAGKAMGVVVATGVNTEIGKIRDEMVATEQERTPLQQKLDEFGEQLSKVISLICIAVWIINIGHFNDPVHGGSWIRGAIYYFKIAVALAVAAIPEGLPAVITTCLALGTRRMAKKNAIVRSLPSVETLGCTSVICSDKTGTLTTNQMSVCRMFILDRVEGDTCSLNEFTITGSTYAPIGEVHKDDKPVNCHQYDGLVELATICALCNDSALDYNEAKGVYEKVGEATETALTCLVEKMNVFDTELKGLSKIERANACNSVIKQLMKKEFTLEFSRDRKSMSVYCTPNKPSRTSMSKMFVKGAPEGVIDRCTHIRVGSTKVPMTSGVKQKIMSVIREWGSGSDTLRCLALATHDNPLRREEMHLEDSANFIKYETNLTFVGCVGMLDPPRIEVASSVKLCRQAGIRVIMITGDNKGTAVAICRRIGIFGQDEDVTSKAFTGREFDELNPSAQRDACLNARCFARVEPSHKSKIVEFLQSFDEITAMTGDGVNDAPALKKAEIGIAMGSGTAVAKTASEMVLADDNFSTIVAAVEEGRAIYNNMKQFIRYLISSNVGEVVCIFLTAALGFPEALIPVQLLWVNLVTDGLPATALGFNPPDLDIMNKPPRNPKEPLISGWLFFRYLAIGCYVGAATVGAAAWWFIAADGGPRVSFYQLSHFLQCKEDNPDFEGVDCAIFESPYPMTMALSVLVTIEMCNALNSLSENQSLLRMPPWENIWLVGSICLSMSLHFLILYVEPLPLIFQITPLNVTQWLMVLKISLPVILMDETLKFVARNYLEPAILE

SEQ ID NO: 1804 - protein, 1042 aa, Homo sapiens
MENAHTKTVEEVLGHFGVNESTGLSLEQVKKLKERWGSNELPAEEGKTLLELVIEQFEDLLVRILLLAACISFVLAWFEEGEETITAFVEPFVILLILVANAIVGVWQERNAENAIEALKEYEPEMGKVYRQDRKSVQRIKAKDIVPGDIVEIAVGDKVPADIRLTSIKSTTLRVDQSILTGESVSVIKHTDPVPDPRAVNQDKKNMLFSGTNIAAGKAMGVVVATGVNTEIGKIRDEMVATEQERTPLQQKLDEFGEQLSKVISLICIAVWIINIGHFNDPVHGGSWIRGAIYYFKIAVALAVAAIPEGLPAVITTCLALGTRRMAKKNAIVRSLPSVETLGCTSVICSDKTGTLTTNQMSVCRMFILDRVEGDTCSLNEFTITGSTYAPIGEVHKDDKPVNCHQYDGLVELATICALCNDSALDYNEAKGVYEKVGEATETALTCLVEKMNVFDTELKGLSKIERANACNSVIKQLMKKEFTLEFSRDRKSMSVYCTPNKPSRTSMSKMFVKGAPEGVIDRCTHIRVGSTKVPMTSGVKQKIMSVIREWGSGSDTLRCLALATHDNPLRREEMHLEDSANFIKYETNLTFVGCVGMLDPPRIEVASSVKLCRQAGIRVIMITGDNKGTAVAICRRIGIFGQDEDVTSKAFTGREFDELNPSAQRDACLNARCFARVEPSHKSKIVEFLQSFDEITAMTGDGVNDAPALKKAEIGIAMGSGTAVAKTASEMVLADDNFSTIVAAVEEGRAIYNNMKQFIRYLISSNVGEVVCIFLTAALGFPEALIPVQLLWVNLVTDGLPATALGFNPPDLDIMNKPPRNPKEPLISGWLFFRYLAIGCYVGAATVGAAAWWFIAADGGPRVSFYQLSHFLQCKEDNPDFEGVDCAIFESPYPMTMALSVLVTIEMCNALNSLSENQSLLRMPPWENIWLVGSICLSMSLHFLILYVEPLPLIFQITPLNVTQWLMVLKISLPVILMDETLKFVARNYLEPGKECVQPATKSCSFSACTDGISWPFVLLIMPLVIWVYSTDTNFSDMFWS

SEQ ID NO: 1805 - DNA, 4359 bp, Homo sapiens
ggcagcggccgataaatgctattagagcagccgccgcggagccgtccccgacgccacctccttttccttcgccgcagtttcctccgccgctgtcgggcgtgcggcgctgagggacccgggcgagcgcgccgcgcaccgccccgccggctcgcctccctcgccgcgttccgccctcagtggtctgccgggcgccccctcctccggcccgggcggggcctctgatcgcctcaagagagcggggagggggctcgggggccgcggcctgccctcccggcgggcggctgagggcgagggaggccctcccttctggcgaggggagggagggtgggtcaggagcccccaacccgccctgcggagctcggggccgcgcgaggggcggttgtctgggggagggggcgcggggtgattcagcgcccggcgaggcggaagcggccgcaagaggaggaggggagagcccgtccgcgcctgggctcccggggtggcacgagcccgcggccggagtgcgaggcggaggcgaggaggccgcggggacgggaggcgaggccggccgggcccccgaagccatggagaacgcgcacaccaagacggtggaggaggtgctgggccacttcggcgtcaacgagagtacggggctgagcctggaacaggtcaagaagcttaaggagagatggggctccaacgagttaccggctgaagaaggaaaaaccttgctggaacttgtgattgagcagtttgaagacttgctagttaggattttattactggcagcatgtatatcttttgttttggcttggtttgaagaaggtgaagaaacaattacagcctttgtagaaccttttgtaattttactcatattagtagccaatgcaattgtgggtgtatggcaggaaagaaatgctgaaaatgccatcgaagcccttaaggaatatgagcctgaaatgggcaaagtgtatcgacaggacagaaagagtgtgcagcggattaaagctaaagacatagttcctggtgatattgtagaaattgctgttggtgacaaagttcctgctgatataaggttaacttccatcaaatctaccacactaagagttgaccagtcaattctcacaggtgaatctgtctctgtcatcaagcacactgatcccgtccctgacccacgagctgtcaaccaagataaaaagaacatgctgttttctggtacaaacattgctgctgggaaagctatgggagtggtggtagcaactggagttaacaccgaaattggcaagatccgggatgaaatggtggcaacagaacaggagagaacaccccttcagcaaaaactagatgaatttggggaacagctttccaaagtcatctcccttatttgcattgcagtctggatcataaatattgggcacttcaatgacccggttcatggagggtcctggatcagaggtgctatttactactttaaaattgcagtggccctggctgtagcagccattcctgaaggtctgcctgcagtcatcaccacctgcctggctcttggaactcgcagaatggcaaagaaaaatgccattgttcgaagcctcccgtctgtggaaacccttggttgtacttctgttatctgctcagacaagactggtacacttacaacaaaccagatgtcagtctgcaggatgttcattctggacagagtggaaggtgatacttgttcccttaatgagtttaccataactggatcaacttatgcacctattggagaagtgcataaagatgataaaccagtgaattgtcaccagtatgatggtctggtagaattagcaacaatttgtgctctttgtaatgactctgctttggattacaatgaggcaaagggtgtgtatgaaaaagttggagaagctacagagactgctctcacttgcctagtagagaagatgaatgtatttgataccgaattgaagggtctttctaaaatagaacgtgcaaatgcctgcaactcagtcattaaacagctgatgaaaaaggaattcactctagagttttcacgtgacagaaagtcaatgtcggtttactgtacaccaaataaaccaagcaggacatcaatgagcaagatgtttgtgaagggtgctcctgaaggtgtcattgacaggtgcacccacattcgagttggaagtactaaggttcctatgacctctggagtcaaacagaagatcatgtctgtcattcgagagtggggtagtggcagcgacacactgcgatgcctggccctggccactcatgacaacccactgagaagagaagaaatgcaccttgaggactctgccaactttattaaatatgagaccaatctgaccttcgttggctgcgtgggcatgctggatcctccgagaatcgaggtggcctcctccgtgaagctgtgccggcaagcaggcatccgggtcatcatgatcactggggacaacaagggcactgctgtggccatctgtcgccgcatcggcatcttcgggcaggatgaggacgtgacgtcaaaagctttcacaggccgggagtttgatgaactcaacccctccgcccagcgagacgcctgcctgaacgcccgctgttttgctcgagttgaaccctcccacaagtctaaaatcgtagaatttcttcagtcttttgatgagattacagctatgactggcgatggcgtgaacgatgctcctgctctgaagaaagccgagattggcattgctatgggctctggcactgcggtggctaaaaccgcctctgagatggtcctggcggatgacaacttctccaccattgtggctgccgttgaggaggggcgggcaatctacaacaacatgaaacagttcatccgctacctcatctcgtccaacgtcggggaagttgtctgtattttcctgacagcagcccttggatttcccgaggctttgattcctgttcagctgctctgggtcaatctggtgacagatggcctgcctgccactgcactggggttcaaccctcctgatctggacatcatgaataaacctccccggaacccaaaggaaccattgatcagcgggtggctctttttccgttacttggctattggctgttacgtcggcgctgctaccgtgggtgctgctgcatggtggttcattgctgctgacggtggtccaagagtgtccttctaccagctgagtcatttcctacagtgtaaagaggacaacccggactttgaaggcgtggattgtgcaatctttgaatccccatacccgatgacaatggcgctctctgttctagtaactatagaaatgtgtaacgccctcaacagcttgtccgaaaaccagtccttgctgaggatgcccccctgggagaacatctggctcgtgggctccatctgcctgtccatgtcactccacttcctgatcctctatgtcgaacccttgccactcatcttccagatcacaccgctgaacgtgacccagtggctgatggtgctgaaaatctccttgcccgtgattctcatggatgagacgctcaagtttgtggcccgcaactacctggaacctgcaatactggagtaaccgcttcctaaaccattttgcagaaatgtaagggtgttcggttgcgtgcatgtgcgtttttagcaacacatctaccaaccctgtgcatgactgatgttggggaaaaagaaaagtaaaaaacttcccaactcactttgtgttatgtggaggaaatgtgtattaccaatggggttgttagcttttaaatcaaaatactgattacagatgtacaatttagcttaatcagaaagcctctccagagaagtttggtttctttgctgcaagaggaatgaggctctgtaaccttatctaagaacttggaagccgtcagccaagtcgccacatttctctgcaaaatgtcatagcttatataaatgtacagtattcaattgtaatgcatgccttcggttgtaagtagccagatccctctccagtgacattggaacatgctactttttaattggccctgtacagtttgcttatttataaattcattaaaaacactacaggtgttgaatggttaaaatgtaggcctccagttcattttcagttattttctgagtgtgcagacagctatttcgcactgtattaaatgtaacttatttaatgaaatcagaagcagtagacagatgttggtgcaatacaaatattgtgatgcatttatcttaataaaatgctaaatgtcaatttatcactgcgcatgtttgactttagactgtaaatagagatcagtttgtttctttctgtgctggtaacaatgagcgtcgcacagacatggtttcaggtaaataaatctattctatgataaaaaaaaaaaaaaaaa

SEQ ID NO: 1806 - DNA, 8329 bp, Homo sapiens
ggcagcggccgataaatgctattagagcagccgccgcggagccgtccccgacgccacctccttttccttcgccgcagtttcctccgccgctgtcgggcgtgcggcgctgagggacccgggcgagcgcgccgcgcaccgccccgccggctcgcctccctcgccgcgttccgccctcagtggtctgccgggcgccccctcctccggcccgggcggggcctctgatcgcctcaagagagcggggagggggctcgggggccgcggcctgccctcccggcgggcggctgagggcgagggaggccctcccttctggcgaggggagggagggtgggtcaggagcccccaacccgccctgcggagctcggggccgcgcgaggggcggttgtctgggggagggggcgcggggtgattcagcgcccggcgaggcggaagcggccgcaagaggaggaggggagagcccgtccgcgcctgggctcccggggtggcacgagcccgcggccggagtgcgaggcggaggcgaggaggccgcggggacgggaggcgaggccggccgggcccccgaagccatggagaacgcgcacaccaagacggtggaggaggtgctgggccacttcggcgtcaacgagagtacggggctgagcctggaacaggtcaagaagcttaaggagagatggggctccaacgagttaccggctgaagaaggaaaaaccttgctggaacttgtgattgagcagtttgaagacttgctagttaggattttattactggcagcatgtatatcttttgttttggcttggtttgaagaaggtgaagaaacaattacagcctttgtagaaccttttgtaattttactcatattagtagccaatgcaattgtgggtgtatggcaggaaagaaatgctgaaaatgccatcgaagcccttaaggaatatgagcctgaaatgggcaaagtgtatcgacaggacagaaagagtgtgcagcggattaaagctaaagacatagttcctggtgatattgtagaaattgctgttggtgacaaagttcctgctgatataaggttaacttccatcaaatctaccacactaagagttgaccagtcaattctcacaggtgaatctgtctctgtcatcaagcacactgatcccgtccctgacccacgagctgtcaaccaagataaaaagaacatgctgttttctggtacaaacattgctgctgggaaagctatgggagtggtggtagcaactggagttaacaccgaaattggcaagatccgggatgaaatggtggcaacagaacaggagagaacaccccttcagcaaaaactagatgaatttggggaacagctttccaaagtcatctcccttatttgcattgcagtctggatcataaatattgggcacttcaatgacccggttcatggagggtcctggatcagaggtgctatttactactttaaaattgcagtggccctggctgtagcagccattcctgaaggtctgcctgcagtcatcaccacctgcctggctcttggaactcgcagaatggcaaagaaaaatgccattgttcgaagcctcccgtctgtggaaacccttggttgtacttctgttatctgctcagacaagactggtacacttacaacaaaccagatgtcagtctgcaggatgttcattctggacagagtggaaggtgatacttgttcccttaatgagtttaccataactggatcaacttatgcacctattggagaagtgcataaagatgataaaccagtgaattgtcaccagtatgatggtctggtagaattagcaacaatttgtgctctttgtaatgactctgctttggattacaatgaggcaaagggtgtgtatgaaaaagttggagaagctacagagactgctctcacttgcctagtagagaagatgaatgtatttgataccgaattgaagggtctttctaaaatagaacgtgcaaatgcctgcaactcagtcattaaacagctgatgaaaaaggaattcactctagagttttcacgtgacagaaagtcaatgtcggtttactgtacaccaaataaaccaagcaggacatcaatgagcaagatgtttgtgaagggtgctcctgaaggtgtcattgacaggtgcacccacattcgagttggaagtactaaggttcctatgacctctggagtcaaacagaagatcatgtctgtcattcgagagtggggtagtggcagcgacacactgcgatgcctggccctggccactcatgacaacccactgagaagagaagaaatgcaccttgaggactctgccaactttattaaatatgagaccaatctgaccttcgttggctgcgtgggcatgctggatcctccgagaatcgaggtggcctcctccgtgaagctgtgccggcaagcaggcatccgggtcatcatgatcactggggacaacaagggcactgctgtggccatctgtcgccgcatcggcatcttcgggcaggatgaggacgtgacgtcaaaagctttcacaggccgggagtttgatgaactcaacccctccgcccagcgagacgcctgcctgaacgcccgctgttttgctcgagttgaaccctcccacaagtctaaaatcgtagaatttcttcagtcttttgatgagattacagctatgactggcgatggcgtgaacgatgctcctgctctgaagaaagccgagattggcattgctatgggctctggcactgcggtggctaaaaccgcctctgagatggtcctggcggatgacaacttctccaccattgtggctgccgttgaggaggggcgggcaatctacaacaacatgaaacagttcatccgctacctcatctcgtccaacgtcggggaagttgtctgtattttcctgacagcagcccttggatttcccgaggctttgattcctgttcagctgctctgggtcaatctggtgacagatggcctgcctgccactgcactggggttcaaccctcctgatctggacatcatgaataaacctccccggaacccaaaggaaccattgatcagcgggtggctctttttccgttacttggctattggctgttacgtcggcgctgctaccgtgggtgctgctgcatggtggttcattgctgctgacggtggtccaagagtgtccttctaccagctgagtcatttcctacagtgtaaagaggacaacccggactttgaaggcgtggattgtgcaatctttgaatccccatacccgatgacaatggcgctctctgttctagtaactatagaaatgtgtaacgccctcaacagcttgtccgaaaaccagtccttgctgaggatgcccccctgggagaacatctggctcgtgggctccatctgcctgtccatgtcactccacttcctgatcctctatgtcgaacccttgccactcatcttccagatcacaccgctgaacgtgacccagtggctgatggtgctgaaaatctccttgcccgtgattctcatggatgagacgctcaagtttgtggcccgcaactacctggaacctggtaaagagtgtgtgcagcctgccaccaaatcctgctcgttctcggcatgcaccgatgggatttcctggccgtttgtgctgctcataatgcccctggtgatctgggtctatagcacagacactaactttagcgatatgttctggtcttgactgacagttttccataaagaagatgtttaacttaatcaattaatttttttattgtttaaagcaactgtctatttctgctgaattttcacatgaacatactggctggtgatggaggtttcatactctagattttgttttgctttttctgactccagtggggcaagattttccttttttatacacataattaaagtgtccattgacatgtacagagaactaacactattttatgcaaatatttttttgtagatgaaaaagcatgtacagtgttctgtttaatactcatccttgtataaaaaaaatagttgagccagcagacattgtcagcaaattaattggcagcagattttaggaaatgaatgtgtgtggttttttttctaaaactaaatagcatgtattgtgtcttttgcatgatgatccggatttaatttgatatcacagtctaatttttattcataagccaatttttctgcactgagcagagtcttgctacctcagtcagtattgttttggtttgctacttccctcacccactttggcctccgttcaccccaccccaccccacctctccccaccttacccccgccccgcttggcttcttctttaggattgtgatggttcgttctgtttacatcagttttaacgagaggtatgcctgtactcgcttgtgcagaaaacattgttccagattcaatcgactgggtttatgtcccttcacatagtttttaaggttatttatttaaatgtctaatgtattttattgtaacagacattgttttgccaacattgcctatttcagtggcacgtcatctagttttaaaaaaataaaacattttaaatggacagagaaaaataactgtcttgtctttaactcgtaagtggcttacctgggactaacagacatgtccaactttctctccagttcttagctcagaactttagttgtactctgcttgaggggaagaaggctcctgctctgctgtgtaggtagtcataggaattgtattcttaatgtacaggcactaattgtcatctgtgatgtacattttatgcaagtttctgctggcctggtatagagaacataagggcaagtgtgtatgtgtgtgtatgtgtgtgttttgtaaaatctgtaaatagcacatgaccaaatgaacatattgtatagaactatttttatttgaatgtggcactaaccaccaccaccgttactacgatcaatgtttgcgcatgttcgagatgagtctcaccaacagtgtgtaagtcattaacagtcctaactgtggtgttttcctccaatgccttccaacatccatcaactaacgtgagtattttcttcctgggatttggatgctttagcctaaaggtgactgccaccaagtgagataactgtatgtcactaacttataagccgcctccatggcagatgctgctgtgctccctgatgccctgtgagcaccggggttgcctgtggcgcctgccatgtgactcgggcgcagcatcagctggctggaggtgtggctttcatagacctccacaggctgcctaggacaagatgaccaggagggcccaagccagacaaaagccggagtggggagagaggcatttcagccagaccaacaggctgaaggagctgtgcagactattgctaaaatgagggttcgcagctgccaggagtcatcccagaacattgctacttatttattaaaaagctaaaaactagtgaaagcaagtaactgaaccagtgaactctgggtatcgataggttcgtcttaaataggccacttccccactcccccacccccccttgcttggtcttgtccttggtggctaagacttagctctgcaggggatgttaaagcacagttagtaggacgtggctctgcacagcccaaaaaccagcttactccttagccagggtgtgaggcctcgactatattcttcaaaatgtacttaggctctggttactgggatggccagtagatgtaatgcagatggttggagtttggggagggttaggaggcatcaagcaggacaaggtgctgctgagttcagagggcccacgttcaagggatggaggtggaacctggagaccgactcttaaaagcacagtccgtggttgggtgtggtggctcatgcctgtaagtaagtctcagccctttggaggccacagcagaaggattgcttgagcccaggtactcaaaccagcctgggcaacagagtgaggccctgtcaaaaaaaaatcagccttactgtgaagcctccaaggctgctcgcaggcagctgtggctctcgggaagggaggctgctttgcccagcagggaacatttggggcagggggtaaattttgccagtttgagcatcatgaggtgtaacaagaaatgggttgaatgggccaaatgcaaggagtgcatctctgggctgcaaactgacttgagtgctgcactattgctattccgtgcaaacaaaactcagcttttcctgactcagttccttgacttagtggcctttacaaaaaaagttgagtagtgtgtggcctgctgtcgcacagcccctagttagcttcatggtttctcagcttcagacccctccagcccacagaggagcccatggagggacccacttcccttggtccagacagctgggagtgggttaggcccactgctgttttgagcagggccacttgctccatttcactgaaggctttgctgggtgaaaacacttcagcatctcctcctcaggtcaacccataaagaccaggtccagcaccgtggtcttggcacatccctggcctcaggccctcacctaacagtgaggcagcagctgcccagccccgcaatgtgcctgctgtcaggcagctcttgcctgaaacttacttccacattctttcctgatgggcaggtggctgaaggcccagccatcagtgtcgcttgttgccaccccgtgcctcccttggcctctctgagctttgcccagaagaccaacaatcatacataccctaactgggacaccactctgcagaatgcagatgatccattctggaggaagctgtcccttgagctcagtgagctcccaggcaagcagggcatctggccgacttccctcacaacagctgctcccacatcccctcggactggagcttcagccctgactgaggtgggcagacctaagacctgagaccacaagattagctcagtgtctaccaagcatctagccactgtccagggccagagcataccacgtctgcagtgcctgtgagcagagccagcagttgccctgtgactgtaaccaccaaattgtccaaacacccgctgcagttagcaagaagggtaggcttcaccctcctttactgaggagaatgatgcggaggagtttcctctccagggctaggcaaggcaggcgagcagccagaagccgggtgcccacagggcagggacaggaaggctgtgctgctactggctgctcacttctccatcaacctcaccctctgcaccactaaccaagaccttgtcctcttgcctgtctcgctgctttcacagctgcaacgattgtgtctgcctcatggggttttcctccagagcctttattctgtagccagacgacacgaggagtctgtgtcactgagccagtgcttctagatgctaccctgtgtgggcggcacctcagggacagtaaatcagaaatgctggtcttgaaaccttgaaaagatcaagctgaatgttccttttcatctgtcgctgttgatcttcatctatttaaataggtattctaacgtttcctctctgtatttcatgaagctgatttcctctctctttccttttcagcaatactggagtaaccgcttcctaaaccattttgcagaaatgtaagggtgttcggttgcgtgcatgtgcgtttttagcaacacatctaccaaccctgtgcatgactgatgttggggaaaaagaaaagtaaaaaacttcccaactcactttgtgttatgtggaggaaatgtgtattaccaatggggttgttagcttttaaatcaaaatactgattacagatgtacaatttagcttaatcagaaagcctctccagagaagtttggtttctttgctgcaagaggaatgaggctctgtaaccttatctaagaacttggaagccgtcagccaagtcgccacatttctctgcaaaatgtcatagcttatataaatgtacagtattcaattgtaatgcatgccttcggttgtaagtagccagatccctctccagtgacattggaacatgctactttttaattggccctgtacagtttgcttatttataaattcattaaaaacactacaggtgttgaatggttaaaatgtaggcctccagttcattttcagttattttctgagtgtgcagacagctatttcgcactgtattaaatgtaacttatttaatgaaatcagaagcagtagacagatgttggtgcaatacaaatattgtgatgcatttatcttaataaaatgctaaatgtcaatttatcactgcgcatgtttgactttagactgtaaatagagatcagtttgtttctttctgtgctggtaacaatgagcgtcgcacagacatggtttcaggtaaataaatctattctatgataaaaaaaaaaaaaaaaa

SEQ ID NO: 1807 - protein, 94 aa, Homo sapiens
MGSELETAMETLINVFHAHSGKEGDKYKLSKKELKELLQTELSGFLDAQKDVDAVDKVMKELDENGDGEVDFQEYVVLVAALTVACNNFFWENS

SEQ ID NO: 1808 - DNA, 607 bp, Homo sapiens
ggactgttgaagacaggtctccacacacagctccagcagccacatttgcaaccttggccatctgtccagaacctgctcccacctcaggcccaggccaaccgtgcactgctgcaatgggctctgagctggagacggcgatggagaccctcatcaacgtgttccacgcccactcgggcaaagagggggacaagtacaagctgagcaagaaggagctgaaagagctgctgcagacggagctctctggcttcctggatgcccagaaggatgtggatgctgtggacaaggtgatgaaggagctagacgagaatggagacggggaggtggacttccaggagtatgtggtgcttgtggctgctctcacagtggcctgtaacaatttcttctgggagaacagttgagcagacagccacattgggcagcgcccttcctctccaccctcccagacctgcctcttccccctgcttccacctcaccccacttatccctctccataaccccacccttgcccaccccacccccacccccaccaagggcgcaagagtagcggtccaagcctgcaactcatctttcattaaaggcttctctctcaccagcaaaaaaaaaaaaa

SEQ ID NO: 1809 - DNA, 2232 bp, Artificial Sequence; identical to SEQ ID NO: 1800
  Description of Artificial Sequence: Synthetic polynucleotide

SEQ ID NO: 1810 - DNA, 2232 bp, Artificial Sequence
  Description of Artificial Sequence: Synthetic polynucleotide
atggctgccgatggttatcttccagattggctcgaggacaaccttagtgaaggaattcgcgagtggtgggctttgaaacctggagcccctcaacccaaggcaaatcaacaacatcaagacaacgctcgaggtcttgtgcttccgggttacaaataccttggacccggcaacggactcgacaagggggagccggtcaacgcagcagacgcggcggccctcgagcacgacaaggcctacgaccagcagctcaaggccggagacaacccgtacctcaagtacaaccacgccgacgccgagttccaggagcggctcaaagaagatacgtcttttgggggcaacctcgggcgagcagtcttccaggccaaaaagaggcttcttgaacctcttggtctggttgaggaagcggctaagacggctcctggaaagaagaggcctgtagagcagtctcctcaggaaccggactcctccgcgggtattggcaaatcgggtgcacagcccgctaaaaagagactcaatttcggtcagactggcgacacagagtcagtcccagaccctcaaccaatcggagaacctcccgcagccccctcaggtgtgggatctcttacaatggcttcaggtggtggcgcaccagtggcagacaataacgaaggtgccgatggagtgggtagttcctcgggaaattggcattgcgattcccaatggctgggggacagagtcatcaccaccagcacccgaacctgggccctgcccacctacaacaatcacctctacaagcaaatctccaacagcacatctggaggatcttcaaatgacaacgcctacttcggctacagcaccccctgggggtattttgacttcaacagattccactgccacttctcaccacgtgactggcagcgactcatcaacaacaactggggattccggcctaagcgactcaacttcaagctcttcaacattcaggtcaaagaggttacggacaacaatggagtcaagaccatcgccaataaccttaccagcacggtccaggtcttcacggactcagactatcagctcccgtacgtgctcgggtcggctcacgagggctgcctcccgccgttcccagcggacgttttcatgattcctcagtacgggtatctgacgcttaatgatggaagccaggccgtgggtcgttcgtccttttactgcctggaatatttcccgtcgcaaatgctaagaacgggtaacaacttccagttcagctacgagtttgagaacgtacctttccatagcagctacgctcacagccaaagcctggaccgactaatgaatccactcatcgaccaatacttgtactatctctcaaagactattaacggttctggacagaatcaacaaacgctaaaattcagtgtggccggacccagcaacatggctgtccagggaagaaactacatacctggacccagctaccgacaacaacgtgtctcaaccactgtgactcaaaacaacaacagcgaatttgcttggcctggagcttcttcttgggctctcaatggacgtaatagcttgatgaatcctggacctgctatggccagccacaaagaaggagaggaccgtttctttcctttgtctggatctttaatttttggcaaacaaggaactggaagagacaacgtggatgcggacaaagtcatgataaccaacgaagaagaaattaaaactactaacccggtagcaacggagtcctatggacaagtggccacaaaccaccagagtgcccaaactttggcggtgccttttaaggcacaggcgcagaccggctgggttcaaaaccaaggaatacttccgggtatggtttggcaggacagagatgtgtacctgcaaggacccatttgggccaaaattcctcacacggacggcaactttcacccttctccgctgatgggagggtttggaatgaagcacccgcctcctcagatcctcatcaaaaacacacctgtacctgcggatcctccaacggccttcaacaaggacaagctgaactctttcatcacccagtattctactggccaagtcagcgtggagatcgagtgggagctgcagaaggaaaacagcaagcgctggaacccggagatccagtacacttccaactattacaagtctaataatgttgaatttgctgttaatactgaaggtgtatatagtgaaccccgccccattggcaccagatacctgactcgtaatctgtaa

SEQ ID NO: 1811 - DNA, 12 bp, Artificial Sequence
  Description of Artificial Sequence: Synthetic polynucleotide
agaaagaggcga

SEQ ID NO: 1812 - DNA, 54 bp, Artificial Sequence
  Description of Artificial Sequence: Synthetic polynucleotide
gagggcagaggaagtcttctaacatgcggtgacgtggaggagaatcccggccct

SEQ ID NO: 1813 - DNA, 66 bp, Artificial Sequence
  Description of Artificial Sequence: Synthetic polynucleotide
agaaagaggcgagagggcagaggaagtcttctaacatgcggtgacgtggaggagaatcccggccct

SEQ ID NO: 1814 - DNA, 1377 bp, Artificial Sequence
  Description of Artificial Sequence: Synthetic polynucleotide
atgggatggagctggatctttctctttctcctgtcaggaactacaggtgtcctctctgaggtccagctgcaacagtctggacctgagctggtgaagcctggggcttcagtgaagatatcctgcaagacttctggatacacattcactgaatacaccatacactgggtgaagcagagccatggagagagccttgagtggattggaggtattaatccaaacgatggtggtactatttacaaccagaagttcaagggcaaggccacattgactgtagacaagtcctccaaaacagcctacatggagctccgcagcctgacatctgaggattctgcagtcttttactgtgcaagagggccctccgccaggtttccttactggggccaagggactctggtcactgtctctgcagccaaaacgacacccccatctgtctatccactggcccctggatctgctgcccaaactaactccatggtgaccctgggatgcctggtcaagggctatttccctgagccagtgacagtgacctggaactctggatccctgtccagcggtgtgcacaccttcccagctgtcctgcagtctgacctctacactctgagcagctcagtgactgtcccctccagcacctggcccagcgagaccgtcacctgcaacgttgcccacccggccagcagcaccaaggtggacaagaaaattgtgcccagggattgtggttgtaagccttgcatatgtacagtcccagaagtatcatctgtcttcatcttccccccaaagcccaaggatgtgctcaccattactctgactcctaaggtcacgtgtgttgtggtagacatcagcaaggatgatcccgaggtccagttcagctggtttgtagatgatgtggaggtgcacacagctcagacgcaaccccgggaggagcagttcaacagcactttccgctcagtcagtgaacttcccatcatgcaccaggactggctcaatggcaaggagttcaaatgcagggtcaacagtgcagctttccctgcccccatcgagaaaaccatctccaaaaccaaaggcagaccgaaggctccacaggtgtacaccattccacctcccaaggagcagatggccaaggataaagtcagtctgacctgcatgataacagacttcttccctgaagacattactgtggagtggcagtggaatgggcagccagcggagaactacaagaacactcagcccatcatggacacagatggctcttacttcgtctacagcaagctcaatgtgcagaagagcaactgggaggcaggaaatactttcacctgctctgtgttacatgagggcctgcacaaccaccatactgagaagagcctctcccactctcctggt

SEQ ID NO: 1815 - DNA, 717 bp, Artificial Sequence
  Description of Artificial Sequence: Synthetic polynucleotide
atgatgagtcctgcccagttcctgtttctgttagtgctctggattcgggaaaccaacggtgatgttgtgatgacccagactccactcactttgtcggttaccattggacaaccagcctccatctcttgcaagtcaagtcagagcctcttagatagtgatggaaagacatatttgaattggttgttacagaggccaggccagtctccaaagcgcctaatctatctggtgtctaaactggactctggagtccctgacagattcactggcagtggatcagggacagatttcacactgaaaattagcagagtggaggctgaggatttgggagtttattattgctggcaaggtacacattttcctcggacgttcggtggaggcaccaagctggaaatcaaacgggctgatgctgcaccaactgtatccatcttcccaccatccagtgagcagttaacatctggaggtgcctcagtcgtgtgcttcttgaacaacttctaccccaaagacatcaatgtcaagtggaagattgatggcagtgaacgacaaaatggcgtcctgaacagttggactgatcaggacagcaaagacagcacctacagcatgagcagcaccctcacgttgaccaaggacgagtatgaacgacataacagctatacctgtgaggccactcacaagacatcaacttcacccattgtcaagagcttcaacaggaatgagtgt

SEQ ID NO: 1816 - DNA, 2174 bp, Artificial Sequence
  Description of Artificial Sequence: Synthetic polynucleotide
gaggagccaccatgggatggagctggatctttctctttctcctgtcaggaactacaggtgtcctctctgaggtccagctgcaacagtctggacctgagctggtgaagcctggggcttcagtgaagatatcctgcaagacttctggatacacattcactgaatacaccatacactgggtgaagcagagccatggagagagccttgagtggattggaggtattaatccaaacgatggtggtactatttacaaccagaagttcaagggcaaggccacattgactgtagacaagtcctccaaaacagcctacatggagctccgcagcctgacatctgaggattctgcagtcttttactgtgcaagagggccctccgccaggtttccttactggggccaagggactctggtcactgtctctgcagccaaaacgacacccccatctgtctatccactggcccctggatctgctgcccaaactaactccatggtgaccctgggatgcctggtcaagggctatttccctgagccagtgacagtgacctggaactctggatccctgtccagcggtgtgcacaccttcccagctgtcctgcagtctgacctctacactctgagcagctcagtgactgtcccctccagcacctggcccagcgagaccgtcacctgcaacgttgcccacccggccagcagcaccaaggtggacaagaaaattgtgcccagggattgtggttgtaagccttgcatatgtacagtcccagaagtatcatctgtcttcatcttccccccaaagcccaaggatgtgctcaccattactctgactcctaaggtcacgtgtgttgtggtagacatcagcaaggatgatcccgaggtccagttcagctggtttgtagatgatgtggaggtgcacacagctcagacgcaaccccgggaggagcagttcaacagcactttccgctcagtcagtgaacttcccatcatgcaccaggactggctcaatggcaaggagttcaaatgcagggtcaacagtgcagctttccctgcccccatcgagaaaaccatctccaaaaccaaaggcagaccgaaggctccacaggtgtacaccattccacctcccaaggagcagatggccaaggataaagtcagtctgacctgcatgataacagacttcttccctgaagacattactgtggagtggcagtggaatgggcagccagcggagaactacaagaacactcagcccatcatggacacagatggctcttacttcgtctacagcaagctcaatgtgcagaagagcaactgggaggcaggaaatactttcacctgctctgtgttacatgagggcctgcacaaccaccatactgagaagagcctctcccactctcctggtagaaagaggcgagagggcagaggaagtcttctaacatgcggtgacgtggaggagaatcccggccctatgatgagtcctgcccagttcctgtttctgttagtgctctggattcgggaaaccaacggtgatgttgtgatgacccagactccactcactttgtcggttaccattggacaaccagcctccatctcttgcaagtcaagtcagagcctcttagatagtgatggaaagacatatttgaattggttgttacagaggccaggccagtctccaaagcgcctaatctatctggtgtctaaactggactctggagtccctgacagattcactggcagtggatcagggacagatttcacactgaaaattagcagagtggaggctgaggatttgggagtttattattgctggcaaggtacacattttcctcggacgttcggtggaggcaccaagctggaaatcaaacgggctgatgctgcaccaactgtatccatcttcccaccatccagtgagcagttaacatctggaggtgcctcagtcgtgtgcttcttgaacaacttctaccccaaagacatcaatgtcaagtggaagattgatggcagtgaacgacaaaatggcgtcctgaacagttggactgatcaggacagcaaagacagcacctacagcatgagcagcaccctcacgttgaccaaggacgagtatgaacgacataacagctatacctgtgaggccactcacaagacatcaacttcacccattgtcaagagcttcaacaggaatgagtgttag

SEQ ID NO: 1817 - DNA, 11 bp, Artificial Sequence
  Description of Artificial Sequence: Synthetic polynucleotide
gaggagccacc

SEQ ID NO: 1818 - DNA, 2174 bp, Artificial Sequence
  Description of Artificial Sequence: Synthetic polynucleotide
gaggagccaccatgatgagtcctgcccagttcctgtttctgttagtgctctggattcgggaaaccaacggtgatgttgtgatgacccagactccactcactttgtcggttaccattggacaaccagcctccatctcttgcaagtcaagtcagagcctcttagatagtgatggaaagacatatttgaattggttgttacagaggccaggccagtctccaaagcgcctaatctatctggtgtctaaactggactctggagtccctgacagattcactggcagtggatcagggacagatttcacactgaaaattagcagagtggaggctgaggatttgggagtttattattgctggcaaggtacacattttcctcggacgttcggtggaggcaccaagctggaaatcaaacgggctgatgctgcaccaactgtatccatcttcccaccatccagtgagcagttaacatctggaggtgcctcagtcgtgtgcttcttgaacaacttctaccccaaagacatcaatgtcaagtggaagattgatggcagtgaacgacaaaatggcgtcctgaacagttggactgatcaggacagcaaagacagcacctacagcatgagcagcaccctcacgttgaccaaggacgagtatgaacgacataacagctatacctgtgaggccactcacaagacatcaacttcacccattgtcaagagcttcaacaggaatgagtgtagaaagaggcgagagggcagaggaagtcttctaacatgcggtgacgtggaggagaatcccggccctatgggatggagctggatctttctctttctcctgtcaggaactacaggtgtcctctctgaggtccagctgcaacagtctggacctgagctggtgaagcctggggcttcagtgaagatatcctgcaagacttctggatacacattcactgaatacaccatacactgggtgaagcagagccatggagagagccttgagtggattggaggtattaatccaaacgatggtggtactatttacaaccagaagttcaagggcaaggccacattgactgtagacaagtcctccaaaacagcctacatggagctccgcagcctgacatctgaggattctgcagtcttttactgtgcaagagggccctccgccaggtttccttactggggccaagggactctggtcactgtctctgcagccaaaacgacacccccatctgtctatccactggcccctggatctgctgcccaaactaactccatggtgaccctgggatgcctggtcaagggctatttccctgagccagtgacagtgacctggaactctggatccctgtccagcggtgtgcacaccttcccagctgtcctgcagtctgacctctacactctgagcagctcagtgactgtcccctccagcacctggcccagcgagaccgtcacctgcaacgttgcccacccggccagcagcaccaaggtggacaagaaaattgtgcccagggattgtggttgtaagccttgcatatgtacagtcccagaagtatcatctgtcttcatcttccccccaaagcccaaggatgtgctcaccattactctgactcctaaggtcacgtgtgttgtggtagacatcagcaaggatgatcccgaggtccagttcagctggtttgtagatgatgtggaggtgcacacagctcagacgcaaccccgggaggagcagttcaacagcactttccgctcagtcagtgaacttcccatcatgcaccaggactggctcaatggcaaggagttcaaatgcagggtcaacagtgcagctttccctgcccccatcgagaaaaccatctccaaaaccaaaggcagaccgaaggctccacaggtgtacaccattccacctcccaaggagcagatggccaaggataaagtcagtctgacctgcatgataacagacttcttccctgaagacattactgtggagtggcagtggaatgggcagccagcggagaactacaagaacactcagcccatcatggacacagatggctcttacttcgtctacagcaagctcaatgtgcagaagagcaactgggaggcaggaaatactttcacctgctctgtgttacatgagggcctgcacaaccaccatactgagaagagcctctcccactctcctggttag

SEQ ID NO: 1819 - DNA, 714 bp, Artificial Sequence
  Description of Artificial Sequence: Synthetic polynucleotide
atgagtcctgcccagttcctgtttctgttagtgctctggattcgggaaaccaacggtgatgttgtgatgacccagactccactcactttgtcggttaccattggacaaccagcctccatctcttgcaagtcaagtcagagcctcttagatagtgatggaaagacatatttgaattggttgttacagaggccaggccagtctccaaagcgcctaatctatctggtgtctaaactggactctggagtccctgacagattcactggcagtggatcagggacagatttcacactgaaaattagcagagtggaggctgaggatttgggagtttattattgctggcaaggtacacattttcctcggacgttcggtggaggcaccaagctggaaatcaaacgggctgatgctgcaccaactgtatccatcttcccaccatccagtgagcagttaacatctggaggtgcctcagtcgtgtgcttcttgaacaacttctaccccaaagacatcaatgtcaagtggaagattgatggcagtgaacgacaaaatggcgtcctgaacagttggactgatcaggacagcaaagacagcacctacagcatgagcagcaccctcacgttgaccaaggacgagtatgaacgacataacagctatacctgtgaggccactcacaagacatcaacttcacccattgtcaagagcttcaacaggaatgagtgt

SEQ ID NO: 1820 - DNA, 2171 bp, Artificial Sequence
  Description of Artificial Sequence: Synthetic polynucleotide
gaggagccaccatgggatggagctggatctttctctttctcctgtcaggaactacaggtgtcctctctgaggtccagctgcaacagtctggacctgagctggtgaagcctggggcttcagtgaagatatcctgcaagacttctggatacacattcactgaatacaccatacactgggtgaagcagagccatggagagagccttgagtggattggaggtattaatccaaacgatggtggtactatttacaaccagaagttcaagggcaaggccacattgactgtagacaagtcctccaaaacagcctacatggagctccgcagcctgacatctgaggattctgcagtcttttactgtgcaagagggccctccgccaggtttccttactggggccaagggactctggtcactgtctctgcagccaaaacgacacccccatctgtctatccactggcccctggatctgctgcccaaactaactccatggtgaccctgggatgcctggtcaagggctatttccctgagccagtgacagtgacctggaactctggatccctgtccagcggtgtgcacaccttcccagctgtcctgcagtctgacctctacactctgagcagctcagtgactgtcccctccagcacctggcccagcgagaccgtcacctgcaacgttgcccacccggccagcagcaccaaggtggacaagaaaattgtgcccagggattgtggttgtaagccttgcatatgtacagtcccagaagtatcatctgtcttcatcttccccccaaagcccaaggatgtgctcaccattactctgactcctaaggtcacgtgtgttgtggtagacatcagcaaggatgatcccgaggtccagttcagctggtttgtagatgatgtggaggtgcacacagctcagacgcaaccccgggaggagcagttcaacagcactttccgctcagtcagtgaacttcccatcatgcaccaggactggctcaatggcaaggagttcaaatgcagggtcaacagtgcagctttccctgcccccatcgagaaaaccatctccaaaaccaaaggcagaccgaaggctccacaggtgtacaccattccacctcccaaggagcagatggccaaggataaagtcagtctgacctgcatgataacagacttcttccctgaagacattactgtggagtggcagtggaatgggcagccagcggagaactacaagaacactcagcccatcatggacacagatggctcttacttcgtctacagcaagctcaatgtgcagaagagcaactgggaggcaggaaatactttcacctgctctgtgttacatgagggcctgcacaaccaccatactgagaagagcctctcccactctcctggtagaaagaggcgagagggcagaggaagtcttctaacatgcggtgacgtggaggagaatcccggccctatgagtcctgcccagttcctgtttctgttagtgctctggattcgggaaaccaacggtgatgttgtgatgacccagactccactcactttgtcggttaccattggacaaccagcctccatctcttgcaagtcaagtcagagcctcttagatagtgatggaaagacatatttgaattggttgttacagaggccaggccagtctccaaagcgcctaatctatctggtgtctaaactggactctggagtccctgacagattcactggcagtggatcagggacagatttcacactgaaaattagcagagtggaggctgaggatttgggagtttattattgctggcaaggtacacattttcctcggacgttcggtggaggcaccaagctggaaatcaaacgggctgatgctgcaccaactgtatccatcttcccaccatccagtgagcagttaacatctggaggtgcctcagtcgtgtgcttcttgaacaacttctaccccaaagacatcaatgtcaagtggaagattgatggcagtgaacgacaaaatggcgtcctgaacagttggactgatcaggacagcaaagacagcacctacagcatgagcagcaccctcacgttgaccaaggacgagtatgaacgacataacagctatacctgtgaggccactcacaagacatcaacttcacccattgtcaagagcttcaacaggaatgagtgttag

SEQ ID NO: 1821 - DNA, 2171 bp, Artificial Sequence
  Description of Artificial Sequence: Synthetic polynucleotide
gaggagccaccatgagtcctgcccagttcctgtttctgttagtgctctggattcgggaaaccaacggtgatgttgtgatgacccagactccactcactttgtcggttaccattggacaaccagcctccatctcttgcaagtcaagtcagagcctcttagatagtgatggaaagacatatttgaattggttgttacagaggccaggccagtctccaaagcgcctaatctatctggtgtctaaactggactctggagtccctgacagattcactggcagtggatcagggacagatttcacactgaaaattagcagagtggaggctgaggatttgggagtttattattgctggcaaggtacacattttcctcggacgttcggtggaggcaccaagctggaaatcaaacgggctgatgctgcaccaactgtatccatcttcccaccatccagtgagcagttaacatctggaggtgcctcagtcgtgtgcttcttgaacaacttctaccccaaagacatcaatgtcaagtggaagattgatggcagtgaacgacaaaatggcgtcctgaacagttggactgatcaggacagcaaagacagcacctacagcatgagcagcaccctcacgttgaccaaggacgagtatgaacgacataacagctatacctgtgaggccactcacaagacatcaacttcacccattgtcaagagcttcaacaggaatgagtgtagaaagaggcgagagggcagaggaagtcttctaacatgcggtgacgtggaggagaatcccggccctatgggatggagctggatctttctctttctcctgtcaggaactacaggtgtcctctctgaggtccagctgcaacagtctggacctgagctggtgaagcctggggcttcagtgaagatatcctgcaagacttctggatacacattcactgaatacaccatacactgggtgaagcagagccatggagagagccttgagtggattggaggtattaatccaaacgatggtggtactatttacaaccagaagttcaagggcaaggccacattgactgtagacaagtcctccaaaacagcctacatggagctccgcagcctgacatctgaggattctgcagtcttttactgtgcaagagggccctccgccaggtttccttactggggccaagggactctggtcactgtctctgcagccaaaacgacacccccatctgtctatccactggcccctggatctgctgcccaaactaactccatggtgaccctgggatgcctggtcaagggctatttccctgagccagtgacagtgacctggaactctggatccctgtccagcggtgtgcacaccttcccagctgtcctgcagtctgacctctacactctgagcagctcagtgactgtcccctccagcacctggcccagcgagaccgtcacctgcaacgttgcccacccggccagcagcaccaaggtggacaagaaaattgtgcccagggattgtggttgtaagccttgcatatgtacagtcccagaagtatcatctgtcttcatcttccccccaaagcccaaggatgtgctcaccattactctgactcctaaggtcacgtgtgttgtggtagacatcagcaaggatgatcccgaggtccagttcagctggtttgtagatgatgtggaggtgcacacagctcagacgcaaccccgggaggagcagttcaacagcactttccgctcagtcagtgaacttcccatcatgcaccaggactggctcaatggcaaggagttcaaatgcagggtcaacagtgcagctttccctgcccccatcgagaaaaccatctccaaaaccaaaggcagaccgaaggctccacaggtgtacaccattccacctcccaaggagcagatggccaaggataaagtcagtctgacctgcatgataacagacttcttccctgaagacattactgtggagtggcagtggaatgggcagccagcggagaactacaagaacactcagcccatcatggacacagatggctcttacttcgtctacagcaagctcaatgtgcagaagagcaactgggaggcaggaaatactttcacctgctctgtgttacatgagggcctgcacaaccaccatactgagaagagcctctcccactctcctggttag

SEQ ID NO: 1822 - DNA, 1537 bp, Artificial Sequence
  Description of Artificial Sequence: Synthetic polynucleotide
ctgcgcgctcgctcgctcactgaggccgcccgggcaaagcccgggcgtcgggcgacctttggtcgcccggcctcagtgagcgagcgagcgcgcagagagggagtgtagccatgctctaggaagatcaattcaattcacgcgtccatggcttagaaggcaagaatcctggctgtggaaagatacctaaaggatcaacagctcctggggatttggggttgctctggaaaactcatttgcaccactgctgtgccttggaatgctagttggagtaataaatctctggaacagatttggaatcacacgacctggatggagtgggacagagaaattaacaattacacaagcttaatacactccttaattgaagaatcgcaaaaccagcaagaaaagaatgaacaagaattattggaattagataaatgggcaagtttgtggaattggtttaacataacaaattggctgtggtatataaaattattcataatgatagtaggaggcttggtaggtttaagaatagtttttgctgtactttctatagtgaatagagttaggcagggatattcaccattatcgtttcagacccacctcccaaccccgaggggacccgacaggcccgaaggaatagaagaagaaggtggagagagagacagagacagatccattcgattagtgaacggatctcgacggtatcgatcacgagactagcctcgagcggccgcaattcgaacgctgacgtcatcaacccgctccaaggaatcgcgggcccagtgtcactaggcgggaacacccagcgcgcgtgcgccctggcaggaagatggctgtgagggacagggagtggcgccctgcaatatttgcatgtcgctatgtgttctgggaaatcaccataaacgtgaaatgtctttggatttgggaatcttataagttctgtatgagaccacaccggtgaagcaaagaaggggcagagggagcccgtgagctgagtgggccagggactgggagaaggagtgaggaggcagggccggcatgcctctgctgctggccagaccccttaactcatttgttcccgtctgcacctgtcactagtaacagatgagttaaggggtttggccgtgtagtgctacccagcgctggctgcctcctcagcattgcaattcctctcccatctgggcaccagtcagctaccctggtgggaatctgggtagccctcgaggacggggtgaactacgcctgaggatccgatctttttccctctgccaaaaattatggggacatcatgaagccccttgagcatctgacttctggctaataaaggaaatttattttcattgcaatagtgtgttggaattttttgtgtctctcactcggcctaggtagataagtagcatggcgggttaatcattaactacaaggaacccctagtgatggagttggccactccctctctgcgcgctcgctcgctcactgaggccgggcgaccaaaggtcgcccgacgcccgggctttgcccgggcggcctcagtgagcgagcgagcgcgcag

SEQ ID NO: 1823 - protein, 743 aa, Artificial Sequence
  Description of Artificial Sequence: Synthetic polypeptide
MAADGYLPDWLEDNLSEGIREWWALKPGAPQPKANQQHQDNARGLVLPGYKYLGPGNGLDKGEPVNAADAAALEHDKAYDQQLKAGDNPYLKYNHADAEFQERLKEDTSFGGNLGRAVFQAKKRLLEPLGLVEEAAKTAPGKKRPVEQSPQEPDSSAGIGKSGAQPAKKRLNFGQTGDTESVPDPQPIGEPPAAPSGVGSLTMASGGGAPVADNNEGADGVGSSSGNWHCDSQWLGDRVITTSTRTWALPTYNNHLYKQISNSTSGGSSNDNAYFGYSTPWGYFDFNRFHCHFSPRDWQRLINNNWGFRPKRLNFKLFNIQVKEVTDNNGVKTIANNLTSTVQVFTDSDYQLPYVLGSAHEGCLPPFPADVFMIPQYGYLTLNDGSQAVGRSSFYCLEYFPSQMLRTGNNFQFSYEFENVPFHSSYAHSQSLDRLMNPLIDQYLYYLSKTINGSGQNQQTLKFSVAGPSNMAVQGRNYIPGPSYRQQRVSTTVTQNNNSEFAWPGASSWALNGRNSLMNPGPAMASHKEGEDRFFPLSGSLIFGKQGTGRDNVDADKVMITNEEEIKTTNPVATESYGQVATNHQSAQTLAVPFKAQAQTGWVQNQGILPGMVWQDRDVYLQGPIWAKIPHTDGNFHPSPLMGGFGMKHPPPQILIKNTPVPADPPTAFNKDKLNSFITQYSTGQVSVEIEWELQKENSKRWNPEIQYTSNYYKSNNVEFAVNTEGVYSEPRPIGTRYLTRNL

SEQ ID NO: 1824 - DNA, 2232 bp, Artificial Sequence
  Description of Artificial Sequence: Synthetic polynucleotide, capsid sequence
atggctgccgatggttatcttccagattggctcgaggacaaccttagtgaaggaattcgcgagtggtgggctttgaaacctggagcccctcaacccaaggcaaatcaacaacatcaagacaacgctcgaggtcttgtgcttccgggttacaaataccttggacccggcaacggactcgacaagggggagccggtcaacgcagcagacgcggcggccctcgagcacgacaaggcctacgaccagcagctcaaggccggagacaacccgtacctcaagtacaaccacgccgacgccgagttccaggagcggctcaaagaagatacgtcttttgggggcaacctcgggcgagcagtcttccaggccaaaaagaggcttcttgaacctcttggtctggttgaggaagcggctaagacggctcctggaaagaagaggcctgtagagcagtctcctcaggaaccggactcctccgcgggtattggcaaatcgggtgcacagcccgctaaaaagagactcaatttcggtcagactggcgacacagagtcagtcccagaccctcaaccaatcggagaacctcccgcagccccctcaggtgtgggatctcttacaatggcttcaggtggtggcgcaccagtggcagacaataacgaaggtgccgatggagtgggtagttcctcgggaaattggcattgcgattcccaatggctgggggacagagtcatcaccaccagcacccgaacctgggccctgcccacctacaacaatcacctctacaagcaaatctccaacagcacatctggaggatcttcaaatgacaacgcctacttcggctacagcaccccctgggggtattttgacttcaacagattccactgccacttctcaccacgtgactggcagcgactcatcaacaacaactggggattccggcctaagcgactcaacttcaagctcttcaacattcaggtcaaagaggttacggacaacaatggagtcaagaccatcgccaataaccttaccagcacggtccaggtcttcacggactcagactatcagctcccgtacgtgctcgggtcggctcacgagggctgcctcccgccgttcccagcggacgttttcatgattcctcagtacgggtatctgacgcttaatgatggaagccaggccgtgggtcgttcgtccttttactgcctggaatatttcccgtcgcaaatgctaagaacgggtaacaacttccagttcagctacgagtttgagaacgtacctttccatagcagctacgctcacagccaaagcctggaccgactaatgaatccactcatcgaccaatacttgtactatctctcaaggactattaacggttctggacagaatcaacaaacgctaaaattcagtgtggccggacccagcaacatggctgtccagggaagaaactacatacctggacccagctaccgacaacaacgtgtctcaaccactgtgactcaaaacaacaacagcgaatttgcttggcctggagcttcttcttgggctctcaatggacgtaatagcttgatgaatcctggacctgctatggccagccacaaagaaggagaggaccgtttctttcctttgtctggatctttaatttttggcaaacaaggaactggaagagacaacgtggatgcggacaaagtcatgataaccaacgaagaagaaattaaaactactaacccggtagcaacggagtcctatggacaagtggccacaaaccaccagagtggtggtacgttggcggtgccttttaaggcacaggcgcagaccggctgggttcaaaaccaaggaatacttccgggtatggtttggcaggacagagatgtgtacctgcaaggacccatttgggccaaaattcctcacacggacggcaactttcacccttctccgctgatgggagggtttggaatgaagcacccgcctcctcagatcctcatcaaaaacacacctgtacctgcggatcctccaacggccttcaacaaggacaagctgaactctttcatcacccagtattctactggccaagtcagcgtggagatcgagtgggagctgcagaaggaaaacagcaagcgctggaacccggagatccagtacacttccaactattacaagtctaataatgttgaatttgctgttaatactgaaggtgtatatagtgaaccccgccccattggcaccagatacctgactcgtaatctgtaa

SEQ ID NO: 1825 - DNA, 2232 bp, Artificial Sequence
  Description of Artificial Sequence: Synthetic polynucleotide, capsid sequence
atggctgccgatggttatcttccagattggctcgaggacaaccttagtgaaggaattcgcgagtggtgggctttgaaacctggagcccctcaacccaaggcaaatcaacaacatcaagacaacgctcgaggtcttgtgcttccgggttacaaataccttggacccggcaacggactcgacaagggggagccggtcaacgcagcagacgcggcggccctcgagcacgacaaggcctacgaccagcagctcaaggccggagacaacccgtacctcaagtacaaccacgccgacgccgagttccaggagcggctcaaagaagatacgtcttttgggggcaacctcgggcgagcagtcttccaggccaaaaagaggcttcttgaacctcttggtctggttgaggaagcggctaagacggctcctggaaagaagaggcctgtagagcagtctcctcaggaaccggactcctccgcgggtattggcaaatcgggtgcacagcccgctaaaaagagactcaatttcggtcagactggcgacacagagtcagtcccagaccctcaaccaatcggagaacctcccgcagccccctcaggtgtgggatctcttacaatggcttcaggtggtggcgcaccagtggcagacaataacgaaggtgccgatggagtgggtagttcctcgggaaattggcattgcgattcccaatggctgggggacagagtcatcaccaccagcacccgaacctgggccctgcccacctacaacaatcacctctacaagcaaatctccaacagcacatctggaggatcttcaaatgacaacgcctacttcggctacagcaccccctgggggtattttgacttcaacagattccactgccacttctcaccacgtgactggcagcgactcatcaacaacaactggggattccggcctaagcgactcaacttcaagctcttcaacattcaggtcaaagaggttacggacaacaatggagtcaagaccatcgccaataaccttaccagcacggtccaggtcttcacggactcagactatcagctcccgtacgtgctcgggtcggctcacgagggctgcctcccgccgttcccagcggacgttttcatgattcctcagtacgggtatctgacgcttaatgatggaagccaggccgtgggtcgttcgtccttttactgcctggaatatttcccgtcgcaaatgctaagaacgggtaacaacttccagttcagctacgagtttgagaacgtacctttccatagcagctacgctcacagccaaagcctggaccgactaatgaatccactcatcgaccaatacttgtactatctctcaaggactattaacggttctggacagaatcaacaaacgctaaaattcagtgtggccggacccagcaacatggctgtccagggaagaaactacatacctggacccagctaccgacaacaacgtgtctcaaccactgtgactcaaaacaacaacagcgaatttgcttggcctggagcttcttcttgggctctcaatggacgtaatagcttgatgaatcctggacctgctatggccagccacaaagaaggagaggaccgtttctttcctttgtctggatctttaatttttggcaaacaaggaactggaagagacaacgtggatgcggacaaagtcatgataaccaacgaagaagaaattaaaactactaacccggtagcaacggagtcctatggacaagtggccacaaaccaccagagtgatgggactttggcgacgccgtttaaggcacaggcgcagaccggctgggttcaaaaccaaggaatacttccgggtatggtttggcaggacagagatgtgtacctgcaaggacccatttgggccaaaattcctcacacggacggcaactttcacccttctccgctgatgggagggtttggaatgaagcacccgcctcctcagatcctcatcaaaaacacacctgtacctgcggatcctccaacggccttcaacaaggacaagctgaactctttcatcacccagtattctactggccaagtcagcgtggagatcgagtgggagctgcagaaggaaaacagcaagcgctggaacccggagatccagtacacttccaactattacaagtctaataatgttgaatttgctgttaatactgaaggtgtatatagtgaaccccgccccattggcaccagatacctgactcgtaatctgtaa

SEQ ID NO: 1826 - DNA, 4327 bp, Artificial Sequence
  Description of Artificial Sequence: Synthetic polynucleotide
cctgcaggcagctgcgcgctcgctcgctcactgaggccgcccgggcaaagcccgggcgtcgggcgacctttggtcgcccggcctcagtgagcgagcgagcgcgcagagagggagtggccaactccatcactaggggttccttgtagttaatgattaacccgccatgctacttatctacgtagccatgcgtcgacataacgcgtcgacattgattattgactagttattaatagtaatcaattacggggtcattagttcatagcccatatatggagttccgcgttacataacttacggtaaatggcccgcctggctgaccgcccaacgacccccgcccattgacgtcaataatgacgtatgttcccatagtaacgccaatagggactttccattgacgtcaatgggtggagtatttacggtaaactgcccacttggcagtacatcaagtgtatcatatgccaagtacgccccctattgacgtcaatgacggtaaatggcccgcctggcattatgcccagtacatgaccttatgggactttcctacttggcagtacatctacgtattagtcatcgctattaccatgtcgaggccacgttctgcttcactctccccatctcccccccctccccacccccaattttgtatttatttattttttaattattttgtgcagcgatgggggcggggggggggggcgcgcgccaggcggggcggggcggggcgaggggcggggcggggcgaggcggagaggtgcggcggcagccaatcagagcggcgcgctccgaaagtttccttttatggcgaggcggcggcggcggcggccctataaaaagcgaagcgcgcggcgggcgggagcaagcttcgtttagtgaaccgtcagatcgcctggagacgccatccacgctgttttgacctccatagaagacaccgggaccgatccagcctccgcggattcgaatcccggccgggaacggtgcattggaacgcggattccccgtgccaagagtgacgtaagtaccgcctatagagtctataggcccacaaaaaatgctttcttcttttaatatacttttttgtttatcttatttctaatactttccctaatctctttctttcagggcaataatgatacaatgtatcatgcctctttgcaccattctaaagaataacagtgataatttctgggttaaggcaatagcaatatttctgcatataaatatttctgcatataaattgtaactgatgtaagaggtttcatattgctaatagcagctacaatccagctaccattctgcttttattttatggttgggataaggctggattattctgagtccaagctaggcccttttgctaatcatgttcatacctcttatcttcctcccacagctcctgggcaacgtgctggtctgtgtgctggcccatcactttggcaaagaattgggattcgaaccggtatgtggactttcgggcgccgcgcagttgccggcctcctggcgtccccgagcccggcccaggcccagaccctcacccgggccccgcggctggcagagttggcccagctctgcagccgccggggcctgcgcaccggcatcaatgcgacctgcacaacccaccacaccagttcgaacctccgtggcctcaaccagattcggaatgtcaaaaggcagagtgtctacttgatgaatttgaggaaatcgggaactttgggccacccaggctctctagatgacaccacctatgaaagactagcagaggaaacgctggactctttagcagagttttttgaagaccttgcagacaagccatacacctttgaggactatgatgtttcctttgggagtggtgtcttaactgttaaactgggtggagatctaggaacctacgtgatcaacaagcagacgccaaacaagcaaatctggttatcttctccatccagtggacccaagcgttatgactggactgggaaaaactgggtgtattcccacgacggcgtttccctccatgagctgctgggcgcagagctcactaaagccttaaaaaccaaactggacttgtcttccttggcctattccggaaaagacgcttatccttatgacgtgcctgactatgcctgatgactcgaggacggggtgaactacgcctgaggatgggtggcatccctgtgacccctccccagtgcctctcctggccctggaagttgccactccagtgcccaccagccttgtcctaataaaattaagttgcatcattttgtctgactaggtgtccttctataatattatggggtggaggggggtggtatggagcaaggggcaagttgggaagacaacctgtagggcctgcggggtctattgggaaccaagctggagtgcagtggcacaatcttggctcactgcaatctccgcctcctgggttcaagcgattctcctgcctcagcctcccgagttgttgggattccaggcatgcatgaccaggctcagctaatttttgtttttttggtagagacggggtttcaccatattggccaggctggtctccaactcctaatctcaggtgatctacccaccttggcctcccaaattgctgggattacaggcgtgaaccactgctcccttccctgtccttggcctaggtttcttgagacctctacaagagttggagttgacacttggggtactttcttggtgtaacgaactaatagcctgaaaaaaagaagtcatgtgttttcagcaaggcaagaaactgtctaacatagtagataaaacagagaacacttggccggaatcaactaagatgttgctatgttccattcatcatattatctccatctgcagagtagtgggttagtggagggtagaaaacattctcctgaacaactagttaaacttggctttgagttccacctgtaccacttgcataatcttgggaaagtgagttgcctaattcagtgacattaataaatttattaatttcttctttcaataaaacctggagagagcttcatatgtatcagcatatgctaaacttgaaagatacaagtagaaaatggaaggaaatatatctgactcaatagggatagttcaagggttaaattaaaagtagtaaagtattataattaatctgacatggtacctaatatataataatcatgtattaagaatgccagtcaccattaaaagtcaatgtatgactttaatctactcgaggaaagaaactatgtcttgttcactgttattatctctaaaatccataatcagaagagcaccatgtgtatgagccacacaataaatatctactgtataatatgtctcttcttgtttttaaccttcatagataagactctattgaattgggacattagtccagcaagccattctgtctctgtctcttctatggagggaaaggtttaaccatcaaagactaggtgcatctcccaaacaacctgaatttaatattcaaatatgtatctaaattcatttgttacatttttgtgttcagcttacatattactttttgagcgacatctattcaaggcctactacttgctgctctacaaaatattgccatgctctatttgcccattaactatttcttaaccttcaagggacatgctcagttctgatataccaagatttggtatttaccctcccagcctacatacttccaatcttaagagaacaatttttagactacattcaaatatagacctctccaccccatcaactattttatctctcctctcctatctttcttgacaaagagtgattagaaatatgcaatgtattttcattcttaaaagttctatgctaggtggctcatatattaagtcttaaataattacaaattgataaaaaaaatcagtcaataaaaattacttacgcattctggaatttgtactctccaagctgctcaaaaagctcacaattttgtttgattaaattctgaggctcttccacaagaggtttaaattcatcgaactgaaacataaaagaattgtgttaatagtattatgcctcaggatcagatgcaggttgtttttcacccctctggtcagaatgatatcctttcttcttcctactcaaagccacatgaatagatgaatatcaatgccgctctgtcacaatacattcgaaatcgatgctacgtagataagtagcatggcgggttaatcattaactacagaggaacccctagtgatggagttggccactccctctctgcgcgctcgctcgctcactgaggccgggcgaccaaaggtcgcccgacgcccgggctttgcccgggcggcctcagtgagcgagcgagcgcgcagctgcctgcagg

SEQ ID NO: 1827 - DNA, 2828 bp, Artificial Sequence
  Description of Artificial Sequence: Synthetic polynucleotide
cctgcaggcagctgcgcgctcgctcgctcactgaggccgcccgggcaaagcccgggcgtcgggcgacctttggtcgcccggcctcagtgagcgagcgagcgcgcagagagggagtggccaactccatcactaggggttccttgtagttaatgattaacccgccatgctacttatctacgtagccatgcgtcgacataacgcgtcgacattgattattgactagttattaatagtaatcaattacggggtcattagttcatagcccatatatggagttccgcgttacataacttacggtaaatggcccgcctggctgaccgcccaacgacccccgcccattgacgtcaataatgacgtatgttcccatagtaacgccaatagggactttccattgacgtcaatgggtggagtatttacggtaaactgcccacttggcagtacatcaagtgtatcatatgccaagtacgccccctattgacgtcaatgacggtaaatggcccgcctggcattatgcccagtacatgaccttatgggactttcctacttggcagtacatctacgtattagtcatcgctattaccatgtcgaggccacgttctgcttcactctccccatctcccccccctccccacccccaattttgtatttatttattttttaattattttgtgcagcgatgggggcggggggggggggcgcgcgccaggcggggcggggcggggcgaggggcggggcggggcgaggcggagaggtgcggcggcagccaatcagagcggcgcgctccgaaagtttccttttatggcgaggcggcggcggcggcggccctataaaaagcgaagcgcgcggcgggcgggagcaagcttcgtttagtgaaccgtcagatcgcctggagacgccatccacgctgttttgacctccatagaagacaccgggaccgatccagcctccgcggattcgaatcccggccgggaacggtgcattggaacgcggattccccgtgccaagagtgacgtaagtaccgcctatagagtctataggcccacaaaaaatgctttcttcttttaatatacttttttgtttatcttatttctaatactttccctaatctctttctttcagggcaataatgatacaatgtatcatgcctctttgcaccattctaaagaataacagtgataatttctgggttaaggcaatagcaatatttctgcatataaatatttctgcatataaattgtaactgatgtaagaggtttcatattgctaatagcagctacaatccagctaccattctgcttttattttatggttgggataaggctggattattctgagtccaagctaggcccttttgctaatcatgttcatacctcttatcttcctcccacagctcctgggcaacgtgctggtctgtgtgctggcccatcactttggcaaagaattgggattcgaaccggtatgtggactttcgggcgccgcgcagttgccggcctcctggcgtccccgagcccggcccaggcccagaccctcacccgggccccgcggctggcagagttggcccagctctgcagccgccggggcctgcgcaccggcatcaatgcgacctgcacaacccaccacaccagttcgaacctccgtggcctcaaccagattcggaatgtcaaaaggcagagtgtctacttgatgaatttgaggaaatcgggaactttgggccacccaggctctctagatgacaccacctatgaaagactagcagaggaaacgctggactctttagcagagttttttgaagaccttgcagacaagccatacacctttgaggactatgatgtttcctttgggagtggtgtcttaactgttaaactgggtggagatctaggaacctacgtgatcaacaagcagacgccaaacaagcaaatctggttatcttctccatccagtggacccaagcgttatgactggactgggaaaaactgggtgtattcccacgacggcgtttccctccatgagctgctgggcgcagagctcactaaagccttaaaaaccaaactggacttgtcttccttggcctattccggaaaagacgcttatccttatgacgtgcctgactatgcctgatgactcgaggacggggtgaactacgcctgaggatgggtggcatccctgtgacccctccccagtgcctctcctggccctggaagttgccactccagtgcccaccagccttgtcctaataaaattaagttgcatcattttgtctgactaggtgtccttctataatattatggggtggaggggggtggtatggagcaaggggcaagttgggaagacaacctgtagggcctgcggggtctattgggaaccaagctggagtgcagtggcacaatcttggctcactgcaatctccgcctcctgggttcaagcgattctcctgcctcagcctcccgagttgttgggattccaggcatgcatgaccaggctcagctaatttttgtttttttggtagagacggggtttcaccatattggccaggctggtctccaactcctaatctcaggtgatctacccaccttggcctcccaaattgctgggattacaggcgtgaaccactgctcccttccctgtccttggcctaggtatcgatgctacgtagataagtagcatggcgggttaatcattaactacagaggaacccctagtgatggagttggccactccctctctgcgcgctcgctcgctcactgaggccgggcgaccaaaggtcgcccgacgcccgggctttgcccgggcggcctcagtgagcgagcgagcgcgcagctgcctgcagg

SEQ ID NO: 1828 - DNA, 2232 bp, Artificial Sequence
  Description of Artificial Sequence: Synthetic polynucleotide
atggctgccgatggttatcttccagattggctcgaggacaaccttagtgaaggaattcgcgagtggtgggctttgaaacctggagcccctcaacccaaggcaaatcaacaacatcaagacaacgctcgaggtcttgtgcttccgggttacaaataccttggacccggcaacggactcgacaagggggagccggtcaacgcagcagacgcggcggccctcgagcacgacaaggcctacgaccagcagctcaaggccggagacaacccgtacctcaagtacaaccacgccgacgccgagttccaggagcggctcaaagaagatacgtcttttgggggcaacctcgggcgagcagtcttccaggccaaaaagaggcttcttgaacctcttggtctggttgaggaagcggctaagacggctcctggaaagaagaggcctgtagagcagtctcctcaggaaccggactcctccgcgggtattggcaaatcgggtgcacagcccgctaaaaagagactcaatttcggtcagactggcgacacagagtcagtcccagaccctcaaccaatcggagaacctcccgcagccccctcaggtgtgggatctcttacaatggcttcaggtggtggcgcaccagtggcagacaataacgaaggtgccgatggagtgggtagttcctcgggaaattggcattgcgattcccaatggctgggggacagagtcatcaccaccagcacccgaacctgggccctgcccacctacaacaatcacctctacaagcaaatctccaacagcacatctggaggatcttcaaatgacaacgcctacttcggctacagcaccccctgggggtattttgacttcaacagattccactgccacttctcaccacgtgactggcagcgactcatcaacaacaactggggattccggcctaagcgactcaacttcaagctcttcaacattcaggtcaaagaggttacggacaacaatggagtcaagaccatcgccaataaccttaccagcacggtccaggtcttcacggactcagactatcagctcccgtacgtgctcgggtcggctcacgagggctgcctcccgccgttcccagcggacgttttcatgattcctcagtacgggtatctgacgcttaatgatggaagccaggccgtgggtcgttcgtccttttactgcctggaatatttcccgtcgcaaatgctaagaacgggtaacaacttccagttcagctacgagtttgagaacgtacctttccatagcagctacgctcacagccaaagcctggaccgactaatgaatccactcatcgaccaatacttgtactatctctcaaggactattaacggttctggacagaatcaacaaacgctaaaattcagtgtggccggacccagcaacatggctgtccagggaagaaactacatacctggacccagctaccgacaacaacgtgtctcaaccactgtgactcaaaacaacaacagcgaatttgcttggcctggagcttcttcttgggctctcaatggacgtaatagcttgatgaatcctggacctgctatggccagccacaaagaaggagaggaccgtttctttcctttgtctggatctttaatttttggcaaacaaggaactggaagagacaacgtggatgcggacaaagtcatgataaccaacgaagaagaaattaaaactactaacccggtagcaacggagtcctatggacaagtggccacaaaccaccagagtgagtctactttggcggtgccttttaaggcacaggcgcagaccggctgggttcaaaaccaaggaatacttccgggtatggtttggcaggacagagatgtgtacctgcaaggacccatttgggccaaaattcctcacacggacggcaactttcacccttctccgctgatgggagggtttggaatgaagcacccgcctcctcagatcctcatcaaaaacacacctgtacctgcggatcctccaacggccttcaacaaggacaagctgaactctttcatcacccagtattctactggccaagtcagcgtggagatcgagtgggagctgcagaaggaaaacagcaagcgctggaacccggagatccagtacacttccaactattacaagtctaataatgttgaatttgctgttaatactgaaggtgtatatagtgaaccccgccccattggcaccagatacctgactcgtaatctgtaa

SEQ ID NO: 1829 - protein, 743 aa, Artificial Sequence
  Description of Artificial Sequence: Synthetic polypeptide
MAADGYLPDWLEDNLSEGIREWWALKPGAPQPKANQQHQDNARGLVLPGYKYLGPGNGLDKGEPVNAADAAALEHDKAYDQQLKAGDNPYLKYNHADAEFQERLKEDTSFGGNLGRAVFQAKKRLLEPLGLVEEAAKTAPGKKRPVEQSPQEPDSSAGIGKSGAQPAKKRLNFGQTGDTESVPDPQPIGEPPAAPSGVGSLTMASGGGAPVADNNEGADGVGSSSGNWHCDSQWLGDRVITTSTRTWALPTYNNHLYKQISNSTSGGSSNDNAYFGYSTPWGYFDFNRFHCHFSPRDWQRLINNNWGFRPKRLNFKLFNIQVKEVTDNNGVKTIANNLTSTVQVFTDSDYQLPYVLGSAHEGCLPPFPADVFMIPQYGYLTLNDGSQAVGRSSFYCLEYFPSQMLRTGNNFQFSYEFENVPFHSSYAHSQSLDRLMNPLIDQYLYYLSRTINGSGQNQQTLKFSVAGPSNMAVQGRNYIPGPSYRQQRVSTTVTQNNNSEFAWPGASSWALNGRNSLMNPGPAMASHKEGEDRFFPLSGSLIFGKQGTGRDNVDADKVMITNEEEIKTTNPVATESYGQVATNHQSESTLAVPFKAQAQTGWVQNQGILPGMVWQDRDVYLQGPIWAKIPHTDGNFHPSPLMGGFGMKHPPPQILIKNTPVPADPPTAFNKDKLNSFITQYSTGQVSVEIEWELQKENSKRWNPEIQYTSNYYKSNNVEFAVNTEGVYSEPRPIGTRYLTRNL

1. An adeno-associated viral (AAV) particle comprising a capsid and a viral genome, wherein said capsid penetrates the blood brain barrier following delivery of the AAV particle, wherein the capsid comprises VOY701.

2. The AAV particle of claim 1, wherein the capsid comprises a nucleic acid of SEQ ID NO. 1828.

3. The AAV particle of claim 1, wherein the amino acid sequence of the capsid is SEQ ID NO: 1829.

4. An AAV particle comprising a capsid and a viral genome, wherein said capsid penetrates the blood brain barrier following delivery of the AAV particle, wherein the amino acid sequence of the capsid is at least 95% identical to SEQ ID NO: 1829.

5. The AAV particle of claim 4, wherein the amino acid sequence of the capsid is at least 99% identical to SEQ ID NO: 1829.

6. The AAV particle of any of claims 1-5, wherein the viral genome comprises a nucleic acid sequence positioned between two inverted terminal repeats (ITRs), wherein said nucleic acid sequence when expressed inhibits or suppresses the expression of one or more genes of interest in a cell, wherein for each gene of interest said nucleic acid sequence comprises a sense strand sequence and an antisense strand sequence, and wherein for each gene of interest said sense sequence and antisense strand sequence share a region of complementarity of at least four nucleotides in length.

7. The AAV particle of claim 6, wherein said nucleic acid sequence when expressed inhibits or suppresses the expression of a gene of interest in a cell, wherein for the gene of interest said nucleic acid sequence comprises a sense strand sequence and an antisense strand sequence, and wherein for the gene of interest said sense sequence and antisense strand sequence share a region of complementarity of at least four nucleotides in length.

8. The AAV particle of claim 6, wherein said nucleic acid sequence when expressed inhibits or suppresses the expression of two genes of interest in a cell, wherein for each gene of interest said nucleic acid sequence comprises a sense strand sequence and an antisense strand sequence, and wherein for each gene of interest said sense sequence and antisense strand sequence share a region of complementarity of at least four nucleotides in length.

9. The AAV particle of claim 6, wherein said nucleic acid sequence when expressed inhibits or suppresses the expression of three, four, or five genes of interest in a cell, wherein for each gene of interest said nucleic acid sequence comprises a sense strand sequence and an antisense strand sequence, and wherein for each gene of interest said sense sequence and antisense strand sequence share a region of complementarity of at least four nucleotides in length.

10. The AAV particle of any one of claims 6-9, wherein for gene(s) of interest, the nucleic acid sequence comprises a sense strand sequence and an antisense strand sequence of an siRNA duplex.

11. The AAV particle of any one of claim 6-9, wherein the region of complementarity is at least 12 nucleotides in length.

12. The AAV particle of claim 11, wherein the region of complementarity is at least 17 nucleotides in length.

13. The AAV particle of any one of claims 6-9, wherein the region of complementarity is between 14 and 21 nucleotides in length.

14. The AAV particle of claim 10, wherein the region of complementarity is 19 nucleotides in length.

15. The AAV particle of any one of claims 6-9, wherein for the gene(s) of interest, the sense strand sequence and the antisense strand sequence are, independently, 30 nucleotides or less.

16. The AAV particle of any one of claims 6-9, wherein for the gene(s) of interest, at least one of the sense strand sequence and the antisense strand sequence comprise a 3′ overhang of at least 1 nucleotide.

17. The AAV particle of claim 16, wherein for the gene(s) of interest, at least one of the sense strand sequence and the antisense strand sequence comprise a 3′ overhang of at least 2 nucleotides.

18. The AAV particle of any one of claims 6-17, wherein the gene(s) of interest are superoxide dismutase 1 (SOD1), chromosome 9 open reading frame 72 (C9ORF72), TAR DNA binding protein (TARDBP), ataxin-3 (ATXN3), huntingtin (HTT), amyloid precursor protein (APP), apolipoprotein E (ApoE), microtubule-associated protein tau (MAPT), alpha-synuclein (SNCA), voltage-gated sodium channel alpha subunit 9 (SCN9A), and/or voltage-gated sodium channel alpha subunit 10 (SCN10A).

19. A method for decreasing or inhibiting the expression of a target gene of interest in a cell comprising administering to the cell a composition comprising an AAV particle of any of claims 1-18.

20. The method of claim 19, wherein the cell is a mammalian cell.

21. The method of claim 20, wherein the mammalian cell is a cell of the central nervous system.

22. The method of claim 20 wherein the mammalian cell is a cell of the peripheral nervous system.

23. The method of claim 20 wherein the mammalian cell is a cell of the peripheral nervous system that has a nerve terminal within the central nervous system.

24. The method of claim 21, wherein the cell is a cell of the cortex, brainstem, cerebellum, spinal cord, thalamus, striatum, substantia nigra, caudate nucleus, olivary nucleus, or lateral geniculate nucleus.

25. The method of claim 22, wherein the cell is a cell of a sensory ganglion.

26. The method of claim 22, wherein the cell is a cell of a dorsal root ganglion or a trigeminal ganglion.

27. The method of claim 24, wherein the cell of the spinal cord is a motor neuron.

28. The method of claim 24, wherein the cell of the spinal cord is an astrocyte.

29. The method of claim 24, wherein the cell of the brainstem is a neuron.

30. The method of claim 24, wherein the cell of the cerebellum is a dentate nucleus neuron.

31. The method of claim 24, wherein the cell of the cortex is a sensory cortex, motor cortex, or frontal cortex cell.

32. The method of claim 24, wherein the cell of the cortex is a neuron.

33. The method of claim 24, wherein the cell of the cortex is a pyramidal neuron.

34. The method of claim 24, wherein the cell of the cortex is an astrocyte.

35. The method of claim 24, wherein the cell of the cortex is an upper motor neuron.

36. The method of claim 24, wherein the cell of the substantia nigra is a neuron.

37. The method of claim 24, wherein the cell of the substantia nigra is a dopaminergic neuron.

38. The AAV particle of any of claims 1-5, wherein the viral genome comprises a nucleic acid sequence positioned between two inverted terminal repeats (ITRs), wherein said nucleic acid encodes and expresses a protein of interest in a cell.

39. The AAV particle of claim 38, wherein the protein of interest is selected from the group consisting of, an antibody, Aromatic L-Amino Acid Decarboxylase (AADC), ApoE2, Frataxin, survival motor neuron (SMN) protein, glucocerebrosidase, N-sulfoglucosamine sulfohydrolase, N-acetyl-alpha-glucosaminidase, iduronate 2-sulfatase, alpha-L-iduronidase, palmitoyl-protein thioesterase 1, tripeptidyl peptidase 1, battenin, CLN5, CLN6 (linclin), MFSD8, CLN8, aspartoacylase (ASPA), progranulin (GRN), MeCP2, beta-galactosidase (GLB1), and gigaxonin (GAN).

40. A method for increasing the level of a protein of interest in a cell comprising administering to the cell a composition comprising an AAV particle of any of claims 1-5, wherein the viral genome comprises a nucleic acid sequence that encodes and expresses the protein of interest in the cell, or a composition comprising an AAV particle of any of claims 38-39.

41. The method of claim 40, wherein the cell is a mammalian cell.

42. The method of claim 41, wherein the mammalian cell is a cell of the central nervous system.

43. The method of claim 41, wherein the mammalian cell is a cell of the peripheral nervous system.

44. The method of claim 41, wherein the mammalian cell is a cell of the peripheral nervous system that has a nerve terminal within the central nervous system.

45. The method of claim 41, wherein the cell is a cell of the cortex, brainstem, cerebellum, spinal cord, thalamus, striatum, substantia nigra, caudate nucleus, olivary nucleus, or lateral geniculate nucleus.

46. The method of claim 43, wherein the cell is a cell of a sensory ganglion.

47. The method of claim 46, wherein the cell is a cell of the dorsal root ganglion or trigeminal ganglion.

48. The method of claim 45, wherein the cell of the spinal cord is a motor neuron.

49. The method of claim 45, wherein the cell of the spinal cord is an astrocyte.

50. The method of claim 45, wherein the cell of the brainstem is a neuron.

51. The method of claim 45, wherein the cell of the cerebellum is a dentate nucleus neuron.

52. The method of claim 45, wherein the cell of the cortex is a sensory cortex, motor cortex, or frontal cortex cell.

53. The method of claim 45, wherein the cell of the cortex is a neuron.

54. The method of claim 45, wherein the cell of the cortex is a pyramidal neuron.

55. The method of claim 45, wherein the cell of the cortex is an astrocyte.

56. The method of claim 45, wherein the cell of the cortex is an upper motor neuron.

57. The method of claim 45, wherein the cell of the substantia nigra is a neuron.

58. The method of claim 45, wherein the cell of the substantia nigra is a dopaminergic neuron.

59. The method of any one of claims 40-58, wherein the protein of interest is selected from the group consisting of, an antibody, Aromatic L-Amino Acid Decarboxylase (AADC), ApoE2, Frataxin, survival motor neuron (SMN) protein, glucocerebrosidase, N-sulfoglucosamine sulfohydrolase, N-acetyl-alpha-glucosaminidase, iduronate 2-sulfatase, alpha-L-iduronidase, palmitoyl-protein thioesterase 1, tripeptidyl peptidase 1, battenin, CLN5, CLN6 (linclin), MFSD8, CLN8, aspartoacylase (ASPA), progranulin (GRN), MeCP2, beta-galactosidase (GLB1), and gigaxonin (GAN).

60. A method for treating and/or ameliorating a neurological disease in a subject in need of treatment, the method comprising administering to the subject a therapeutically effective amount of a composition comprising an AAV particle of any of claims 1-18.

61. The method of claim 60, wherein the subject is administered the composition comprising the AAV particle by intravenous delivery.

62. The method of claim 60, wherein the subject is administered the composition comprising the AAV particle by intracarotid artery delivery.

63. The method of any one of claims 60-62, wherein 1×10¹² vector genomes (vg)/kg to 1.5×10¹⁴ vg/kg of the AAV particle is administered to the individual.

64. The method of claim 63, wherein 1×10¹² vg/kg to 1.5×10¹² vg/kg of the AAV particle is administered to the individual.

65. The method of claim 64, wherein 1×10¹² vg/kg of the AAV particle is administered to the individual.

66. The method of claim 63, wherein 1.5×10¹³ vg/kg to 2.5×10¹³ vg/kg of the AAV particle is administered to the individual.

67. The method of claim 66, wherein 2.0×10¹³ vg/kg of the AAV particle is administered to the individual.

68. The method of claim 63, wherein 4.0×10¹³ vg/kg to 5.0×10¹³ vg/kg of the AAV particle is administered to the individual.

69. The method of claim 63, wherein 1.0×10¹⁴ vg/kg to 1.5×10¹⁴ vg/kg of the AAV particle is administered to the individual.

70. The method of claim 69, wherein 1.2×10¹⁴ vg/kg of the AAV particle is administered to the individual.

71. The method of any one of claims 60-70, wherein the AAV particles comprises a nucleic acid sequence that encodes a siRNA molecule.

72. The method of claim 71, wherein the siRNA molecule targets a gene of interest, wherein the gene of interest is selected from the group consisting of, SOD1, C9ORF72, TARDBP, ATXN3, HTT, APP, ApoE, MAPT, SNCA, SCN9A, and SCN10A.

73. A method for treating and/or ameliorating a neurological disease in a subject in need of treatment, the method comprising administering to the subject a therapeutically effective amount of a composition comprising an AAV particle of any of claims 1-5, wherein the viral genome comprises a nucleic acid sequence that encodes a protein of interest.

74. The method of claim 73, wherein the subject is administered the composition comprising the AAV particle by intravenous delivery.

75. The method of claim 74, wherein the subject is administered the composition comprising the AAV particle by intracarotid artery delivery.

76. The method of any one of claims 73-75, wherein 1×10¹² vg/kg to 1.5×10¹⁴ vg/kg of the AAV particle is administered to the individual.

77. The method of claim 73 wherein 1×10¹² vg/kg to 1.5×10¹² vg/kg of the AAV particle is administered to the individual.

78. The method of claim 77, wherein 1×10¹² vg/kg of the AAV particle is administered to the individual.

79. The method of claim 76, wherein 1.5×10¹³ vg/kg to 2.5×10¹³ vg/kg of the AAV particle is administered to the individual.

80. The method of claim 79, wherein 2.0×10¹³ vg/kg of the AAV particle is administered to the individual.

81. The method of claim 76, wherein 4.0×10¹³ vg/kg to 5.0×10¹³ vg/kg of the AAV particle is administered to the individual.

82. The method of claim 76, wherein 1.0×10¹⁴ vg/kg to 1.5×10¹⁴ vg/kg of the AAV particle is administered to the individual.

83. The method of claim 82, wherein 1.2×10¹⁴ vg/kg of the AAV particle is administered to the individual.

84. The method of any one of claims 73-83, wherein the protein is selected from the group consisting of, an antibody, AADC, ApoE, Frataxin, survival motor neuron (SMN) protein, glucocerebrosidase, N-sulfoglucosamine sulfohydrolase, N-acetyl-alpha-glucosaminidase, iduronate 2-sulfatase, alpha-L-iduronidase, palmitoyl-protein thioesterase 1, tripeptidyl peptidase 1, battenin, CLN5, CLN6 (linclin), MFSD8, CLN8, ASPA, GRN, MeCP2, GLB1, and GAN.

85. The method of claim 84, wherein the ApoE is ApoE2.

86. A pharmaceutical composition comprising an AAV particle of any one of claims 1-18, wherein said AAV particle comprises an AAV capsid and a viral genome, and said viral genome comprises a nucleic acid sequence that, when expressed in a cell, inhibits or suppresses the expression of one or more genes of interest in the cell.

87. The pharmaceutical composition of claim 86, wherein the nucleic sequence encodes an siRNA molecule.

88. The pharmaceutical composition of claim 87, wherein the siRNA molecule targets a gene of interest, wherein the gene of interest is selected from the group consisting of SOD1, C9ORF72, TARDBP, ATXN3, HTT, APP, APOE, MAPT, SNCA, SCN9A, and SCN10A.

89. A pharmaceutical composition comprising an AAV particle of any one of claims 1-5, wherein said AAV particle comprises an AAV capsid and a viral genome, and said viral genome encodes a protein of interest.

90. The pharmaceutical of claim 89, wherein the protein is selected from the group consisting of, an antibody, AADC, ApoE2, Frataxin, survival motor neuron (SMN) protein, glucocerebrosidase, N-sulfoglucosamine sulfohydrolase, N-acetyl-alpha-glucosaminidase, iduronate 2-sulfatase, alpha-L-iduronidase, palmitoyl-protein thioesterase 1, tripeptidyl peptidase 1, battenin, CLN5, CLN6 (linclin), MFSD8, CLN8, ASPA, GRN, MeCP2, GLB1, and GAN.

91. A method of decreasing the level of a protein of interest in the CNS or PNS of a subject comprising administering the pharmaceutical composition of any one of claims 86-88.

92. The method of claim 91, wherein the route of administration is intravenous administration.

93. The method of claim 91, wherein the route of administration is intracarotid artery administration.

94. A method of increasing the level of a protein of interest in the CNS of a subject comprising administering the pharmaceutical composition of claim 89 or 90.

95. The method of claim 94, wherein the route of administration is intravenous administration.

96. The method of claim 95, wherein the route of administration is intracarotid artery administration.
